United States Patent Application Publication US 2010/0064393 A1 - sequence listing, part 3

SEQ ID NO: 81 - DNA, 924 bp, Bacillus licheniformis
atggttcgcgttgcaaactctgtttatgacttaatcggaaatacacctgtcgttaaattaaatcgactagttgatgaagacagtgctgaagtatatgtgaaactggagtatatgaaccctggaagcagcgtaaaagaccggattgcgcttgctatgatagaagacgctgaagagaaaggccttctgaaagaaggagatacactgattgaaccgacaagcggaaatacaggaatcggacttgccatggtcgctgcagcgaaaggcatcaaagcgattcttgttatgcctgatacaatgagttctgagcgccgcaaccttctgcgtgcatatggagctgagcttgtgctgactccaggtgctgagggaatgaaaggcgcgattaaaaaagcggaagaactggctgaggaacacggctattttatgcctcagcaatttaacaaccctgcgaacgcagaagttcaccgccgcacgacgggaaaagaaatcgctgaacaattcggagacggtttagatgctttcattgcaggtatcggaaccggcggaacgataacgggtgccggagaagttctgaaagaaaaaaatccgtccatcaagattttcgcggtggaaccgactgattctcctgttctttccggaggaaaaccagggccgcacaaaattcagggaatcggagcgggattcgttccgaaaatcttgaatacggaaatttacgatgaaatcatcacagtgaaaaacgaagaagcctttgaatttgcccgtaaagcggcgagagaggaaggaattctcggaggaatttcttcaggcgcagccatctgtgctgctcttcaagttgctaaaaagcttggaaaaggcaaaaaagttctcgctgtgcttcctagtaacggagagagatacttaagcacgcctctttaccaatttgaatag

SEQ ID NO: 82 - DNA, 189 bp, Bacillus licheniformis
ttgaataggctccagctgaaacaggaggctgccgacgatgtcggcggccttttgtttgtcatggagcgcagcccttttaaaagctcggtgtccttgagtgaacatgctcaagggcttttttctgtattggaaatgaaattctcttttcctagaaaaaagatatgcattacaataaggacattagactaa

SEQ ID NO: 83 - DNA, 1431 bp, Bacillus licheniformis
atgagacaacgaaggcctgtagccagagcgttcccattttccaatcaacagtttttgcagcaatatgaaagcctatcgaaaggaaaagaataccacgttctgctggaaagcgcgagaggcggagaatacagcatagccggactcgaccctgtcgcaatagcgaaagggaaagacggtatcacgacgattcaatataaaggggacgtcatattcaaagagggggatccgtttctgcagttttctcaatggtttgaaacgctgaaaacggagacagttgcagattttcccgactttcagggcggggctgtcggttttcttagctatgactatgcccggtatattgagaaattcaaaatcctgtctattgatgatctgcaaacgccggatttattctttctcgtatttgatgatatagccgtctatgaccatgagcagcagcagctttgggtgattacccacactgatgaagaaacgccggccgctgcggaagagaaattggacaggcttgagcaaatgtggaagacggaacatccgaaggccgctggaggtcatcagccgaatgataacaaaggcccggcattcgcggcctcatttacagaagccggcttttctcaggctgttgagaaagtgaagcaatacatcgcaagcggtgacgtatttcaggtgaatctttctgttcgccagtcggagcgcctttctgcgcctccttatgaggtgtataagatgttaagagaaatcaacccttcgccgtacatggcctacttggaaaccccggattttcaaatcatctgcgggtcgcctgaactgctcattaagaaaaagggcaccaggcttgaaacaaggccgattgccggaacgcgatcccgcggggcggatgaagcggaggatgaagcgctcgcgaacgaattgatcatgaatgaaaaagagcgcgccgaacatgtgatgctcgttgatttagagcgtaatgacctcggcagggtctccaagtacggttcggtccgggtcgatgaattcatggtgattgagaagtattcccacgtcatgcatattgtctcaaatgtgtgcggtgaactaagggatgaatgcgatgccgttgatgtcatccatgccgtgtttcccggaggtacgatcaccggagcgccgaaagtcagaacgatggaaattattgaggagcttgagccaacgagacgggggctttatactggttctatagggtggttcggatataatcaggatatgcactttaatatcgtcatccgaacgatttatgtgaaagcaggccaggcgttcatgcagtcgggagcgggaatcgtcatcgattcaaatcctaggcatgaatataaagagtcaattaaaaaggccctggcgatgaaaaaggcgctgcagttgagtgaagaagagaaaaaagagcagaggagagctgagatatga

SEQ ID NO: 84 - DNA, 585 bp, Bacillus licheniformis
atgattctaatgatcgacaattacgattcgtttacgtacaacttggttcagtatttaggcgagcttggcgaggagttggtcgtcaagcggaacgatgagatcacccttcaggaaatagaggacatgtcgcctgactttttgatgatttctcccgggccttgcagtccggatgaggccgggatcagccttgaagcgatccgccattttgccgggaagataccgattttcggggtttgcctcggacaccagtcgatcgcccaggttttcggcggcgatgtcgtcagggcagagcggctaatgcatgggaaaacttccgagatttcgcacgacgggctgacggtttttaaaggcctggaacatccgctcacggccacgaggtatcattctttgatcgtcaaaccggatacactgcccgattgttttgagacatcggcttggacggaagaaggggagattatggccatcaggcataaagaactgccggttgaaggcgttcagttccatccagagtcgattatgaccgcttacggaaaagagatgctgaagaattttattgagacttaccgaaagaaagtgaacgcatga

SEQ ID NO: 85 - DNA, 861 bp, Bacillus licheniformis
atgatcatttacctgaacggtcaatatgtaaaggaggaggaagcaagactttctccttttgaccatggttttttatacggagtcggggtattcgaaacgttccggctttatgaagggaagcccttccttttagactggcatatggacagattgaacaacgctttggaacagctgaaaattgagcttgagctgacaaaaagcgaagtgcttgtcattcttgacaggctgcttcagttgaatcagccgcagaatctggatgcaagggtccggctaaatatatccgccggtcccggcggccccggcctttttcctgattcatacaaaaatcccggcgtcatggtgatgatgaatccttttcagcctgcatccgttccggctgaaaaggagggcgtcatcttgcaggtctgccgcaatacgccagagggtccgttccgcttgaaatcgcatcactttttaaataatttgtacggaaaaagggagctcggacatggcgcggccaaagaagggatttttcttaccgaaggcggagctgtagctgaaggaattatttccaacgttttttggcggaaaggcagctgtgtgtatacaccttctcttgataccggcatattaggcggtgtcacacgccgctacgtcatcgagcgccttgcagatatgggaatcgaagtcatagagggggtataccccttggaagagcttctctttgcggacgaagcatggatgaccaattccgttcaggaaatcgttccattccggagaatcggcagcactgaatttccgggaaaggatggaaatttgtcgaaacgtctgcaagaggcatacactaatgataggaaagcagcaaaagaatatttgagttaa

SEQ ID NO: 86 - DNA, 858 bp, Bacillus licheniformis
atggcgcttcaaacagcggtgcgttcaaagcaactgatcgcaaagcaatacacgttgtcttatgaagataaaacattgatcatgggaattttaaatgtgacgcccgattctttttcagacggcggaaaatataacagcatcgatcgcgccgtcattcatgcaaaacaaatgatcgaagacggcgcccatatccttgatatcggaggagaatcgacgaggccgggggcggaaaaggtttctcttgatgaagagctgtcaagagtcatacctgtaattgaaaaacttgttcaggaaatcgacgtcccgatttccgttgacacttataaagcgcaagtggcagatgaagccattaaggccggtgcagccatcatcaatgatgtctggggagcaaaagcagatcctgacatggcccgagttgcggccgctcataatgtgccgattatcttgatgcataaccgcgaggaacggaattataaggatttgatcccggacatgctgtctgatttgatggaatgtgtgagcattgcaaaatcagcaggcgttcaggatcatcacatcgtacttgatcccggcatcggctttgccaaaacgtatcatgacaatttggcggtcatgaatcagctcgagaagttcagcgaaccgggatacccggttttattggggacgtcacgaaaaaaatttatcggccgagtcctggatctgccgcctgaagaaagagcggaaggcacgggggcgacagtatgcctcggtattcaaaaggggtgcgatatcgtcagggtgcatgacgtcaagcaaatctccaggatggcaaaaatgatggatgccatgattgataaaggaggcgtttatcatcgataa

SEQ ID NO: 87 - DNA, 384 bp, Bacillus licheniformis
ttgataaaggaggcgtttatcatcgataaagtgcatgtagagggcatggagttttacggatatcacggtgttttcaaagaagaaaacaaactcggccagagattccgcgttgatctgacagcatttctagatttaagcgaagccgggaaaacggataatattgaggccaccattaattatgcagagctgtataagctgtgcaaagaggttgtggagggagagccggtcaaccttgtggagaccctcgcggaaacgattgccgcacaagtgctggagaattttgaagcggttcaggaatgtacggttaaagtcgtcaagcctgatcctcctatacctggtcactataaatcggtggccatcgagatgacgagaaagcgaaaatga

SEQ ID NO: 88 - DNA, 501 bp, Bacillus licheniformis
atgaacaacacggcatatatagcgctcggctcgaatatcggccggcgggaagaatatttaaaaaaagctgtctctctcctccatcaacatccgtctgtagaggtgacagacatctcgtcaatttacgaaactgatcctgtcggttatacagaccaagatctatttttaaacatggctgcagctgttaaaacatctctttcaccgtttgaattgctcgatttgactcagcgtattgaaaaagaactcggccgcaaacgcgacattagatgggggccgaggactgcagaccttgacattttgttgtataatcgtgaaaatattgagacagagcaacttatcgttcctcatcctagaatgcatgaacgtttgtttgtactcatcccgctgctggagatttatccggatcttgagggagctgtcaatcatgcaaaaaatcaagaaggtgtaagagtatggaagcagaaatctggggtagacgaattcgtgcatatcgaaagctga

SEQ ID NO: 89 - DNA, 1002 bp, Bacillus licheniformis
atgtttaaaatcggtgatatagaattaaaaaacagggttgtgctcgcgccgatggccggtgtctgcaactcagccttccgcttgacggttaaggaattcggagcgggtttggtctgcgccgaaatggtcagcgataaggcgatcctttacaataatgcgaaaacgatgggaatgctttatatcgatgaacgtgaaaaaccgctcagcctgcagatcttcggcggagaaaaagaaacgcttgtcgaagcggcgaagtttgttgaccaaaacacaactgcggatattattgatataaacatgggatgtccagtgccaaagatcacaaaatgtgatgcaggagccaaatggctgcttgatccgaataaaatttatgaaatggtttcagctgtcgtggaggctgttgacaagcctgtgaccgtgaaaatgagaatgggttgggacgaagaccatatctttgctgttgagaatgcgagagctgtagaacgagcaggcggaaaagcggtcgctcttcacggacggacccgcgtgcaaatgtacgaaggaacggcgaactgggatattatcaaagaagtgaagcagtccgtttcaatccctgtaatcggaaacggtgatgtcaaaactccgcaagatgcaaaacgcatgcttgatgaaacaggggtggacggcgtcatgatcggccgtgcagcgctgggtaacccgtggatgatttaccgtacggttcactatttggaaacaggcgaattgaaagatgagccgaaagtgcgtgagaaaatttctgtctgcaaacttcaccttgaccgattaatcgggctgaaaggcgaaaatgttgcggttcgcgaaatgagaaagcacgcagcctggtatctaaaaggcataagaggaaacgcaaaggtccggaatgaaatcaaccattgcgaaacgagagatgagctcgttcagcttttagacgcgtttacgattgaagccgaggcaaaagagcttcaggatgcaaaagtaggataa

SEQ ID NO: 90 - DNA, 1500 bp, Bacillus licheniformis
atgagccatgaagagcataaccatgaagaattaaacgaccagctgcaagtcagacgcgataaaatgaatcagttgagagaaagcggaaaagatcctttcggacagcgttttgatcgcacccatcaatcaactgatctcattgagtcgtataatgaattctcaaaagaagaattagaggaaaaagcaattgaagtaacgattgccggccggatgatgacaaagcgcggaaaagggaaagcgggattcgcgcatattcaggatttaaagggccagattcagatctatgtcagaaaagacagtgtcggtgaagagcagtacgaatggtttaaaagctctgacctcggggacatcgtcggcgttacaggcgtcatgtttaaaacgaatgtaggcgaattgtctgtaaaagcaacatcttttgatttattgacaaaagcccttcgtccgcttccggacaaatatcatggattaaaggacatcgagcagcgctaccgtcagcgttatttggatttgatcgtaaatccggaaagcaaaaatacgtttattacacgaagcaaaatcattcaatccatgagaagatacttagatgaccacggatacttagaagttgaaacgcctacgatgcacgcgattccgggtggcgcatctgcccgtccgttcattacacatcataatgcgctggatatgccgctttacatgaggatcgctatcgagctccatttgaaaaggctgatcgtcggcgggttggaaaaagtctatgaaatcggacgtgtattccgaaatgaaggggtctccacacggcacaatcctgaatttacgatgatcgaactttacgaagcttatgctgactataaggatattatgagattgacggaaaatctcattgctcatattgcacaagaagtgctcggcactacgaccgttcaatatggagattatgaagtcgacctcaagcctgaatggaagagactccatatggtcgatgctgttaaagaagccaccggtgtagacttctggaaagaagtatcggtagaagaagcaagagcatatgccaaagaacacggaattgaaatttctgaaggcatgtcagttggacatatcattaatgaattcttcgagcaaaaagttgaagaaacgttgattcagcctacttttatatacggacaccctgtggagatttctcctctggctaagaaaaatcctgaagaccctcgatttacggaccgttttgagctgtttatcgtgggccgtgagcacgcgaatgcatttactgaattaaatgatcctatcgaccaaaaagaacgctttgaagcgcaattaaaagaacgtgaagaaggaaacgatgaagcgcatatgatggatgaagactttgtcgaagcgctggagtacggaatgcctcctaccggcggccttggaatcggcatcgacagactgattatgcttttgacgaattctccttcaatcagggacgttttactattcccgcaaatgagacatcgttag

SEQ ID NO: 91 - DNA, 132 bp, Bacillus licheniformis
gtggtatattattattcgttgccgcaaaacggcggcgaaagaaaaaaaagaacttcaaaaaaagttcttgacttaatatccgagattgaatataatataaaagtcgctttaacaatgatctttgaaaactaa

SEQ ID NO: 92 - DNA, 465 bp, Bacillus licheniformis
gtggggaaaaatatttctgacataatcgaacagtatttgaaacaaatattagaacagaacgggaaagaaatattagagattaaacggagcgaaatagccgataaatttcagtgtgttccttctcagatcaattacgtaatcaatacgcgttttacgagcgagcgcggatatattgtcgaaagcaaaagaggcggcggcggttatatccgaattattaaaattaaaatgaacgacaaaattgatttgattaacaatattatgaatcaaatctatacaaggctctcccaggctgcttcagatgacatcattttaaggctgttagaaaatggtgtcattacagaaagcgaagcgaaattgatggtgagtgtcatggaccgttctgttttatatattgatttgcctgaacgagacgaattaagagcaagaatgatgaaagccatgcttacgtcacttaaatttaagtaa

SEQ ID NO: 93 - DNA, 555 bp, Bacillus licheniformis
gtgatatgtcaagagtgtaaagaaagaccggcaacttttcactttacgaaagttattaatggtgaaaaaaaagaaatgcacatctgtgaacaatgtgcgaaagagaacagcgagtcatattctatgaatgaaagtggcggattttccatccataatttattatccggactgcttaattttgactcgtcttttacaaacagcagcgaggcgcagctttttcaacagccggatcaggttttgcgatgcaaaaaatgcaatatgacgttcccggaatttcgaaaaaccggccggtttggatgttcggaatgttataaaaccttccactcctatatcactccggttttaagaaaagttcacagcgggaacacggtccacgcgggtaaaataccaaagcggatcggcggtaatctgcatgtaagaagacaaattgaagcattaaaaaaagagctgaaagaattaattcagcaggaggaatttgaaaaagcagccaacatcagagatcagatcagatcgcttgaacaaaacctgaatgcaaacaaggaggaggaggactga

SEQ ID NO: 94 - DNA, 1092 bp, Bacillus licheniformis
atgtcactgcagcattttattcagaatgctttaagcaattggatgcggcaagaaggccctgagagtgacatcgtgcttagcagccggatccgtcttgcgcgaaatttggataaagtccgttttccaacgcttttttcaaatgaagaggcttcagcgattatagcattgtttgaagaacagttcacaggctatgaagtgcccggtatcgggaagtttgagcttgtgaaaatggatcaggtccagcctttggaaaaaagggttcttgtggaaaaacatctgatcagtccgcatttgacggaagcttcctttggcgcatgccttctttctgaaaatgaagaagtgagtattatgctgaatgaggaagatcatattcgcattcaatgtctatttccgggatttcagctgtcagaagcattgaaagcagcaaatcaggtggacgattggattgaagaccggatcgactacgctttttccgaacaaagaggctacttgaccagctgccctacaaatgtcggaacagggcttagagcttctgtcatgatgcaccttcctgctttagtgttaactaggcaaataaacagaattattccggcaattaatcaattagggcttgttgttagaggaatttacggtgaaggcagcgaagcattagggaatatctttcaaatttccaaccaaattaccctcggtaaatcggaacacgacattgtcgaagatctgaacagtgtcgttgcccagctgatcgaacaagagcgttcagcaagaaaggcgctttatcagacttcgcaaatcgaacttgaagaccgcgtctacagatcttacggcgtactgtccaattgccggatgatcgagtcgaaagaaacagcaagatgtctttcagacgttcgtcttggaattgacctggggataataaaaggtctttccagcaatatacttaatgagctgatgatcctgacacagcctggatttctccagcaatattccggaggagccttaaggccaaacgagagggacatcaggcgggctgctcttatcagggagcgcttgaaattagaaaacaacggcaatagacaggaggatgaaacgatatga

SEQ ID NO: 95 - DNA, 2433 bp, Bacillus licheniformis
atgatgtttggaagattcacagaaagagcacaaaaagtattggcgcttgctcaagaagaagctctgcgtctgggccataataacattggaacagaacatattctcctcggccttgtccgcgagggagaaggaattgctgcgaaagcgctgcaggcgttaggactcagccctgacaagattcaaaaagaagttgaaagcctcatcggccgcggacaagaaatgtcacaatcgatccattacacaccgagagccaagaaagtgaccgaattggcgatggatgaagcgagaaagcttggccactcctacgttggaactgaacacatcctccttggattaatccgcgaaggggaaggtgttgcggcaagggtgctgaataatttaggcgtcagcttaaacaaagcgagacagcaagtattgcagctgttgggcagcaatgagagcggaggcgttgcttcaggcgccaacagtagcgccaacacaccaactttagacagtcttgcccgggatctcacggcgattgcaaaagaagacagccttgatcccgtgatcggcagaagcaaagaaattcaacgcgtgattgaagtgttgagccgcagaacgaaaaataaccctgtgttaatcggggagcctggtgtcggtaagactgcgattgccgaaggcctggcccagcagatcatcaataacgaagtaccggagattttacgcgacaagcgcgtcatgacacttgatatgggaacggttgtcgccggcacgaaatatcgcggtgaatttgaagaccgcctgaaaaaagtgatggacgaaattcgtcaagcgggaaatatcatcctcttcatcgatgagctgcatactctcatcggagccggaggagcggaaggggccatcgatgcctccaatatccttaaaccgtcgctggcgcgcggagagctgcaatgcatcggggcgacaacccttgatgaataccgcaaatacattgaaaaagatgctgcactagaacggcgttttcagccgattcaggttgaccagccgtctcctgaagaaagcattcaaatattgaaagggctcagagaccgctatgaagcccatcaccgcgtatcgattacggatgaagcgatcgaagcggcagtaaagctgtcagaccgctacatttcggaccgttttctgcctgacaaggcgatcgacttaatcgatgaagccggctcaaaggttagactgcgttcattcacaacgcctcctaacttaaaagagcttgaacaaaagcttgatgaggtaaggaaagaaaaagatgccgctgttcaaagccaggaattcgaaaaagcagcgtctttacgtgatacggagcagcgcttgcgtgaacaggtcgaagaaaccaagaaaacctggaaagaaaagcaaggtcaagaaaattccgaagtgaccgtcgacgatattgcaatggttgtatcaagctggaccggagtgccggtttccaaaattgcgcagaccgaaacagacaaattgctgaacatggagagcattcttcattcccgcgttatcggccaggatgaggctgtcgttgcagttgcaaaagcagtcagacgcgcgcgtgccggcttaaaagatccaaaacgtcctatcggttcgtttattttccttggcccaacaggcgtagggaaaacggagcttgcccgtgcacttgccgagtccattttcggcgatgaagaagcaatgattcgcatcgatatgtccgagtacatggaaaaacattcaacatcaagactcgtcggttcacctcctggatatgtcggctatgatgaaggcggacagctcactgaaaaagtgagaagaaaaccgtattccgtcgtcttgcttgatgaaatcgagaaagctcacccagatgtcttcaatattttgctgcaggtgcttgaagacggccgcctgactgattcaaaagggcgcacggttgactttaggaatacgattttgatcatgacatcaaacgtcggtgcgagcgaactgagaagaaataaatacgtcgggtttaatgtgcaggatgaaacccagaattataaagatatgaaagacaaagtcatgggtgaactaaaacgcgcctttagacctgaatttatcaaccggattgatgagatcatcgtcttccactctttggagaaaaaacatttgaaagatattgtatccctcatgtcagaccaattgaccaagcgtctgaaagaacaggatctttcaattgagctgactgaagcggctaaagaaaaaatcgccgatgaaggcgtggatctcgaatacggagcgcgccctctcagaagagcaatccaaaaacacgtggaagaccggctgtcagaagagctcctaaaaggccatattcaaaaaggccagcatattgttttggatgtagaagacggagaatttgtcgtaaaaaccgaagctaaaacgaactaa

SEQ ID NO: 96 - DNA, 1380 bp, Bacillus licheniformis
atggctaaaacaaagactaaattcatttgtcactcatgcggctacgaatccgccaagtggatggggaaatgccccggatgcggtgcatggaataccatggtggaagaaacgataaaaaaacccgccgccaacagaagaaccgctttttcacattccgttcaaacagtgcaaaagccttcacctctcacttcaattgaaacaacagaagagccgcgaattaaaacgaaacttggcgaattcaaccgcgtcttgggaaacggcatcgtcaaagggtcacttgttttaatcggaggcgaccccggcatcgggaaatcaaccttgctgcttcaagtatctgcccagctcgctgattcaaaagaaaatgtcctgtacatctcaggcgaagaatcggtcaagcagacaaagctgagagcagaccgtctaggtatcaacagtcccactcttcacgttttatctgaaaccgatatggagtatattacgtcttctatagaagagatgaacccatcattcgtagtggttgattcgattcaaaccgtttaccaaagtgatatcacatccgctccgggcagcgtctcccaggtcagggaatgcaccgctgagctgatgagaattgcaaaaacgaaagggattccaatatttatcgtcgggcatgtcacaaaagaaggttcgattgccggaccgagacttctggaacatatggtcgacaccgtcctttactttgaaggtgagcggcatcatacatttcggattttaagagccgtcaaaaaccggtttggatcaacgaatgaaatgggaatctttgaaatgagggaagagggcctgacagaggtgctgaatccgtcagaaatctttctcgaagagcgctcggcgggagcggccggatcgagtgtcgtggcctcaatggaaggcacgaggccagtcttagtagagattcaggcgctgatttcccccacgagctttgggaatccgcgccggatggcaaccgggattgatcataaccgcgtctcattgctaatggcagttttagaaaaaagggttggactgctgctgcaaaatcaagacgcctatttaaaagtcgccggaggcgtcaagctggacgagccagcgattgacctcgccgttgcagtgagcatcgcctcaagcttcagagacaccccgcctcatccgacggattgttttatcggagaagtcggattgacaggggaggtccgcagagtatcaaggatagaacagagggtgcaggaagcggcgaagcttggttttaaaagaatgattattccttctgcaaatgtagaaggatggacaaagccgaaaggaatcgaagtcgtcggcgttgaaaatgtagctgaggcccttcgagcttcattaggaggatcataa

SEQ ID NO: 97 - DNA, 1077 bp, Bacillus licheniformis
atggacaaagacaaaaaaggagcgaaacaggatctttcagaaatattgcagtttgtcgcccccggcacgcctcttcgcgaaggaatcgaaaacgtccttcgggccaaaacaggcggattaatcgtggtcggcttcaacgataaagtgaaagaagtggttgacggagggttccacataaattcttctttctctccggctcatctgtacgagctggctaaaatggacggggcgatcattctcagcgattcagggcaaaaaattctatatgccaatacacagctcatgcctgaggcgacgattccctcctctgagacgggcatgagacacagaacagccgagcgtgtggccaagcagaccggctgtctgatcatcgcgatttctgaaagacggaatgtgattacgctctatcaggaaaatatgaaatatatactcaaagatatcggctttatcttaacaaaagccaatcaggcgattcagacgctcgaaaaatacaaactcattttggaccatgcgatttccaatttgaacgcgctggaatttgaagagcttgttacatttggggatgtcatctccgttctgcatcgatatgaaatggtgctcagaatcaaaaacgaaattaatatgtatattaaagagcttggaacagaaggccatctcatcagactccaggttagcgaactgatcaccgatatggagcaggaagcggcgctgttcgtcaaagattatgtgaaagaaaaaatcaaagacccgtttgttctgctgaaacagcttcaggatatgtcgagtttcgaattgctggatgatgcgattctccttaagcttttaggctattcagcaactacgaacatggaagaatacgtttttccgagaggctacaggcttctccacaaaattccccgcctcccgatgccgatcgtcgaaaatgttgtcgaagcattcggccatttaaagctcattatcgaagcggatgtaaaagatttggatgaagtggaaggaattggggctgttcgtgcccaaaagataaagaaagggttaaagagacttcaggagaaacattatactgacaggcagctgtga

SEQ ID NO: 98 - DNA, 123 bp, Bacillus licheniformis
gtgattaaaatttgcaatttatgggtatattattcttactttttgttttccctttttcacgtggaaacagctgcatttataaaaattaaaacgattattttaaaggaggtgaaggtatgttaa

SEQ ID NO: 99 - DNA, 1089 bp, Bacillus licheniformis
atgttaaaacgaatagttcaagcgttctttgcgattttgggaggcgttatcggtatttttctcataccggaattgtttgtactgttaaatgtacaggacatacctttagtaacaaacccgtatgcgtccgcttgtttaggagctatcatcttttttcttctgggcatctggtgtgcggatcacgtcatcaactgggtgaaacagattgaggattccttgatcaaagcacctgtctcagacttgttgttcggctctttgggattaatcttcggacttatgctcgcttatcttatcgtcaacgtcattccgttaaaagacatcccttatcagttaatcagcacggtcattccgattgtgttggccgcatttctcggctatcttggattccgtgtgggtttcaagaaaaaggatgaaatgctgacactttttacatcgagaaagaaaaaaggttctgctgaggaagagcgtccggaagaagacaaaaagctgaaaattttagacacaagtgttattatagatgggagaattgctgatatttgtcagaccggatttcttgaaggcgtcattgtgattcctcagtttgtgcttgaggaactgcagcatatcgccgactcttcagacgtcctcaaacgaaacagagggcggagaggactggatattttaaaccgtatccagaaagagcttgatattaaagttgaaatttatgaaggcgattttgaagacatccaagaggtcgacagcaagctcgtcaaactggcgaagctgacctcgggcgttgtcgtcacaaacgatttcaatttgaacaaagtatgcgagctccaaaaggttgccgtattgaacatcaacgaccttgccaacgccgtcaagcctgtcgtgcttccgggagaagaaatgaaggtgcaggtcatcaaagacggaaaagaacataatcagggcgtggcttatctggacgacggcacgatgattgtcgttgaagaagggcgaaattatattggcaaacatatcgacgtgctcgtgaccagcgtgctgcagacagcggcaggcagaatgatattcgccaagccgaaactgctggaaaaggcgctttga

SEQ ID NO: 100 - DNA, 696 bp, Bacillus licheniformis
atgaattatgaagtcgtcattcctgccgccggacaaggtaaacgaatgaatgccgggaaaaacaaactgtttatcgaggcgaaaggaatacctgtgattattcatacattaaaggtgtttgaaaaccatgatgcctgcaaaaggatcattcttgtcatcaatgaacaggaattcggtgaattcaacacccttttaaaaacctatcattttaagactccgatcgagatggtgccgggcggaagagaacgccagcaaagcgtttttgcgggcattaaagcggccggcaaagaggaaacggtcctcgtccatgacggagcaagaccttttattaaacgggaatatatcgaacagcttgtcgagaaagcaaaggaaacaggggcagccatcgttgccgttcctgttaaagacacgatcaaacgcgttcaagacggtgagatagccggaacgattgaacgttcaagcttgtgggccgctcaaaccccacaagcttttcgtctttctattctgatgaatgctcaccttgaggctgaagcaaaaggtttcctcggtacggacgacgccagtcttgtcgaggaagccggaggtacggttgcaatcattcaaggggattatcaaaacatcaaactgacgaccccggatgacttgcttgtcgcagaagcgatattagaagcggaaaagaggaatgaacatgtttag

SEQ ID NO: 101 - DNA, 477 bp, Bacillus licheniformis
atgtttagaataggccaaggatttgacgtccatcaactagtggaaggcaggccgctcataatcgggggaattacgattccttacgaaaaaggccttctcggacattcagatgcagatgtgcttttgcacacgattgcggatgcatgtctcggtgccgtcggcgagggcgatatcggaaaacactttccggataccgatcctgaattcaaagatgccgactccttcaaactccttcgccacgtctggatgatcgtgaaggaaaaaggctatacgctagggaacctggattgtacaatcatcgcccaaaagcctaaaatggcgccgtatatcgaagacatgagagccagaattgccgaagggctagaggcggaaatttcccaaattaacgtaaaagcgaccacaaccgaaaagctcggatttacgggaagagccgaaggaatcgccgcccaggcttccgttctgctccaaaaggtataa

SEQ ID NO: 102 - DNA, 1458 bp, Bacillus licheniformis
atgggaaacgaagttcgggttcgttatgcgccgagcccaacaggccatttacatatcggaaatgccagaaccgctctttttaattatttgtttgcccggagccaaggcggaaaattcatcatccgcattgaagatacggaccgcaagcgcaacattgaaggcggggagcaaagccagctgaactatttaaaatggctgggcatcgactgggatgaaagcgtggatgtcggaggagaatacggaccataccgccaatccgaaagaaacgacatttacaaaacatattacgaggagcttcttgaaaaagggctagcctacaaatgctactgcacggaagaagagcttgagaaagagcgtgaggaacaggctgcccgcggagaaatgccgcgctactccggcaagtgccgcaatttaacaaaagaagagcaggaaaagctcgaagctgaaggaagacagccgagcatccgctttaaagtgcctcaaggtgaagtcatccgctttgatgacatcgtcaaaggagaaatttcttttgaaacagacggaatcggcgacttcgtcatcgtgaagaaagacggaacgcctacttacaactttgccgtagcggtcgatgactatttaatgaaaatgacgcatgtcctgcgcggcgaagaccacatttccaatacgccaaagcagatcatgatttacaacgcccttggctgggatatcccggcatttggacatatgacattaatcgtcaatgaaagccgcaaaaaactgagcaaacgtgatgagtccatcattcagtttatcgagcagtacgaagagctcggctatttgccggaagcattgtttaacttcatcactcttctaggctggtcgccggtcggagaagaagaactgtttacaaaagaacagtttattgagatatttgatgtaaaccgtttgtcaaaatcaccagcggtgtttgatacgcataaactgaaatgggtcaacaaccagtatgtgaaaaaacttgatcttgatcaggtcatcgaattgaccgtgccgcatttgcaaaaagcgggcaaggtttcagaagagctttcaggcagcgaacaggaatgggtgcgcaagctgatttccctatatcaggaacagctgagctacggcgctgaaatcgtcgagttaacagagttgttctttaaagacgatatccagtataatcgtgaagcaagaacagttttagaagaagagcaggttccggaagtgcttcgcgtatttgccgaaaagcttgagcagcttgactcgtttacggcagatgagatcaaggcatccatcaaagccgttcaaaaagaaacaggacataaagggaaaaagctgtttatgccgatccgcgtagcgacgacaggccagacccacggtcctgaactgcctcagtccattgaattattggggaaagacaccgttttaaaacggctgcataacattattcaataa

SEQ ID NO: 103 - DNA, 144 bp, Bacillus licheniformis
ttgagaaaacagctgtgctgttttctaaacagagtggaaccgcgcgtcaaaaagcgtctctgtcatcagacagaggcgttttttatatggtttgacaatagagacaaaggaagcggggaacggggggaatcatgtgttctttaa

SEQ ID NO: 104 - DNA, 651 bp, Bacillus licheniformis
gtgttctttaaaatgctgaaagaagatgtagatgtcgtatttgaccaagatccggctgcgagaagctacattgaagtcatcttaacttattcaggtttgcatgctatatgggcacatcgaattgcacatgctttatataaaagaaaaaggtttttcatcgccagagcgatctctcaaatcgcccgcttctttacgggaatcgaaattcacccgggtgccaagatcggcaggagatttttcattgatcacggcatgggggttgtgatcggcgaaacctgtgagatcggaaacaatgtcacggtttttcagggcgtgacgcttgggggaacaggaaaagaaaaaggcaaaaggcatccgacaatcgaggacgatgccctgatctcaacaggggccaaagtgcttggatccattacagtcggaagaggggcgaaaatcggtgcaggctccgtcgtcctgcacgatgtgcctgaatgctccaccgttgtcggcatcccgggccgggtcgtcgtacaaaacggaaagaaaatcagacgcgacttgaatcaccaggatttgccggatccggtggctgaccgcttcagagaattggaaaacgaaatcaggcagctgaaacaagagctccggagaaaagaaagggaagatgagctgtga

SEQ ID NO: 105 - DNA, 1404 bp, Bacillus licheniformis
gtgacactaacattgtataatactctcacacgaaaaaaagagccgtttgtgcctcttgaagaaggcaaggtcaaaatgtatgtgtgcggtccgacagtatataactacatccatatcggaaacgcaaggccgcctatcgtgtttgacactgtcagaaagtatttagagtataaaggctatgaagtccaatatgtctccaattttacagatgtcgatgacaaattaattaaagcggcaaatgaacttggagaggaagtgccggtcatcgccgaacgctttattaaggcatacttcgaagatgtcggttcactgggctgcacaaaagctgactgccatccgcgcgtcactgaaaacatggatgagatcatcgactttattcagacgctgatcgataagggctatgcctatgaggcggacggagatgtttattataaaacaagatcgtttgaaggctatggaaagctgtcgcatcaatcggtcgatgagctgagatcaggcgcccgaattcaagtgggcgaaaagaaagaagatgcgctcgattttacactatggaaagcggctaaagataacgaaatctcctgggatagcccttggggaaaaggccgtcccggctggcatatcgagtgctctgcgatggcgagaaaatatctgggcgattcgatcgacattcacgccggcggtcaggatctggccttcccgcatcatgaaaacgaaattgcccaatcggaagcattaacagggaagcctttcgcgaaatattggcttcataacggctacattaatatcgataatgagaaaatgtcaaaatcgctcggcaactttgttcttgtgcatgacattattaaagagcatgacccccaagtgctgcggtttttcatgctgtctgttcattacagacatccgataaactattcggtcgaacttctcgagaacacaaaaaacgcttttggacgtctaaaaacagcttatagcaatttgcagcatcgcctaaaaagcagtacaaatttaacagagggcgattcagaatggcttgaaaaaatcgaagagcagcgaaaagccttccaaacggctatggatgatgatttcaatacagcgaatgccatttccgtcctgtttgacctggccaaacatgccaactactatttgcaggaaaagaatactgcagaacacgtcattcaggcgtttatacagctgtttgacgagatctgctcagtgctcggcttctccctcaaggaacaggaacttttggataaagacattgaagaactgatcgagaagcggaatgaggcccggagaaaccgcgactttgcaacatctgatcagattcgcgaccagttgaaaagcatgaatattatcttggaggacactccgcagggcacgcgctggaaaagaggagaatcataa

SEQ ID NO: 106 - DNA, 417 bp, Bacillus licheniformis
atgaatttggaaaccattaaagacgccaaacagctgaatggtttggcgcttgcttacatgggtgatgccgttttggaggtatatgtgaggcatcacctcttaaagcaaggcatgacaaggcccaatgatctgcaccggcagtcgaggcgatatgtctccgccaagtcgcaggcaagcatgctgtttgcgcttgaggagcaggaatttttcaccgaggaagaacaggctgtgctgagaagagggcggaatgccaaatccggaacggtaccgaaaaacacggatgtccaaacatatcgttacagtacggcttttgaggcggtcatcgggtatctttttcttgagaacagggaagataggcttaatgaactcatcaaagcagcgctggaaaaacgggatggcagggaggaagtaaaatga

SEQ ID NO: 107 - DNA, 750 bp, Bacillus licheniformis
atgagtcagcagcatgattacgtcataggaaaaaacgcggtcatcgaaatattaaagtccggccgggaattgtataagctgtggatggcggaaaacacagtgaagggacaggctcagcaagtcgtcgatctcgccgccaaaaaaggcgtcacgattcattatgtcccaagaaaaaaactcgatcaaatggtttccggacagcatcaaggcgtcgtcgcccaggtagcggcttacgagtatgccgagctggatgatctttttcaaaaggccgaagacagaaatgaacagccgtttatccttgtattagacgaaattgaggatccgcacaacctgggctctattatgcgcaccgcagacgcggtcggggctcacggcatcgtcattccgaaaaggcgcgcggtcggccttacaacgactgtcgccaaagcctcgacaggagccatcgaacatattccggtcgtcaaggtgaccaatctgtcgcggaccctggaagaaatgaagggacggggcatttgggtcgtcggtaccgatgcgtctggacaacaggactacaggtcgctggacggaaatatgccgcttgcgcttgtcatcggcagcgaaggaaaaggcatgggaaggcttgttaaagagaaatgtgattttctcattcgcctgccgatggcgggaaaggtcacatccctgaacgcctcagttgcagccggcctgctgatgtatgaagtgtaccggaaacgaagccctctgggagaatag

SEQ ID NO: 108 - DNA, 513 bp, Bacillus licheniformis
atggacatcctgttggtcgacggttataacatgattggggcttggcctcagctgaaagatttaaaagaaaacagttttgaagaagcaagggacctgttgattcagaagatggcggaatatcaatcgtatacagggtttcgggtaatcgttgtctttgatgcgcatctcgttaaaggaatcgagaaaaagaaggtcaatcatcgcgtagaagtgatattcacaagggaaaatgaaacggctgatgaacggatcgagaaactggtgtcagacttgaatagtattcagacgcagatccatgttgccacatccgattacacagagcagtgggcgatttttggccagggggccctgcgcaaatcggccagagagctgctcagggaggtcgaagcgatcgaaaggcaaattgaaaacagggtgaaacaaatcacctcagagcgtcccgcagggaaaattccattgtcagaagacgtcttgaggatcttcgaaaaatggcggcgtggcgacttggattag

SEQ ID NO: 109 - DNA, 672 bp, Bacillus licheniformis
gtgaacttacaaaacaaccagggaaaattcagcaaagaacagttcagcaaagaacgtttttgccagttggaagacgagcaggtcattgaaatggttcatgtcggagacagtgatgcgttagattacttgattacaaagtaccgtaattttgtaagggcaaaagcaagatcctacttcttaatcggggctgatcgggaagatatcgttcaggaaggcatgattggactctacaaatctatccgtgattttagagaggacaagctgacttcattcaaagcttttgcagaattatgcattacccgccaaattattaccgctatcaaaacagctactcgccagaaacatattccgctcaattcttatgtgtcgctggacaagcccatttatgacgaggaatcagaccggacgcttctcgacgtgatttcaggggccaaggtcatgaatcctgaagagctgatcatcaatcaggaagaattcgatgatatcgagctgaaaatgggagaattgcttagtgatttagaaagaaaagttcttgcgctctatctcgacggaagatcctatcaggaaatatccgaagaattaaaccgccatgtaaaatcgatcgataatgcgctccagcgtgtcaaaaggaagcttgaaaagtacctggagctccgcgaaatcagcttgtag

SEQ ID NO: 110 - DNA, 150 bp, Bacillus licheniformis
atgaagaaaaaagtaacgttagcctgcaaaaattgcggaaatcgtaattatacgacaatgaaaagctccgcagctttggctgaacggctcgaagtaaagaaatactgcaataactgcaattcacatacagtacatctggaaacaaaatag

SEQ ID NO: 111 - DNA, 180 bp, Bacillus licheniformis
atgggtattatcaaatttttaaagaatgtcggaaaagaaatgaaaaaggtcacctggcctaaaggaaaagaactaacgcgctatacgatcactgttatcaccaccgttatctttttcgccatcttttttgcactcatcgattcgggtattacgcaattaattcgtttaatagttgaataa

SEQ ID NO: 112 - DNA, 534 bp, Bacillus licheniformis
atggaaaagaaatggtatgtggttcatacgtactccggctatgaaaataaagtaaaggcgaatttggaaaagcgggtagaatcgatggggatgcaagataagatattccgcgtcgttgtacctgaagaggaagaaaccgatattaaaaacggcaagaaaaaagtcgttaaaaagaaagtcttccctggttatgtacttgtcgaacttgtcatgacggatgattcctggtatgttgttcgaaatacgcctggtgtgaccgggtttgtcggttcagccggatcaggttcaaagccgactgcactgcttccgggcgaagcggaaaaaatcctgaagcggatggggcttgaagaaagaaaaacagaaatcgactttgaattaaaagaaaccgtcaaggttatcgacggcccgtttgctgatttcacagggacgatcgaagagatcgaccacgacaaaaataaagtcaaagtttttgttaatatgttcggaagagagaccccggttgagctcgaatttactcaagttgacaaattgtaa

SEQ ID NO: 113 - DNA, 426 bp, Bacillus licheniformis
gtggctaaaaaagtagttaaagttgtaaaattgcaaattcctgctggaaaagcgaatccagctccgccagttggtcctgcgttaggtcaagccggtgttaacatcatgggattctgtaaggagtttaacgctcgtacatctgaccaagctggtctgatcattcctgtagaaatttcggtttacgaagaccgttcatttacatttatcacaaaaactccgcctgctgctgtattgcttaaaaaagcggctggaattgagtcaggttctggtgagcctaaccgtaataaagtcgcaaccgttaaacgcgataaagtacgtgaaatcgccgaaacaaaaatgcctgacttaaatgcggcagatgttgaagcggctatgcgtatggttgaaggaactgcccgcagtatgggtattgtgatcgaagactaa

SEQ ID NO: 114 - DNA, 699 bp, Bacillus licheniformis
atggctaaaaaaggtaaaaaatacgtcgaagctgccaagcttgtagatcgtacaaaagcttacgacgtaaacgaagcgattgagcttgtgaaaaaaacaaacacagctaaattcgatgctactgttgaagcggcatttcgtttaggtgttgaccctcgtaaaaacgaccagcaaatccgcggtgcagttgtacttccaaacggaacaggcaaaactcagcgcgttcttgttttcgctaaaggtgaaaaagcgaaagaagcagaagctgctggtgcagactacgtaggcgatgcagattacatcaacaaaattcagcaaggctggtttgattttgatgtgatcgttgcgactcctgacatgatgggtgaagtcggtaaaatcggacgcgtgcttggaccaaaaggtcttatgccaaaccctaaaacaggaacggttacatttgaagttgaaaaagcagtcaacgaaatcaaagcgggtaaagttgaataccgcgttgataaagcaggaaacatccacgttccaatcggaaaagtgtctttcgaagaaggcaagcttgtagagaacttcgcgacaatgtacgacacaattttgaaagcgaagcctgctgctgctaaaggtgtatacgtgaaaaacgtttctgttacatctacaatgggacctggaatcaaagtggacccttcaactttcaacgtaaaataa

SEQ ID NO: 115 - DNA, 501 bp, Bacillus licheniformis
atgagcagcgcaattgaaacaaaaaaagttgttgttgaagaaattacttctaaactgaaagaaagtaaatcaacgatcatcgttgactatcgcggccttaacgtagctgaagtaacagaacttcgtaaacagcttcgcgaagctaacgttgagttcaaagtgtacaaaaacacgatgactcgccgtgcggttgaacaagctgaacttgatggtttgaacgatttcttaacaggaccgaatgcgattgcattcagcactgaagatgttgtcgctccagctaaagttcttaacgagtttgctaaaaagcacgaagctcttgaaatcaaagcgggcgtaatcgaaggcaaagtgtccacagttgaagaagtgaaagctcttgctgaacttccatctcgcgaaggcttgctttctatgttgcttagcgtacttcaagctccagttcgcaatcttgctcttgcaactaaagctgttgcagaacaaaaggaagaacaaggcgcttaa

SEQ ID NO: 116 - DNA, 372 bp, Bacillus licheniformis
atggctttaaatatcgaagaaatcattgcttccgttaaagaagcaactgtacttgaactgaacgacttagtaaaagcaatcgaagaagaattcggcgtaactgctgctgctcctgtagctgtagctggcggagctgctgcaggcggtgctgctgaagaaaaaactgaatttgatcttgttcttgctggtgcaggagatcaaaaaatcaaagttatcaaagttgttcgtgaaatcactggtcttggcttgaaagaagctaaagaacttgttgacaacactccaaaacctcttaaagaaggtattgcgaaagaagaagctgaagagcttaaagctaaacttgaagaagttggcgcttctgtagaagttaagtaa

SEQ ID NO: 117 - DNA, 606 bp, Bacillus licheniformis
atgactgaccattattattcggaaaaaccttcagcaaaaagcagcagatcaatgtgggcatttcgcttgagaaaccggacgtttacttttatcagcgacagcggagttttttcaaaaagagaagtggactttggctcaaggctgctgattgaagctttccgggaaccggatgcagaaggtgattttttggatgtaggctgcggctatggcccgattggtctttcgcttgctgcggatttcgaagatcgaatggttcacatgatcgatgttaatgaaagagctgtcgaactttcgaaggaaaacgcgttaaataatcagatcgacaacataaagatctaccagagtgatctgtttgccaacgtcgaacctgcaaaaaaattcgcttctattattactaatccccccatacgcgccgggaaaaaaactgtgcacgccatctttgaaaaaagcgctgaacatttgcggccttcaggagagctgtgggtcgtcattcagaaaaaacaaggcgggccttctgcctttgaaaaattaaaagaactttttgcggacgttgaagtcgttcaaaaaaagaaagggtactatatcatcaaagcaaaaaaagtttga

SEQ ID NO: 118 - DNA, 3582 bp, Bacillus licheniformis
ttgacaggtcaactagttcagtatggacgacaccgccagcgcagaagctatgcacgcattagcgaagtgttagaattaccaaatctcattgaaattcaaacctcttcttatcagtggtttcttgatgagggtcttagagagatgtttcaagacatatcgccaattgaggatttcactggtaacctctctctggaatttatcgactacagcttgggcgagcctaagtatccggtagaagaatcaaaagagcgggatgtgacctattcagctccgctgcgggttaaagtccgcttaatcaacaaagaaaccggcgaagtaaaggatcaggatgtcttcatgggcgatttccctattatgacagacactggaaccttcattatcaacggtgcagaacgggtcatcgtatctcagctcgttcgttctccaagtgtatattttagtggtaaagtagacaaaaacggtaagaaaggttttaccgcgactgtcattccaaaccgtggcgcatggttagaatacgagactgatgcgaaagatgttgtttacgtacgcatcgatcgcacacgtaagttgccggttacggttcttttgcgtgctcttggcttcggatctgaccaagagatcattgatctcatcggtgaaaacgagtatctgcgcaatacgcttgataaagataatacggaaaacaccgataaagcgcttcttgaaatctacgagcgtcttcgtccaggggagccgcctaccgtagaaaacgcaaaaagcctgcttgattcaaggttctttgatccgaaaagatatgaccttgcgagtgtaggacgttataaaattaataaaaagcttcacatcaaaaaccgactttttaatcagcggcttgctgaaacgctagtcgaccctgaaacaggcgaaatccttgccgaaaaaggagcgattttagacagaagaacgcttgataaagttctgccgtaccttgaaaacggaatcggttttaaaaagctttatccgaacggcggagttgtcgaagacgaagtaacgcttcagtctatcaaaatctatgctccgacagaccaagaaggggagcagacaatcaatgtgattggaaatgcttatatcgaagaaggcgttaagaatattacaccttctgatattatcgcttccatcagctatttctttaacctgcttcacggagtgggcgataccgacgatatcgaccatctaggaaaccgccgtctccgttcagtgggagagcttctgcaaaaccaattccgtattggtttaagcagaatggagcgcgttgttcgtgaaagaatgtctattcaagatacaaacacgatcacgccgcagcagctgatcaatattcgccctgtcattgcatcaatcaaagagtttttcggaagctcgcagctttctcagtttatggatcagacgaatccgcttgctgagctgacgcataagcgccgtctgtcagcgctcggaccgggcggtttgactcgtgagcgcgccggaatggaagtccgtgacgttcactattcacactacggccggatgtgtccgattgaaacccctgagggtccaaacatcggcttgatcaactcgctttcttcattcgcgaaagtgaaccgtttcggcttcatcgaaacgccgtatcgccgcgtcgatcctgaaactggaaaagtaacgccgagaatcgattacttgacagctgatgaagaagacaactatgtcgttgcccaggcaaacgcacgcctgaatgatgacggttcttttgtggatgacagcatcgtcgcccgtttcagaggggagaacaccgttgttccgaaagaccgcgtcgactatatggacgtttcgcctaaacaggttgtctctgccgcgactgcatgtattcctttcttggaaaacgatgactcaaaccgcgcccttatgggagcgaacatgcaacgtcaggccgtacctcttatgcagcctgaatcgccgatcgtcggaaccgggatggaatatgtatctgcgaaagactccggtgccgctgttatttgccgccaccctggaatcgttgaacgggtggaagcgaagaacatctgggtgcgccgctatgaagaagtcgacggccagaaagtcaaagggaaccttgataaatacagcctgctgaagtttgtccgttccaaccagggaacttgctacaaccagcgtccgatcgtaagcgtcggtgatgaggttgaaaaaggtgaaattttagctgacggtccgtccatggaaaaaggtgagcttgcccttggacgcaacgtcatggtcggctttatgacatgggatggctacaactatgaggatgccatcatcatgagcgaacgccttgtaaaagacgacgtatacacgtctattcatattgaagaatacgaatcagaggcccgggatacaaaactcggacctgaagaaatcactcgcgatattccgaacgtcggtgaggacgctcttcgcaatctcgatgaacgcggaattatccgtgtcggtgctgaagtaaaagacggagatcttcttgttggtaaagtaacccctaaaggtgttacagagcttacggcggaagaacgcctgcttcatgccatcttcggggaaaaagcgcgtgaagtgcgtgatacgtcgctgcgtgtacctcacggaggcggcggtatcatccttgatgtaaaagtgttcaaccgcgaagacggagacgaactgcctccgggcgttaaccagctcgtccgcgtctacatcgttcagaagcgtaaaatttctgaaggggacaaaatggccggacgccacggtaacaaaggtgttatttcgaaaattcttccggaggaagatatgccgtatctgcctgacggaacgccgattgacatcatgttaaacccgctgggcgtaccatcgcgtatgaacatcgggcaggtgttggagctgcaccttggtatggctgcacgccgcctcggtctgcatgtcgcgtcacctgtatttgacggtgcccgcgaagaagatgtgtgggaaacccttgaagaagccggcatgtcaagagacgcaaaaaccgtcctttacgacggccgaactggggagccgtttgacaaccgggtttctgtcggcatcatgtacatgatcaaactggcacacatggttgacgacaaattgcacgcacgttcaaccggtccttactcactcgttacccagcagcctctcggaggtaaagcgcagttcggcggacagcgttttggagagatggaagtttgggcgcttgaagcttatggtgcagcatatacgctacaagagatcctgactgttaaatcggatgatgtcgtaggccgtgtgaaaacatatgaagccatcgtaaaaggcgacaatgttccagaacctggtgttccggaatcgttcaaagtattgatcaaagagcttcaaagcttaggtatggacgtcaaaattctatcaagcgacgaagaagaaatcgaaatgagagacttggaagacgacgaagacgcgaaacaaaacgaagggctttctctgccgaatgatgaagagtccgaagagttggtttctgctgacgcagaacgcgatgtcgttacaaaagaataa

SEQ ID NO: 119 - DNA, 3600 bp, Bacillus licheniformis
ttgctggatgtgaacaattttgagtatatgaacatcggtctcgcttcacctgacaaaatccgttcatggtcttacggagaagtgaaaaagcctgaaacaatcaactatcgtactttgaaacctgaaaaagatggtctattctgcgagcgcattttcggtcctcaaaaggactgggaatgccactgcggaaagtacaagcgggttcgttataaaggcgtagtctgcgaccgttgtggagttgaagtaacccgggctaaagtccgtcgtgagagaatggggcatatcgagctggcagccccggtttctcacatctggtattttaaaggaattccgagccgtatgggtcttgtgctggatatgtctccgcgcgcattggaagaagtcatttactttgcttcttacgtcgtaacagatccggccaatacaccgctcgagaaaaaacagcttctttctgaaaaagagtatcgggcgtacctcgataaatacggaaataaattccaagcgtcaatgggtgctgaagcgattcataagctccttcaagatatcgacctcgataaagaagtggatatgctgaaagaagagcttaaaacgtcacaaggacagcgccgcacacgtgcgatcaaacgtctggaagtattggaagccttccgcaattccggaaataagccgtcatggatgatcctcgacgttcttccggtcattccgcctgagctgcgaccaatggtacagcttgacggtggacgttttgcaacttccgatctgaacgatttgtatcgccgcgtaatcaaccgtaacaatcgtttaaaacgtcttctggaccttggagcgccaagcattatcgttcaaaacgaaaagcgcatgcttcaggaagccgtggacgcattgatcgataacggacgcagaggacgtcctgttacaggtccaggaaacagaccgttaaaatccctttctcacatgctgaaaggtaaacaaggccgtttccgtcaaaaccttctcggtaaacgtgttgactactcaggacgttcggttatcgtcgtaggtccgaacctgaaaatgtatcaatgcggtcttccgaaagaaatggcgctggaactgttcaagccattcgtcatgaaagagcttgttgaaaagggccttgcccacaatattaagagcgcgaagcgtaaaattgagcgcgttcagccggaagtctgggatgtccttgaatcagttatcaaagaacaccctgtgcttctcaaccgtgcacctacgcttcacagattaggtattcaagcgtttgaaccaacgcttgttgaaggccgtgccatccgtcttcatccgcttgtatgtacggcatacaacgctgactttgacggtgaccaaatggcggttcacgttcctttatcagcagaagcgcaagctgaggcgcgcatccttatgcttgctgcgcaaaacatcctgaaccctaaagacggaaaaccggttgttacaccgtctcaggatatggtacttggaaactactatctgacgctagaacgccctggtgcagtcggcgaaggtatgattttcaaagatacggatgaagcgttgcttgcttaccaaaacggatatgttcatttgcatacgagagtagccgtcgcggttaactcattgaaaaatgaaacgtttaccgaagaacagcgttccaagctgctcattacaactgtcggaaaactgatcttcaacgaaattcttccgccgtcgttcccatacatgaacgaaccgacgaagagcaacattgaagaaaaaacgcctgaccgtttcttcttggattacggtgcagatgttaaagaagccattaagaaccaagaaatcaacccgccgttcaaaaaaggcattttgggtaaaatcattgcggagatcttcaaaaggttccatattacagaaacatcaaaaatgcttgaccgcatgaaaaacctcggctttaaatactctacaaaagccggaattacggtcggtgtttccgatatcgtcgtattggacgacaaacaggaaatccttgaagaagcgcaaggaaaagtcgataacgtgatgaagcagttcagacgcggtctgattactgaagaagagcgttatgaacgggtcatttccatctggagtgcagctaaggatacgatccaaggcaagctgatgaaatccttggatgaaatcaacccgatctacatgatgagtgattccggagcccggggtaacgcatcaaactttacgcagcttgcgggtatgcgcggtctgatggccaacccggccggacggatcatcgaacttccgatcaagtcaagtttccgtgaaggtttaacggtactcgagtactttatctctactcacggtgcgcgtaaaggtcttgcggatacggcccttaagacagccgactcaggttacctgacacgccgtctcgtagacgtagcccaagacgtcatcattcgtgagactgactgcggcacagaccgaggcattcttgccaaagccatcacggaaggcacagaagtgatcgagcgtcttgaagagcgtcttgtcggccgattcgcgagaaagcctgttaaacatccggaaacaggtgaagtgctcgtgaatgaaaacgagctgatcgacgaagataaagcgattgaaattgtcgaagcaggcattgaagaagtgtggatccgctccgcatttacatgtaatacgtcacatggtgtatgtaaacgatgctacggccgcaacctggcaacaggaaccgatgtcgaagtcggagaagcagtcggaatcatcgctgcccagtccattggtgagccgggtacacagttaacgatgcgtaccttccatacgggcggggttgccggagacgatattacacaaggtttgccgcgtatccaggaattgtttgaagcgcgaaaccctaaaggtcaagcgacgatctctgaaattgacggtgtcgtggccgaaatcaatgaggttcgcgataaacagcaggaaatcgtcgttcagggcgaagtcgaaagccgttcatatacggcgccttacaacgcgcgcttgaaagtcactgaaggagagaagatttctcgtggtcaagtgctgacagaaggttcggttgatccgaaagagcttctgaaagtcactgacatcaccacggtccaagaatacctgcttcatgaagtgcagaaggtttatcgtatgcagggagttgaaatcggagataagcacgtcgaggttatggttcgccagatgcttcgcaaagtgcgcgtcatcgatgccggcgacacggaagtgctgccaggcacgctgctcgatattcaccagtttacagaagcaaacaaaaaagttctgcttgaaggcaaacgccctgcaactggccgtccggtgcttctcggtatcaccaaagcatcgcttgaaacggattccttcctgtctgccgcgtcattccaggaaacaacacgtgtcctgacagatgcagcgatcaaaggaaaacgtgacgagcttctcggcctgaaagagaatgttatcatcggtaagcttgttcctgctggaacgggtatgctgaactatcgtaaagtgaagccggtattgcaagtccaatcatctgatgaaatggttccggctgaataa

SEQ ID NO: 120 - DNA, 249 bp, Bacillus licheniformis
atgtcttatgataaagtatcacaggctcaatctattattatcggtacgaagcagacagtcaaagcactgaagcgcaattctgttaaggaagtcgtcgtagcaaaggacgctgatccttgtctgacgtcaggtgttatcaatctggcaaatgaacaaggggttccagtctcaatggcagagtccatgaaaaagctcggcaaagcctgcggaattgaagtcggagctgcagctgttgccattattcaataa

SEQ ID NO: 121 - DNA, 417 bp, Bacillus licheniformis
atgcctacaattaatcagctagtccgcaaaggacgcgtaagcaaagttgaaacttctaagtctccagcacttaacaaaggatacaacagcttcaagaaagagcacactaacgtatcttcaccacaaaaacgcggagtatgtacccgtgttggtacaatgacaccgaagaagccgaactcagcgcttcgtaaatatgcccgtgttcgcttaactaacggaatcgaggttacagcctacattcctggtatcggacacaacctgcaagagcacagtgtcgtattgatccgcggtggacgtgtaaaagacttaccgggggtacgctaccacatcgtgcgtggcgcacttgatactgccggagttgaaaaccgtgcacaaggccgttctaaatacggtacaaaacgtcctaagaaaaaataa

SEQ ID NO: 122 - DNA, 471 bp, Bacillus licheniformis
atgccacgtaaaggtcctgtagcaaaaagagacgttttacctgatccgctttacaactctaaactggttactcgtttgatcaacaaaatgatgatcgacggtaaaaaaggtaaagctcaaacaatcctatacaagtcattcgatattattaaagaacgtaccggcaacgatgcaatggaggttttcgaacaagcattgaagaacatcatgccagtgcttgaagttaaagcacgccgcgtaggtggtgcgaactaccaagtacctgtagaggttcgtcctgaacgccgtacgactcttggacttcgctggttagtaaactacgctcgtcttcgcggagaaaaaacgatggaagagcgtttagctaacgaaatccttgatgcagctaacaacactggtgctgctgttaagaaacgtgaagatactcataagatggctgaagcaaacaaagcgttcgctcactatcgctggtaa

SEQ ID NO: 123 - DNA, 2079 bp, Bacillus licheniformis
atggcaagagagttctccttagaaaaaactcgtaatatcggaatcatggctcacatcgatgccggtaaaacgacaacaactgaacgtatcttgttctacacaggccgtatccataaaattggtgaaactcacgaaggggcttcccaaatggactggatggagcaggaacaagaacgcggtatcacaatcacatctgctgcaacaactgcacagtggaaaggctaccgcgtaaacatcatcgacacaccaggacacgtagacttcacagttgaggttgaacgttccctgcgcgtacttgatggtgccgttgccgttcttgatgcacaatcaggcgttgagccgcaaactgaaacagtttggcgtcaggcgacaacttacggagtacctcgtatcgtatttgtcaacaagatggacaaaacgggtgcggacttcctttactctgtaggaactcttagagaccgtcttgaggcgaacgctcacgcgatccaattaccgattggcgccgaagacaatttcgaagggatcatcgaccttgtagaaaacgttgcgtactactatgaagatgaccttggaacacgctctgaagcgcgtgaaatccctgctgagtacaaagacaaagctgaagagcttcgcgctagcttgattgaagctgttgctgagcttgatgaagagcttatgatgaagtacttggaaggtgaagaaatcacagttgacgagctgaaagcagcaatccgcaaaggaacttgtaacgttgagttctatccggttctatgtggttcagctttcaaaaacaaaggtgttcaattagtgcttgacgcagttcttgactacctgccagctccaactgacgtaccagcaatcaaaggtactctgcctgattctgatgaagaggttactcgtgagtcttctgacgatgcacctttctcagcgcttgcatttaaagttatgactgacccttacgttggtaaattgacgttcttccgtgtgtactcaggaacacttgattccggttcatacgtaagaaactcaacaaaaggcaaacgtgagcgcgtcggccgtatcctgcaaatgcacgccaacagccgtgaagaaatctctactgtgtacgcaggggatatcgctgctgctgtaggtttgaaagacacgactacaggggacacgctttgcgacgagaaaaaccttgttatcctggaatcaatggaattccctgagcctgttatccacgttgcaatcgagcctaaatctaaggctgaccaagacaaaatgtctactgcactggctaaattggctgaagaggatccaacattccgtgcgcatactgaccctgaaacaggtcaaacgatcatcggcggtatgggtgagcttcaccttgatatcatcgttgaccgtatgaaacgcgaatttaaagttgaagccaacgtcggtgctcctcaagttgcgtatcgtgaaacattccgtgcgagcgcgcaagttgaaggtaaattcgtacgtcagtctggtggacgcggacagttcggacacgtttggatcgaattctctccaaacgaagaaggaaaaggctttgagttcgaaaacgcaatcgtcggtggtgtcgttcctcgtgaatacattccggctgttcaagcaggacttgaagatgcacttcaaaacggtgtagtcgcaggttaccctgttatcgacatcaaagcgaaactttttgacggttcttaccacgatgtcgactctaacgaaatggcgtttaaaatcgctgcttccatggcgcttaaaaacgcggcaagcaagtgtaacccagttattcttgagccgatctccaaagttgaagtcgttatcccagaagaatacatgggagacatcatgggcgacattacgtcacgccgcggtcgcgtagaaggtatggaaggacgcggaaacgctcaggtcgttcgcgcgatggttccactttctgaaatgttcggttacgctacggctctccgttcaaacacacaaggacgcggtacgttcacaatggtctttgaccactatgaagaagtgcctaagagcatcgctgatgagatcatcaaaaaaaatcaaggtgaataa

SEQ ID NO: 124 - DNA, 1191 bp, Bacillus licheniformis
atggctaaagaaaaattcgaccgttccaaatcacatgccaacattggtacaattggacacgttgaccatggtaaaactacattaacagctgctatcactactgtgcttcataagaaatctggtaaaggtactgctatggcatacgaccaaatcgacggtgctccagaagagcgcgagcgcggtatcacaatttctactgcacacgttgagtacgaaactgacaaccgtcactatgcacacgttgactgcccaggacacgctgactatgttaaaaacatgatcactggtgctgcgcaaatggacggtgcgatccttgttgtttctgctgctgacggcccaatgccacaaactcgtgagcacatccttctttctcgtaacgtaggtgtgccttacatcgtagtattcttgaacaaatgcgacatggtagacgacgaagagcttcttgagctagttgaaatggaagttcgcgatcttctttctgagtatgagttccctggtgacgatgtaccagttatcaaaggttctgctcttaaagctcttgaaggagatgctcagtacgaagaaaaaatctttgaactgatggctgctgttgacgagtacatcccaactccagagcgtgaaactgacaagccattcatgatgcctgttgaggacgtattctcaatcacaggtcgtggaacagttgctactggacgcgtagagcgcggacaagttaaagtcggtgacgaagttgaaatcatcggtcttcaagaagaaaacaagaaaacaactgttacaggtgttgaaatgttccgcaagcttcttgactatgcagaagctggagacaacatcggtgcacttcttcgcggtgtatctcgtgaagaaatccaacgcggtcaagtacttgctcaaccaggtacaatcactccgcacaaaaaattcaaagctgaagtttacgttctttctaaagaagagggtggacgtcacactccattcttctctaactaccgccctcagttctacttccgtacaactgacgtaactggtatcattcagcttccagaaggcgtagaaatggttatgcctggagacaacatcgaaatgactgttgaattgatttcaacaatcgcgatcgaagacggaactcgcttctctatccgtgaaggcggacgtacagttggttctggcgttgtttcttcaatcatcgaataa

SEQ ID NO: 125 - DNA, 135 bp, Bacillus licheniformis
atgcactattatacaaaatttataggcatgttgcaaggtaatattgaatattaccggcttttgcacactttttttattatacagattcaagcagtgttaatcaaggacttacaggcggaaaataaatccctttag

SEQ ID NO: 126 - DNA, 309 bp, Bacillus licheniformis
atggcaaaacaaaaaattcgtattcgtttaaaagcgtatgatcatagaatccttgatcaatctgctgagaagattgttgaaacggctaaacgttccggagccagcgtttctggtccgattccgttgccaactgagaaatcagtttacacaatccttcgtgcggtgcacaaatacaaagattctcgtgagcaattcgaaatgcgtacacataaacgtttgatcgacattgtgaacccaacaccacaaactgttgatgctctaatgcgattagatttaccatctggtgtcgatatcgaaattaaactttaa

SEQ ID NO: 127 - DNA, 630 bp, Bacillus licheniformis
atgaccaaaggaatcttaggaagaaaaattggtatgacgcaagttttcgcagaaaacggtgatcttattccggtaactgttatcgaagctgctcctaacgttgtgcttcagaagaaaacttctgaaaacgacggctatgaagcgattcagatcggttttgacgacaagcgtgaaaagcttgccaacaaaccagaaaaaggacacgttgcaaaagcggaaactgctcctaagcgcttcgttaaggaattacgcggagtggatatggatgcgtatgaagttggtcaggaagtcaaagttgatattttctctaacggagaaatcgtagatgtaacaggaacatcgaaaggtaaaggtttccaaggcgctatcaaacgccacggacaatctcgcggaccaatgtctcacggttcacgctaccaccgccgtcctggttcaatgggaccggtagaccctaaccgtgtattcaaaggaaagctgttgcctggacgtatgggcggagagcaaatcactgttcaaaaccttgaaatcgtaaaagtagatgcagagcgcaaccttcttttagttaaaggtaacgttcctggtgccaaaaaatcactagtcactgttaaaagtgctgttaaatctaaataa

SEQ ID NO: 128 - DNA, 624 bp, Bacillus licheniformis
atgccaaaagtagctttatataaccaaaacggttctactgctggtgatatcgaattaaacgactctgtatttggaatcgagccaaatgagagcgtagtattcgacgctattcttatgcaaagagcttccttgcgtcaaggaactcataaagtaaaaaatcgttcggaagtacgtggcggaggtcgcaaaccttggcgtcaaaaaggtaccggccgtgctcgtcaaggatctatccgttcaccgcaatggcgcggaggtggtatcgtattcggtcctacaccacgcagctatgcatataaattaccgaaaaaagttcgccgcttggctatcaaatcagcattgtcttctaaagtgaatgacaacaacttgatcgttcttgaagatcttaatcttgatgcggttaaaacaaaagaaatggcagctatccttaaaggtctgtctatcgagaagaaagctttaatcgtaactgcggatgcaaacgagacagttgaactatctgctcgcaaccttccaggagttactgttgttgaagctaacggaatcaacgtcctcgatgttgtcggtcacgagaagcttgtgatgacgaaagcagcggttgaaaaagtagaggaggtgcttgcataa

SEQ ID NO: 129 - DNA, 288 bp, Bacillus licheniformis
atgaaagatcctcgtgatgttctaaagcgccccgtcattactgaacgttctgctgatttaatgactgaaaaaaaatatacgtttgaagttgacgtaaaagccaacaaaacagaagtgaaagacgctgttgaacaaatctttggagtgaaagttgaaaaagtcaacatcatgaactacaaagggaaattcaaacgtgtcggccgctactctggtatgacaaacaaacgcagaaaagcgattgttaagcttactgaagacagcaaagaaatcgaaatttttgaagcttaa

SEQ ID NO: 130 - DNA, 834 bp, Bacillus licheniformis
atggcgattaaaaagtacaaaccgacctctaacggacgtcgcggcatgacttcttctgatttcgcggaaatcacgacagatcagccggaaaaatccttgcttgccccgcttcacaaaaaaggcggacgcaacaaccaaggtaaattaactgtacgtcatcaaggcggcggacataaacgccaataccgtattatcgacttcaagcgcgataaagatggtatacctggacgcgttgctacagttgagtacgatccaaaccgttcagctaacattgctctaattaactatgtagacggagaaaaacgctacatcctagctcctaaggggcttcaagtaggcactgaaatcatgtcaggtccagaagctgacattaaagtaggtaacgcacttccactgatcaacatccctgttggtacagttgtgcacaacattgaattaaaacctggaaaaggcggacagcttgtacgttcagctggtacatctgctcaagttcttggtaaagaaggtaaatacgttcttgtacgtcttaactccggtgaagttcgcatgattctttctgcttgccgcgcaacaatcggtcaagtgggtaacgaacagcatgaactgatcaacatcggtaaagccggacgttctcgctggaaaggcgttcgccctacagttcgcggttctgttatgaaccctaacgatcacccgcacggtggtggtgaaggacgcgctccaatcggacgtaaatcacctatgtctccatggggtaaaccaactcttggattcaaaactcgtaagaaaaagaacaaatcagataaattcatcgtacgtcgtcgtaaaaataaataa

SEQ ID NO: 131 - DNA, 279 bp, Bacillus licheniformis
atggctcgcagcttaaaaaaaggaccatttgtcgatgatcatctaatgacaaaaatcgagaaattaaatgaagcggataagaaacaagttgtgaaaacttggtctcgccgttctactattttcccgcaatttatcggtcacacaatcgcagtctatgatggacgcaaacatgtgcctgtttacatctctgaagatatggtaggtcacaagttgggtgaattcgcaccgactcgcacttacaaaggtcatgctagtgatgacaagaaaacaagacgctaa

SEQ ID NO: 132 - DNA, 345 bp, Bacillus licheniformis
atgcaacaagctaaagctgtcgcaagaacagtccgtattgctcctcgtaaggcacgtctagtaatggacctgattcgaggcaagcaagtaggtgaagcagtatcgatcttaaaccatacgccaaaagctgcttccccgattattgaaaaagttttaaaatctgctatcgccaacgctgagcacaactacgaaatggatgcaaacaacctggttgttactcaagcttacgtgaacgaaggccctacgttgaaaagattccgtccgcgcgctatgggacgtgcaagccaaatcaacaaacgtacgagccacattactatcgttgtatcagaaaagaaggagggataa

SEQ ID NO: 133 - DNA, 657 bp, Bacillus licheniformis
gtgggtcaaaaggtaaatccagtcggtcttcgtattggggttatacgtgattgggaatctaagtggtacgctggcaaagattacgctgacttccttcacgaagatctgaaaatccgtgaatttattaatcaacgcctgtctgacgcttcagtttctaaagtagaaatcgagcgtgcggcaaaccgtgtaaatattacgatccacacagctaagcctggtatggttatcggtaaaggcggttccgaagtcgaagcgcttcgcaaagcccttaacagccttactggcaagcgtgtacacattaacattcttgaaatcaaaagagctgatcttgatgctcagctagttgctgataacattgctcgtcaattggaaaaccgtatctctttccgtcgtgcgcaaaagcaacaaatccaacgcacaatgcgcgctggtgcacaaggaattaaaacaatggtttccggtcgtcttggcggcgctgacatcgctcgttctgaatactacagtgaaggaactgttccattgcacacacttcgtgcagacatcgactatgctacatctgaagctgacacaacttacggtaagcttggtgtaaaagtctggatctatcgtggagaggttcttcctactaagaagaaaactgaggaaggaggaaaataa

SEQ ID NO: 134 - DNA, 435 bp, Bacillus licheniformis
atgttaatgccaaaacgcgttaaatatcgcagagagcatcgcggaaaaatgcgcggccgtgcgaaaggcggcactgaagtgcatttcggtgaatacggtatccaagctcaagaatcttcttggatcacaaaccgccaaatcgaagcagcacgtattgcgatgactcgttacatgaaacgtggcggtaaagtttggatcaaaattttcccttctaagccttatacagctaagcctctagaggttcggatgggttccggtaaaggtgctcctgaaggatgggtagctgttgtaaaaccgggcaaagttttatttgaaatttctggtgtgtctgaggaagtcgctcgcgaagctcttcgtcttgcatctcacaaattgccaattaaaacgaagttcgtaaaacgtgaagaaattggtggtgaatcaaatgaaagctaa

SEQ ID NO: 135 - DNA, 202 bp, Bacillus licheniformis
atgaaagctaatgaaattcgtgaccttaccactgctgaaattgaacaaaaaagtaaagtctcttaaagaagaacttttcaatcttcgctttcaattagcgacaggacaacttgaaaacactgctcgcattcgtgaagtgcgcaagtcaatcgcgcgcatgaaaactgtgattcgggaaagagaaattgctgccaacaaataa

SEQ ID NO: 136 - DNA, 264 bp, Bacillus licheniformis
atgagcgaacgcaatcagcgcaaagtctaccaaggacgtgttgtttctgacaaaatggataaaaccattactgttgttgtagaaacatacaaaaagcattcactctacggtaaacgcgtaaagtactctaaaaaattcaaagcacatgatgaaaataaccaagctaaaatcggagacatcgtaaagatcatggaaactcgtccattatctgcgactaaacgttttcgtctagttgaagttgtcgaagaagctgttattatctaa

SEQ ID NO: 137 - DNA, 369 bp, Bacillus licheniformis
atgattcaacaagagactcgtttaaaagtagctgataactctggtgcccgtgaagtgttaacaatcaaggtgcttggtggttctggacgcaaaacagctaacattggtgatgtcattgtttgcacggttaaacaagcaacaccaggaggcgttgtcaaaaaaggtgatgtcgtgagagctgtagtcgtacgttctaagagcggtgcacgcagaaatgacggatcttacatcaaattcgatgagaatgcatgtgttatcatccgtgacgacaaaagcccgcgcggaactcgtatcttcggacctgtagcacgtgaacttcgtgataacaacttcatgaaaattgtttctctagctccagaagtactttaa

SEQ ID NO: 138 - DNA, 312 bp, Bacillus licheniformis
atgcatgttaaaaaaggcgataaagtaatggttatctctggtaaagacaaagggaagcaaggtgtaattcttgcagctttccctaaaaaagaccgcgtaatcgttgagggtgtcaacatggtgaagaagcactcaaagccgactcaagcaaaccctcaaggcggaattttaaatcaagaggcgccaattcatgtgtcaaacgtaatgccgctcgatcctaaaacaggtgaagtgactcgcgtaggatacaaagtagaaaatggcaaaaaagttcgtattgcaaaaaaatctgggcaagttctagataactag

SEQ ID NO: 139 - DNA, 540 bp, Bacillus licheniformis
atgaaccgccttaaagaaaagtacaataaagaaattacacctgcattaatgaaaaagttcgaatacaaatctgtgatgcaagtgcctaaaatcgaaaaaatcgtaatcaacatgggtgttggtgacgctgttcaaaacgctaaagctatcgatagcgctgttgaagaactaacgtttatcgctggtcagaaacctgtcgttactcgtgcgaagaaatctattgctggattccgtcttcgtgaaggaatgccaatcggtgcgaaagtaactcttcgcggagagcgcatgtacgatttccttgataaactaatttctgtttctttaccgcgtgtacgtgacttccgcggaatttcaaaaaaatcttttgacggtcgcggaaactacacactaggaatcaaagaacagctgatcttccctgaaattgactatgataaggtaactaaagttcgcggtatggatatcgttattgtaacgactgccaacactgatgaagaagctcgtgaactgttaactcaattaggtatgccattccagaaataa

SEQ ID NO: 140 - DNA, 186 bp, Bacillus licheniformis
gtggctaaaaagtcaatgattgcgaaacaaaaacgcacaccgaagtttaaagtacaagagtacactcgctgcgaacgctgcggccgtccgcactctgttattcgtaaatttaaactttgccgtatttgtttccgtgaacttgcatataaaggacaaattcctggcgttaaaaaagccagctggtaa

SEQ ID NO: 141 - DNA, 399 bp, Bacillus licheniformis
atggttatgacagatccgattgcagatatgctgactcgtattcgtaatgcaaacatggtacgtcatgagaagctcgaaattcctgcttctaagttgaaaagagagatcgctgaaatcttgaaaagagaaggtttcatccgtgacgtagaattcattgaagataacaaacaaggcatcatccgtgttttcttgaaatacggacaaaacaacgagcgtgtcatcactggccttaaaagaatcagcaaaccaggtctgcgcgtttacgctaagtcaaacgaagtgcctcgcgtgcttaacggacttggaatcgcaattctttctacatcacaaggtgtgttaacggataaagaagcccgcgctaaacaggctggcggagaagtattagcatacgtttggtaa

SEQ ID NO: 142 - DNA, 537 bp, Bacillus licheniformis
atgtctcgtgtaggtaagaagctacttgagattccttcaggcgttacagttactctgaacgacaacactgtaaccgtgaaaggaccaaaaggagaattaactcgtacgtttcatcctgatatgaagattaaaattgaggacaatgtacttactgtagaacgtccttcagataataaagaacaccgtgcgctgcatggcacaactcgcagcatcatcggaaacatggttgaaggtgtatctaaaggttttgaaagaggtttggaattagtcggtgtcggttaccgtgcttctaaatccggaaacaaacttgttttgaacgttggatactctcaccctgtagaaatcgttcctgaaaacggaattgaaatcgaagttccatctcaaacaaaagtggttgtaaaaggtacagataaagaacgtgttggagctactgctgcaaacattcgcgctgtacgttctccagagccttacaaaggcaaagggatccgctatgaaggagaaatggttcgtcgtaaagaaggtaaatctgctaagtaa

SEQ ID NO: 143 - DNA, 363 bp, Bacillus licheniformis
atgattacgaaaacaagcaagaatgctgcacgtcttaaaagacacgctcgtgttcgtgcgaagctttcaggaacccctgaaagacctcgtctaaatgttttccgttcaaacaaacatatttacgcacaagtgatcgatgacgtgaacggtgttacacttgtgagtgcatctactcttgataaagactttaacgctgaaaatggcagcgatacggctgcggctgcaaaagttggagagcttgttgcaaagcgcgcttctgaaaaaggtatcacaaatgtcgtgttcgaccgtggcggttacctttatcatggacgtgtaaaagcattggctgatgctgcacgcgaagctggattagaattttaa

SEQ ID NO: 144 - DNA, 501 bp, Bacillus licheniformis
atgcgtcgtattgacccaagcaaattagagttagaagaacgcttagttaccgttaaccgcgtagcgaaagttgttaaaggtggtcgtcgtttccgtttcgcagctctagtcgttgtcggtgacaaaaacggtcacgttggtttcggaactggtaaagcacaagaagttccggaagcgattcgcaaagctgttgaagatgcgaaaaagaatttgatcgaagtaccaatggttggaactacaattccacacgaaatcatcggacgtttcggtgcaggaaacatcttgttaaaacctgcttctgaaggtacgggagtcatcgctggaggcccagtacgtgcggtacttgagcttgcaggtgtatctgatatcctttctaagtctttaggttctaacacaccgatcaacatgatccgtgcaacagtccaaggtttaagcgagctgaaacgcgctgaggacgttgcgaagcttcgtggaaaatctgtagaagaactgttaggataa

SEQ ID NO: 145 - DNA, 180 bp, Bacillus licheniformis
atggctaaattagaaattaccctcaaacgcagtgtaatcggacgcccggaagatcagcgcattactgtaagaacgcttggtttaaagaaaacaaaccaaactgtcgttcatgaagacaacgctgcaatccgcggtatgattaacaaagtatctcatttagtttctgttaaagaactttaa

SEQ ID NO: 146 - DNA, 441 bp, Bacillus licheniformis
atgaaacttcatgaattaaagcccgcagaaggttcacgtaaaacgcgcaaccgcgtaggtcgtggtattggttctggtaacggtaaaacagctggtaaaggtcataaaggtcaaaacgctcgttctggcggcggtgtacgtcctggattcgagggtggacaaatgcctttattccaacgtcttcctaaacgcggtttcacaaacatcaaccgcaaggaattcgctgtggtcaacctagacaaactcaacagctttgcagaagggacggaagttactcctgaacttcttttagaaacaggtgtaatcagcaagtttaaatctggagtgaaaattcttggcgacggtaaattagaaaagaaattaactgttaaagccaataaattctccgcttctgctaaacaagcaattgaggctgctggcggtacagctgaggtgatctaa

SEQ ID NO: 147 - DNA, 1296 bp, Bacillus licheniformis
ttgtttaagacaatctccaattttatgcgtgtgaaggatattcggaataagattatcttcactcttttaatgcttatcgtctttcgtctcggttcgttcattcctgtgccgcacgtaaacacagaagttttaaaggcacaggatcaaatgagcgtatttgggattctaaacacatttggcggcggtgcattgttcaacttctccattcttgcgatgggaatcatgccttacatcacagcttctatcatcatccagctcctgcagatggatgttgtgccgaagtttaccgaatggtctaagcagggggaagttggtcgccgaaaactagctcagttcacaaggtacttcacgatcgttcttggatttatccaggctttaggtatgtcttacgggtttaacaacatggccggcggcgcgttgattacagacccgggagtcggtacttatttgcttattgcgattgtactaactgctggaactgcttttttaatgtggctgggagaacaaattacgtctcatggagttggtaacggaatatccattatcatcttcgccggtatcgttgccggtattccgcagacgattaatcagatctacgctcagcagtttgtagatgctggagatcagttattcttgcaaatcataaaggttgtcgttatattggttgcgattttagcgattgtcgttggcgttattttcatccaacaggcggttagaaaaatctcaattcaatatgcgaaaggttcaggccgttcaccggttcctggcggccagtctacacacttgccgctgaaggttaacccggcgggagttattccggttatctttgccgtagcatttatcaccactccgcggaccgtggcaacattctttggctccaatgacgtcacgaattggattcaaaaaacgtttgattacacgcatccggtcggaatgggagtttatgcagcattgatcatcgcctttacctatttctatgcatttgtgcaggttaaccctgagcaaatggccgataatcttaaaaaacaaggcggctatattccgggagttcgtccaggaaaaatgactcaagatagaattacgagcattttgtatcgacttacatttgtaggctccatattcttggccgtgattgccattcttcctgtcttgttcgttaatattgctgggctgccttcttctgcacaaattggtggaacaagtttgctgattgtcatcggggttgcacttgaaacaatgaagcagcttgaaagccagctggtaaaacgaaactatcgtggatttatgaagcactag

SEQ ID NO: 148 - DNA, 654 bp, Bacillus licheniformis
atgaacttagtcttaatgggactgcctggagccggtaaagggacacaggctgaacggattgttgaagattttgggatacctcatatctcaacaggagacatgttccgcgctgcgatgaaagaagaaacggatctgggactcgaagccaaatcatacattgataaaggcgagcttgttccggatgaagtgacaattggtattgtcagggagagacttggcaagaatgattgtgacggaggttttcttctggacggatttccgagaacagtcgctcaagctgaagcacttgaggaaattcttaaaggacttggcaagtcgattgaccatgtcatcaacattcaagtcgataaagatgcattgatggaacgtctgacaggacgcagaatctgcaaaaactgcggtgcaacttatcatttagtctttaatccgcctgcaaaagaaaatgtatgcgacaagtgtggaggagagctttatcagcgtgaagacgataatgaagctaccgtatccacgcggttagaggtcaacatgaagcaaacccagcctttactcgatttctatgaagataaaggatatctcgtaaacattgacgggcagaagcacatcaatgaagtttacgctgatataaaggagcttctcggaggccgggacaaatga

SEQ ID NO: 149 - DNA, 747 bp, Bacillus licheniformis
atgattatttgtaaaactccccgagaaatcgaaatcatgcgggaggccggacgaattgtcgctttaactcatcaggagctaaaaaagcacattaaacccggcatctcgacaaaagaattggatcaaattgccgaacgttttattacaaagcaaggtgcaatcccatcttttaaagggtataatggttttcgcgggagcatttgcgtttcggtcaacgaagaactcgtgcacggtattccgggaaaacgagtccttcgcgacggggacatcatcagcatcgatatcggtgcgaagctaaacggttatcatggtgactccgcttggacttatccagtgggtacgatcagcgatgatgatcagaagctgctggatgtgacagaggagtctttatatagaggcttgaaggaagcaaaaccgggagaacgtttgtcgaatatttcccacgcaatacaaacgtatgtcgaaagcgaacaattttcagtcgtcagggaatatgtaggacacggggtagggcaggatctgcatgaggatccgcaaattcctcactacggtccgccgaacaaaggcccgcgtttaaagcctggcatggtcttggccattgagccgatggtcaatgcaggtacacgctatgtcaaaacattggctgacaactggacggttgtaactgtggacgggaagaagtgtgctcactttgaacacacgattgccattacggatgccggttttgagatactgacaaaagcctag

SEQ ID NO: 150 - DNA, 330 bp, Bacillus licheniformis
atgtatcggaaaacacctgaaattggacagttcgtacgcatgacaagaggccgcgaaatgaaccaatacgcagttgttattgatatagtcgatcatcatcatgtgctggtagcagacggagaaaagcgtaaatttcattctcctaagaaaaagaatatcaatcatttaaccttttatgattgcgtatctccggaagttcagaacagtataaacgaaacagggcgtgtgacaaacggaaaattgagattttctcttttgaaatttgtcagagagcaagttactgatttgaagaagggagaacacttgaatggcgaaagacgatgtaattga

SEQ ID NO: 151 - DNA, 219 bp, Bacillus licheniformis
atggcgaaagacgatgtaattgaagtggaaggtactgtagtcgaaacgctgccaaacgcaatgttcaaagttgaacttgagaatggccacacggttttggctcacgtatctggtaaaatccgcatgcacttcattcgcattttacctggagacaaagttacggtagaattatctccatatgacttaactcgtggtagaattacgtaccgttacaaataa

SEQ ID NO: 152 - DNA, 114 bp, Bacillus licheniformis
atgaaagtgagaccatcagttaaaccgatctgtgaaaaatgcaaggtcattcgcagaaaaggaaaagtaatggtgatctgtgaaaatccaaagcataaacaaaaacaaggataa

SEQ ID NO: 153 - DNA, 366 bp, Bacillus licheniformis
atggctcgtattgctggtgtagatatcccacgtgataaacgtgttgttatttcattaacatacatctttggaatcggtcgtacaacggctcagcaaatcttaaaagaagctggagtttctgaagatactcgcgttcgtgatttgactgaagaagaacttggtaaaatccgtgacgtgatcgacaaattgaaagtagaaggtgaccttcgccgtgaagtgtctcttaacatcaaacgtctgatcgaaatcggaagctaccgcggaattcgtcatcgtcgcggattgcctgttcgcggtcaaaatactaaaaataacgcgcgtactcgtaaaggtccgcgtcgtactgtagctaacaagaaaaaataa

SEQ ID NO: 154 - DNA, 396 bp, Bacillus licheniformis
atggctgctgcacgtaaaacaaacacgcgtaaacgtcgcgtgaaaaagaatattgaatctggaattgctcatatccgttcaactttcaacaacacgattgttactatcacagatgttcatggcaatgctctttcttggtcaagtgccggagctttaggatttaaaggttctaaaaaatccactccattcgctgcacaaatggctgctgaaacagctgctaaaggttctatcgaacatggacttaaaactcttgaagttactgtaaaaggaccaggttccggccgtgaagctgcaattcgtgcacttcaagctgctggactagaagttacagcgatcagagacgtaacgcctgttcctcataacggatgccgtccgccaaaacgtcgccgcgtgtaa

SEQ ID NO: 155 - DNA, 945 bp, Bacillus licheniformis
atgatcgagattgaaaaaccaaaaatcgaaacggttgaaatcagcgacgatgccaagtatggtaaatttgtcgtagagccacttgagcgtggatatggtacaactttgggtaactccttacgtcgtatccttttatcctcactccctggtgccgctgtaacatcgatccaaatagatggtgtactgcatgaattctcgacgatcgaaggcgttgttgaagatgttacaacgattatcttaaacattaaaaaacttgcactgaaaatctactctgaagaagagaagacgcttgagattgatgttcagggtgaaggagttgtaacagctgctgatattacccacgacagtgatgttgagattttgaatcctgatcttcacattgcgactcttggccaaaatgcgagttttcgagttcgcttaactgctcaaagaggtcgcgggtatacaccagctgacgcgaataaaagagacgatcagccgattggcgtcatcccgattgattccatctttacacctgtttctcgcgtatcttatcaagttgagaatactcgtgtgggtcagattacaaactatgacaaacttacgcttgacgtatggacagatggaagcactggaccaaaagaagctattgcacttggttcaaagattttgactgaacaccttaatatttttgtcggtttgaccgacgaagctcagcacgctgaaatcatggtagaaaaagaagaggatcaaaaagaaaaagttcttgaaatgactattgaagaactcgatctttcagtccgttcttacaattgcttgaagcgtgcaggaatcaatacagttcaagaacttgcgaacaaaactgaagaagatatgatgaaagttcgcaacctgggccgcaagtcgcttgaagaagtaaaagcgaaacttgaagaacttggacttggccttcgcaaagacgattga

SEQ ID NO: 156 - DNA, 363 bp, Bacillus licheniformis
atgtcatacagaaaactaggacgcactagtgcacagcgtaaagcaatgctgcgtgatcttacaacagacttgatcatcaacgagagaattgaaacaacagaagctcgcgcgaaagaacttcgctctgttgtagaaaaaatgattacacttggcaagcgcggagatttacacgcacgccgccaagcagctgcatacatccgcaatgaggttgcagatgcagagaaaaaccaagatgcacttcaaaaacttttctctgatgtagcacctcgttatgaagagcgccaaggcggatacacacgtattatgaagcttggtcctcgccgtggtgacggagcaccaatggctatcatcgaattggtttaa

SEQ ID NO: 157 - DNA, 846 bp, Bacillus licheniformis
atgaatcaagagcgattaatcgctgcagaagatatcacgtttcgctaccagaaagatgcagacaggcctgcgcttgatcacgtatctttccatgtgtcgaaaggcgaatggcttgcgatcgtcggtcacaacggttcaggaaagtcgacgctcgcccgtgctttaaacggactgattctgcctgatgaaggatcgattaaagtaggcggtatcaagctgatggaagagacggtctgggatgtccgaaaaaaggtcggcatggtgtttcaaaatccggataaccaatttgtcgggacaaccgtccgcgatgatgtggcttttggtttagaaaacagcggagttccaagagaagacatggtggaaagggtggattgggccgttcaacaggtgaacatgcaagaatttctcgatcaagagccgcaccatctctcgggaggacaaaagcagcgtgttgcgattgcgggagtgcttgctgcccggcctgacatcatgattctcgacgaagcgacttccatgctcgacccgatggggcgggaagaagtgctggatacggtcagaaggctgaaagaccaaggaatggttacggtcatttcgattacccatgacttaaacgaagccgcgaaggccgaccggatcatcgtcatgaacagcggtagaaaatttgccgaaggcacgccgcaggaagtctttcgtctgaatcaagatctgtttaaaatcgggcttgatttgccattttcttttcagctcacccaaatgctgaaggaaagcggtctggctctgaaaggcgatcatctgacacaagaaggattggtgaatgagctatggacattgaaatcaaagatgtag

SEQ ID NO: 158 - DNA, 831 bp, Bacillus licheniformis
atgaaaacgccttttgaacgcctggcgatctatgatgtcaacgctgtgattaaagaaggtagctatgtcgccgtaatcggccatacaggatcgggaaaatcgactttgcttcagcacctgaacgggcttttaaaaccgacaaaaggacagatacgcctcggcgaggacgttcttgaagcaggcaaaaagaataaacatctaaaagctttgcggaaaaaggtcggcattgtctttcagtttcctgaacatcagctgtttgaagaaacaattttaaaggatatcgcattcggtccgatcaactttggcatgagccgggaaaaggcggaagaaaaagcgagggaaatgctgaagctggtaggtttgggtgcagagctgtccgacaggtctccgtttgaactaagcggagggcaaatgcgccgcgtggccattgcgggagtgctggcgatggagcctgaggttcttgtcctcgatgaaccgacggcagggcttgacccaagaggccgcaaggagatcatggacatgttctacagcctccataagcagaggaacctgacgacaattctcgtcacccacagtatggaagacgcggcagcgtatgcagatgaactgattgtgatgcataaagggacggtcaaagcaaaagggacgccgcgggagcttttttcaaggaaagacgacattgccgctttagggcttgatttgccggaaacgattaaattccaaaaacgccttgaagaaacgctggggattacgttcaaagcgccgattttgacgattgaagaagcagcctccgaagttaaagctctttttcaggaggaaaatgccctatga

SEQ ID NO: 159 - DNA, 798 bp, Bacillus licheniformis
atgatggacaatatcattatcggcaaatacgtacccgggaaatcggtcattcatcggctcgatccgcgtacaaagctgttaaccattttcctttttgtctttatcgtttttttcgcgaataatacggaaacatatgcattgctcggcctgtttacggttgcagccgccgctttgtcaggcgttccggtgcgattccttataaaaggaatgaagccggtgttctggattgtgctgtttacgtttctgcttcatatttttatgacaagggaaggaccggttctcgccgatctcggcctgtttaaaatttatgaacaggggcttgttcaagggatttttatttctctgcgctttgtttacctcatcatgatcacaacgattttaacattgacgacgactccaatcgaagtgaccgatggtttggagcatttgctcggtccgtttaaaaaattgaagcttcccgtccatgaacttgctctcatgatgtccatctccctcagatttataccgactttgatcgaagagacggataagatcatgaaagcgcaaatggcaagaggcgtcgattttgcgaacggcccggtcaaagaacgcgtcaaagcgatcgttcctctccttgtcccgctttttgtcagtgcctttaaaagagctgaagagcttgcaaccgctatggaggcgcgaggatacaggggaggagaaggccgtacaaaatacaggcagctgacatggaaatggaaggatacttccgtgctcctcattttagctgttcttggcgttttgctaattttattgcgtacttag

SEQ ID NO: 160 - DNA, 744 bp, Bacillus licheniformis
atgagaatgaagtgcacgatttcatatgacggacaccttttttacggctaccaagtgcagcctgggcaaagaacggttcaggatgagcttgaaaaagcgctgcaaacgctccataaagcgaaggagcgtattcctgtcgtttcatccgggcgcaccgacagcggcgtccacgcagtcggacagacgattcattttgacagtccgctatccattcctgaggcgaaatggccgtatgcattgaatgccctgctgcccgatgatatatcggtccgcaaggcggaagctgtcaatgatcaatttcatgcgaggttttctgcgaaaagaaaagaataccggtatatgatatacaggggcagacatccggacgtttttaaacgctactatgcataccatgttccttatgaccttgatatggagaaagttaaggaagcctcccgctatctggtcggaacccatgacttcacaagcttttgtgcgaccaaaaccgaagtgaaggataaagtcagaacggtccatgaactggaatggtctgacacaggggacggactgcagatgagaattgtgggaagcggatttttgtataacatggttagaatcattgccggtacgcttcttgatgtaggaaccggcaaattttcccctggtgacattgaaaagatgattcttgccaaaaaccgcgatgccgcagggcgcactgcaccggcacacggcttatatttatggcgtgttatctatgacaactaa

SEQ ID NO: 161 - DNA, 438 bp, Bacillus licheniformis
atgcgtacaacacctatggctaacgcaagtaatattgaacgcaagtggttagttgttgatgctgctggcaagacgctaggacgtctttctactgaagttgcatctatccttcgcggaaaacataaaccaacttacacaccacacgttgacactggagatcatgtgatcatcatcaacgctgaaaaaatcgagttaactggtaaaaagttaacggacaaaatctactaccgtcacactcaacatccaggcggtttaaaatcaagaactgctcttgaaatgcgtacaaactaccctgagaaaatgcttgaacttgcgatcaaaggcatgcttccaaaaggttctctaggtcgtcaaatgttcaaaaaattgaacgtataccgtggttctgagcatccacaccaagcacaaaaacctgaagtttacgaacttcgcggttaa

SEQ ID NO: 162 - DNA, 393 bp, Bacillus licheniformis
ttggcacaggttcaatattacggtactggccgtcgtaaaagctctgtagcgcgcgtgcgtttagttccaggagaaggccgtatcatcgtgaataatcgtgaaatcagcgagcacatcccatctgcagctctaatcgaagatatcaaacaaccattaactttgactgaaacagctggtacttatgacgttttagtaaacgtacatggaggcggcttctccggtcaagctggagcaatccgtcacggtatcgcccgcgctttgcttgaagcagatccggaataccgttcaactctaaaacgtgccggtctactgactcgtgacgcacgtatgaaagagcgtaaaaaatacggacttaaaggcgcacgccgtgcacctcagttctcaaaacgttaa

SEQ ID NO: 163 - DNA, 1140 bp, Bacillus licheniformis
atggcttcattccagcaatacaagacaaagtcaggatataaatggctttttaaaatgggtgtagggatcgaccctaaaaccggagatagaaaaacgacgacccgccggggtttcaagaccaaaaaagaagctgtcgcagccgctgcggaattccagaaggaaatcgataataatgctcttatccgaaatgacatcacttttgaggatgtctttaaagaatggtgggctgtacattctaaaacaataaagcgaagcaccagatactccaaattatcgaaattcaacaagcatatcctgccgctattcggcaaattgaaaataaaagacatcacaaaagcgtattgccaaaaagcaataaaccgaatagcccaagaaattaattccgctcaagatgtgaaaattcaagctaaccttgtgtttaaatacgctttaagaatggattacatctcaacgaatccgatggcttatgttgttatcccgaaaaaagaagaaaattttttatcggatgaagaagagaaacggaacttttgggaaaaagacgagatcaaaatttttcttgataaagcgcactcacaactcaaacagcaagattatgttatgttttacgttcttatttttactggcatgcgtaaaggggaacttctggccttggaatggaaagacgttgatataaaagaaagaacaataaatattaaacaaacattgttttttgaagacggaaaagaagttattcaaacagcaaaaaaatatcattcaaaacgaatcatcaaaattgatgaacaaaccgcccaaatacttaagaaatggcgcacgcagcaaaaggaaatgctcttgtctaatggaatcaccacagaagccaaatacgtcctcatacgggacgatatgcgccctctgaggcttgcatatccaaatgatattttaaaccgtataatagctaaaaataagcttcacaggatcacgattcatggattcagacattcgcacgcttccattctttttgaggcaggtgcatcccttaaagaagtacaagcccgtttgggccataaagaaatacaaacgactatgaacatctatacacatgtcacgaaaaccgcaaaagaaaaaacggccgaaacatttaaaaagtacatggaattataa

SEQ ID NO: 164 - DNA, 480 bp, Bacillus licheniformis
ttggtgtatacaaagagtcatttagaagattggattgaaaacttgtacagaagtatcagtatcattacaccagagcaaattgatttcgagcgtatagctgagttgttaggcataagtgtttattttaagcctatcccaagttgttctttcaagtataatgacgtgtatacgattatattagatagccggaaaacccgtttcgagcagtgggacgactttgctcatgaactatgccacctttacagacatgaaggagataaaaaaacaatgccaaagttttggtcagattatcaggagagacaagccaattacttctcatatcacttttgcatccccacttttatgcttcatggaatgaaaattccacaaaatcatttttctgatgctcacctcattgctaagatgtttaaagtcactgaaccatttgcgaaagtacgccttaacatgtactttaacaaaattcatcttattgttagttaa

SEQ ID NO: 165 - DNA, 348 bp, Bacillus licheniformis
atgaaaagaactactgaatttgttttaggtctaatgggcggaattttcggttttattggtgcctttttggcgttaattgtcggcggactcgatgcctcttttaattcatctggcacaagcgatattattggtttaggttggggtgctatcttcctctcaatccttggaattatcgcttcggtgattgttagaaaaaaagctaaattaggtggaattttgcttattatttctggtatcggtggcctgatttgcattttcttattctacttacttcccgctattcttctaattatctcgggagttatgggacttgctagaagagataaaacaacaacgacggcagtataa

SEQ ID NO: 166 - DNA, 522 bp, Bacillus licheniformis
ttgaaaaaatttttagttttattcctgtctcttggacttgctttggccttagctgcctgcggatcaacagatgacgtatcaacaggggcagacaattccaaagacaagaagacagaagagaagaaagacgacggctctaaaaaagttgatgcaagcagccaaaagactgatgctttaggaatgaaagttaatttaggcgacgttaagattatgaaagataaagttaacgtaggactcaatattgaaaatacaactgataaagtcctaaacttctatcctgatcaaggtaatgcagtagtcggagacatgcaattatcagccaatatgtttttgactgatggcgaagttggtggagaagttcaaggtggcgttaaacaggacggagtgctggagtttgccgtaccagaaggaaaagagcttgatatcaataacattaaagaaatcaagttgaattttggtgatgtaaccactgaagactttatgaataacaaagcagtatcattcactgtgccagttaagtaa

SEQ ID NO: 167 - DNA, 267 bp, Bacillus licheniformis
atggaaaacaaagaatttgaactaattttgaaagagattcaggcaattaacaaccgcctaaccgatcttgaaaaaaatgtcgcaaccaaagatgacatcaaagcattaagtgagaaaattgattctcagcatgccgaaaatatcaattctgataacctgttacttgatgaaatcacctctcttaaagaaggagtcatctttgtcaatcgcaaagtggctgatgcagaattcgagattcatacattaaaaactcgtaaacagcagtaa

SEQ ID NO: 168 - DNA, 366 bp, Bacillus licheniformis
atggctctcggagcaaggataagagctttaagggagaaggaaaacctaactcaaaaagctttagctgcaaaattgaatatccctcaccaaaatctttctaattatgaacgtggtttcagacaacctgattatgaaaccttaattaagatagcggattttttcgaagttacaactgactacttacttcgtggcgtcgacccgaaggttcaagataaaatttttgaagacgaagcaaagaggattctaaatgaccctaaaaccttcattgccgcccgtgatggagaagttacacaggagattttagatgctgcccttgaaatcattacggagcaactgaaagaaggcaggaaaaagaaatctgattaa

SEQ ID NO: 169 - DNA, 237 bp, Bacillus licheniformis
gtgaatgaaaaattaagagcaatcagacaatcaaaaggcataacacaaaaatttgttgcgaaaagtctaggaattcatacagccacttataacggatatgaattaggccgcaggaaaattcatgttgagttactgaaagacattgcggaagttttagacgaaccaattcaaaatttttttgaaaacaaaatatacgaatcgaagaattattacgataaaaaatcccatacagcatag

SEQ ID NO: 170 - DNA, 327 bp, Bacillus licheniformis
ttggctaatctcggtatctcacttgataacttgccgaacgaaacggttttcgaaattgttaaagcgctttgcgaaaaagcttatcagcaaggcgtggaggacggcgtgaaaaaatattcgtatcctccaatattaaaaaacactcatttacaagagattttccaaatcaaatcggcagcggtgacaagactaaccggaattgattcctttccgaagttgaaaactattcaagctagatacccgcgcgatcttgtttttgaatggatcaaacaaaattcaacttgggttgaagaaaacacaagctattttcagaaaggggtgtcttaa

SEQ ID NO: 171 - DNA, 135 bp, Bacillus licheniformis
atgtctgccactagcaagatttataaaagacagcacggaataagtgtaatggaaaaactttgtgtagagaacggcatccgtgtttatgaaaagaaaggtaatgaaatcaaacctaaattttatcgagttaaatag

SEQ ID NO: 172 - DNA, 774 bp, Bacillus licheniformis
atgaatcaactgcaaattttctcaaacaaagaatttggaagcttaccaattgtctacattgaaaataaagtttacttcggagctaccgaaactgctactactctcggatacgcaaacccacatgacgcgatttcaaaacactgcaaaaaagagggggtcgcgtttcacgaggtcctttcaaacggtggaccacaacgaaaaaagttcataaacgaaggcaacctataccggttaatctcaagatcaaaactgccgtcagccgaaaaatttgagtcatgggtatttgatgaagtcatcccgacaatcagaaaaacgggcggctatgtagcaaacgacgatctattcattcagacgtatctgccgcaggctgatgaacaaacgaaacagctttttaaagtcaccctgcacaccatgaaagagcaaagcaagcagatcgaaacaatgaagcctaaagcccttttcgccgatgcagtcgaagcgtcagaatcatccgttctggtgggtgagttagcgaaaatcctcaagcagaacggcatcgagatcggccaaaacaaactattcaaatggctgcgcgagaacggctatctgattcgaaagaaaggtgaatcgtttaaccttcctactcaacgcagtatggatatggggctgttcgaaatcaagaaaagcaccattgtaaacggcgacggatcgatcagaaccacacgtacgccaaaggtaacgggcaaagggcagatttatttcgtcaataaattcatcaagtcgcaatctgcctga

SEQ ID NO: 173 - DNA, 519 bp, Bacillus licheniformis
atgccggaaatagtgtctaaatcactggcgcatctacttgaaacgaagaacatgacaaacgggcaactcgcccttgatttaaacgtttctgagtcgatggtcagcaaaatgaaaaacggaacaagaaaaatgccgtgggatgtggcggaaacgtcgctaaagaaattcgatcaaccattttacgcaatgggaatcatgaacaaattcagcgacggatgctcaccgccagttttcactggggaatcagtcgaacaacatcgactggcttttgaggagatcatggtcacacaggcgacagaagccattcagacacttaatgaggtgagttttgttaagaatccgaagctgatctctctggaagaaagggagcgcattaaagtggtcataaaggaacttctggacgtggaggcatgggctaaaaacttagcggccttattggcgaaggaatacaacatttcactcaaagagtgctacaaaaaagcgactatcacatggaaggcgaaagggtggcttgaatga

SEQ ID NO: 174 - DNA, 138 bp, Bacillus licheniformis
atgctccattaccttcacaggcgggcgacggctttcgaagtaagggaatggtgtgcaagaatccgagaccaccctgaattgcatttgtcatgggatcagtatgtcaagaaatctatgaaaggagatttttctaaatga

SEQ ID NO: 175 - DNA, 102 bp, Bacillus licheniformis
atgaacatagaacacccaattatcacagaaattaaccgttacggctatccaaaggattatttgcggtatgaagaagaggaagaaaacgaagacgacgaggca

SEQ ID NO: 176 - DNA, 582 bp, Bacillus licheniformis
atggctgaaatcgaagaaatcaaaaaagatttaatggatgcaatgccgcaggaagaagaagggcctgaaatatttgaggtgcatgatctagaaacagcgacagaggcgcagcggcgtgttgcttacttcaaaagaaagcaggctgaaatagatgaagtggccgacaagcaaatagaacgcctcaagatgcaaatagaacggcttgaacactggcaagaggaagcaaaaaaggaatatgtcgagcgtgaagatttctacaaacaccgtcttgaaagatacatgcgcgaggaagtcaggaagatgcaagagaacggcaaaaagccaaagaaaaccatcaagctgccttacggaacgatcaagcttgttaagcaacagccggaataccagcgaaacgaaaatgatctgctggagtacgcggaatctaaggggtttgtcagggttaaaaaagacgttgattgggcggctattaaaaataaagccaaggtgttcggcgacaaattaatagatgcagacggcgagttaattcccggcgtaacggtggttgacagggaagacaaattcacggtcgaggtgaacgaatga

SEQ ID NO: 177 - DNA, 630 bp, Bacillus licheniformis
atgaacatttatcaaaagcttgtcgaagtcaggaaggctgttccttatttaaagaaatcgaatcaaggtcatcaatacaattacaccggttcgagtcaggtagttggagcaataagggagaaaatagatgaactggggttactgctgattccggcaatcgttgataaaaaagtaacagcggagaagaacggaaacaggatcacatattttactgaactggacatcgagtacacctgggtaaatgcagagaagccggatgaaacaataaaaaccactttttatgctcagggtatcgacatcggtggggaaaaaggtgtcggcaaggcgctgacttatgcagaaaagtatttcttactgaaacaattcaatgtaccgacagaccaagacgacccggacgcatttcaacagaaagttgagtcctcaaagccgccggaaatgatcacgcaggagcaaaaggatgaaattcaatcactggcacaaagctatgttgaactacgcggtcagggaaatgtgaagacggttttgaccgccttgaatgtcatggatattaacaagattcaaaaaggtgaagcggataaatgtattttccagcttaaaagatgggttacgaaggcacagaaagaatctgct

SEQ ID NO: 178 - DNA, 450 bp, Bacillus licheniformis
atgtcatggatattaacaagattcaaaaaggtgaagcggataaatgtattttccagcttaaaagatgggttacgaaggcacagaaagaatctgcttaaaacatcaagaaaggcggcgcatcacgatgaacaaaatagcccgcaaatgggcgcggatgtcgcggaaacagcagcagagaaccgagaatatcgcggccgtcgtgctggcggccatcctgttcggttggtatgtgttcatgggctttatcatcatttcactttgaagggagaagcgttccatgtggggagtacatcaaagattggcagaattatggaacatcgagaaaaaccacagggcattgaccgaggaagaaagggcagaattaaacatctgcttggatgcaaatttaaacctttgtcgaaaggtggcgcacctaaaaaaccaatctttacttgcgactatgacaaagga

SEQ ID NO: 179 - DNA, 138 bp, Bacillus licheniformis
atgaacaaaatagcccgcaaatgggcgcggatgtcgcggaaacagcagcagagaaccgagaatatcgcggccgtcgtgctggcggccatcctgttcggttggtatgtgttcatgggctttatcatcatttcactttga

SEQ ID NO: 180 - DNA, 213 bp, Bacillus licheniformis
ttggcagaattatggaacatcgagaaaaaccacagggcattgaccgaggaagaaagggcagaattaaacatctgcttggatgcaaatttaaacctttgtcgaaaggtggcgcacctaaaaaaccaatctttacttgcgactatgacaaaggataacgactggcagtttgaaatatgcagccaattagaagaaatatatacggttttccattga

SEQ ID NO: 181 - DNA, 180 bp, Bacillus licheniformis
atgcagccaattagaagaaatatatacggttttccattgattattgcaggaggggaaagatatgaacattccatggagcaaagaacagttaatgatggcatacaaaaaacttatggccgaaaacacggaattaaggagcatgtgcttgtggtcaatcagaagattacaccctatgtataa

SEQ ID NO: 182 - DNA, 996 bp, Bacillus licheniformis
ttgaacggtttgctattagacgaatatcccttgattgtcattccttctttagcaaaagaaatcggattgaatgaagcgatcgttcttcaacaagtccattactggttaaagtcatcaggtaaaaaaagagacggtcgaaagtggatttataacacctatgacgagtggttggagcagtttccgttttggtcaaaaaatacgctgatacgaactgtagaaaaacttgaaaagtccggcatattgatcacaggaaattacaacaaagcgaaatacgacaaaacaaaatggtactccatcgattacgaccgactacccaaaatgggtagagggtctacccaaaatgagtatagcgactacccaaaatgggtagaccggtctacccaaaatgggtacaccaataccagagactacacagagactactacagagactaacaataaaccggataaaagtgaaaaacaggacatcagtaaaacagatgcatttcaaaatgaactggaatcggttggtcttaaatctataaatctttcaagtttagaagagattgaaaaattaacagaactgacaattcaaaaagagactctcccagcagggattaaaaaaagcatcttagttcaatatcttgactgcctccgtcttactcgaacaacaggcaaaatatcggccaacgtcataatgactcatcttgaaaaaatgagcaagtacagtgtcgatcaactgcattacgcaatgtggacgcatgtcgagaaatacaacgaccgacaagaaaaatacacgcttggcattctgaggaacacggatgaccacaaagcgcggcagggcctcatgaaattgatgaatcagggaggtacaaggaaaggtgaacagtttagaagataccctaaagcagttggagaaatcgaatcccggactagcgaagaggttgaaagactcgaagcgcttgcaagagcaaagggcttatccggaaagatacgagacactcactgtgatttctga

SEQ ID NO: 183 - DNA, 909 bp, Bacillus licheniformis
gtgaacagtttagaagataccctaaagcagttggagaaatcgaatcccggactagcgaagaggttgaaagactcgaagcgcttgcaagagcaaagggcttatccggaaagatacgagacactcactgtgatttctgaggaaaactgcatttacaagcaatgcgacggctcggggcttatctggatcaaagaccatcaagaaaaccgggaattcatgaaagaatgcccctgtaaggctgtcaaactattagaaaaaaagctgatgggcgcccggctgccggaagagtttaaagacgtaacattaaattcttttgaaatagatgtctatgaaaatgacgaatcgaaggagcgcgcggcgaacgcaaagcggatttcgaaaaactatgtattgaaattcgagcagatgcgcgagcaggggaaggggttgtatttttacagccatgaaaaggggagcggcaaaacgaggttagccgcaagcataatgaaggccatcaccaagatgcacgacaagccggataatccattgaaaatcatttattcctcaactgcagatctgattggagagattaaaaagacctttgaagctgattcgaaggttaagagttccgacattatcgaagcggcaaaaacggccgatctggcgatcttggatgatatcggagtagaaaaagcgacggattgggtagaagaaacgtttactcgcattctggactacaggctccagaacaaaaagccgaccatcttcacaagtaacttagccattgacgaactggatttgaagtatccgggcggcaggatcagcagcagggttgaaaagctcgctttccctgtaaaaatgccagatgaaaaagtcagaagcaagatagctaaacaggaaaacgaggagttgttgcaactgctttacgaataa

SEQ ID NO: 184 - DNA, 204 bp, Bacillus licheniformis
gtgaagccgaaaacaataactatcaatgatgatctaagctttactggaacgatggagaaaggcaaaatccgtgtaattgttgtggacggtaacaacgggacggcatacgaaacggacgccccggaacatgggaaaacaattattcaaacgataaacggcaagtgtaaacgtgttgattacgaaataggccacaaactcgattaa

SEQ ID NO: 185 - DNA, 165 bp, Bacillus licheniformis
atgtgcagcttatgcaacggtcagaaggttgttagggtagaaaattccagcatggtcgcattccatgcctgcccgaattgcaagattgagaagcaggatttaacagacaccatccagcagcttaatgcgatcattcaaaaacggcagcaggagaagagcgcgtaa

SEQ ID NO: 186 - DNA, 315 bp, Bacillus licheniformis
gtgacaaggctaaatgtgggtgattgggttaaatttatctcgaaatcagtcataacttcaaacggtttaattattgagcaagagattaaagggtatatcgacgctatcgacgggaatcgcgctaagatcagaggaaatgacgggaaaacatatgtcggcgagaaaatagaagacttaacactttgcaaagatgcaccagaatacacgcaggaaagcctcagaacgatgataaacattgcactcgatacaaaagaccggaactggtttgaagagcttacaagcgaattaaaacgcattcaggaggtagagggatga

SEQ ID NO: 187 - DNA, 183 bp, Bacillus licheniformis
atgagcgaaaaatacgcggtgtacgacacattcacaggcgcagttgaattttacgagaaggaagaaactgccttgaaagattataatcaggcgtcaaaagacatatccgaatttttggacagagaagacctacccgaatatgtctatctattccagatcgtcaaacgggaggaaataaaataa

SEQ ID NO: 188 - DNA, 210 bp, Bacillus licheniformis
atgagaatcatcaaaaaagaagtcaattcacagtacggcggactattcaaaaaggtatttattcgaaaaatggttaaggaaaacgaccgcgaattgatccaagaaacaagtacgacctacatcgtgggtatcccggttagatcggtgacggaaacgcgaccgccgagtttgaaagacgcttttaagcaggcgtggggatcggcgaaatga

SEQ ID NO: 189 - DNA, 339 bp, Bacillus licheniformis
atgagagagattaaatttcaggcttgggatttagacgcagaacaaatgtataactgggaaagcattagacaacactttcatgaacatttagatcatccaagggtaaaggtaagacaatacaccggattaaaggacataaacggacgggagatttacgaggaggatattacacgagatgacgacggtttcctttggaaaatttactgggaagacggttcgttttgggctaagggtggagaatttaacctaagagaacagcttatagagttggcgccggatttttgcgaaatcatcggcgacgtatatcgaaatcctgaactattggaggcggcggaatga

SEQ ID NO: 190 - DNA, 423 bp, Bacillus licheniformis
atgatcacccttaacataccagtcgaaccaatgggagccgttcggatgaccggacgcgggaaattcgtgaataaaaacgcacagcggtatttagcttataaggatttcataaagctgcacgcacagaagcagatgaaaggacagcagctttataccggccctactgtagtaaaggtgcttttctcgatgccgattccaaaaagttggtcaaagaaaaagcaacaggaggccatttcaacggtacacatcaaaaagccggacatcgacaatttagtaaaaggtgttttcgacgctctgaataaaacagcgtggcatgatgataaccaagttttcatggtcataggagccaaagtttacggaaaagaacccgggatcgaggttcaaataatggggctggcagaatgggaaaatttaagcgcctga

SEQ ID NO: 191 - DNA, 207 bp, Bacillus licheniformis
atgggaaaatttaagcgcctgatcatccgttataaaaaccaatacgggcgcactgtgggacacgacaccctttggaggggtttagatagcctcatagagttaaaacgtcgctacggctttttaaacgaagatttggagcatgtcaagattgatggaagagtttgcgatttgcaggaggtaagggccgagcttgagaagcacgggtaa

SEQ ID NO: 192 - DNA, 240 bp, Bacillus licheniformis
gtgaagaaaatatctaatgtttggacagtagtttttaaggaaaatggctgcgaaccattggcttatacttacacatcggaaaaagatgcaattcaagcaaaaacaatgattgagaatagtaatggtcaagaattaataaatgagaaagaacaaattgttggacggatatcattggaatggtgctatttaatcaacggaaaattaatagaaccaaaggagaatgcaaaagatgctgaatag

SEQ ID NO: 193 - DNA, 462 bp, Bacillus licheniformis
atgctgaatagaacggtacttgtcggaagattaacaagagacccggaactaagatatacccagtcagggcaggcggttgccagctttacattagcagtcaatcggactttcacgaatcagcagggagaacgtgaggcggactttataaactgtgtcgcttggagaaagacgggtgaaaatattgcgaatcatctgaaaaagggatcaatggcaggcgtagacgggcgccttcaaacgcgaagttatgacgatcagagcggccgaagggtgtttgtgacagaggtaaacgtcgaatctgtgcagtttctcgatccgaagggcggcggtcaggctgatagcaggcagcagggcggcgcagggcggaaccagagcagcgggcagcaggggaatagctttcctgatgatccgtttgccaatgagggtaagccgattgatatttcagatgaagatctccccttctaa

SEQ ID NO: 194 - DNA, 177 bp, Bacillus licheniformis
atgacaaggcgcgttgttcagtggtcggccacgaattacgaccaggaagagttgcaggtcattcaggttttcgaggaaggcttaagcaaacaggatgttaagagggaagtgccgttcagcagatggcacggcgttctatacaaaactgaaaggggaaacggatatgacttcaaataa

SEQ ID NO: 195 - DNA, 171 bp, Bacillus licheniformis
atgacttcaaataaaaatccaagattaccgggagaagtgacagtttggaagatgacggaggaacagcgccttgcatacatcgagaaacaccccatcgtggcgagtgatcagcatttgaagtattgggattgggacggcggaaaaagaggtgagcgccatgtgcattcttga

SEQ ID NO: 196 - DNA, 519 bp, Bacillus licheniformis
atgtgcattcttgacgaaatcggattcacgccggagcagtattttgagttgaaagacaaaagaatgacagacgaggaaattgcatgggacgaattagatgtcgcgccctggcatttgaaacaatggaagaaaaagcacggcgtcagaaacgaaaaaatacgccacggaaagaagttcactcgtgaggaatgggaagagaagcgaaaagaagggctgacagaaccggaaatcgctgactatttcggatacaaaacgttttctatctacttgagatacaagagaagtctcggcatcccgccaatgacaaagaaaatcgagcgcacgccggaattgctggccgaaatcaaaaagtatttggatcaggggcttttgatcaaagaaatcaccgagaaaataagcgtgaagatgtccagtgccatggttggcagaatcataagagaggaagggctgcatgatgagaaacccgataataaaaagcgtattcgagaaaatagaaaaacagcaagaaaaggggcttga

SEQ ID NO: 197 - DNA, 228 bp, Bacillus licheniformis
atgagaaacccgataataaaaagcgtattcgagaaaatagaaaaacagcaagaaaaggggcttgagaaatacggaaccgaggtcaaaacggatttgtacagcttgcggggatggttgcagcacgctcaggaagaggttattgatttagcggtataccttgaggcggctatacaaaaattcgatgaattagagaagaaatttgatgaattagagagggagaaggcatga

SEQ ID NO: 198 - DNA, 156 bp, Bacillus licheniformis
atgatcatagcattcaaaatcatcctgctgctcataattatcttatcgtttttgggagcggtcggagagagggaaaacaaaaatctacgggataacatgacagctatctgcataacatcaataatcggttctctcgtcgctttcatcatgatttaa

SEQ ID NO: 199 - DNA, 318 bp, Bacillus licheniformis
gtgaagagtttaaatgtgatcaagggctgtttaatcgctcttggcggggtatttatgatcgggtatcagtgggtataccggccgacactcggagaatctgcggcaattatcgtgttcacccttggattagtgtttgcgacggagatcagaaactggttttacagcttgatcttggttctgatcagtgcgtttgccgtcgtcctgtatggatacatgtatctcgaaaacttcaaacaactgcttgtgatgctattagtctctttgccaatggtatcagcaatattcttgcacgtggcggagcatgatgcagagaaataa

SEQ ID NO: 200 - DNA, 438 bp, Bacillus licheniformis
atgaaaaaactattcaaaaccattgttacactgtcactcttgatttctggaacgcttttattctcacaatctgcggcggctgtctggtcgccgtggcaaaaggaagcattcggccatacagcgaggattttcaccgacgacacgaattactattcaggagcgaaaacagttgactggcgggcggaaaagaagggttctggaacgctttactacacggctggcgtctataaaaaacgttcgggcggcggcttaactgatacaaaccttgtacagcggggatacttcaagaactcaacgccgttaaagtctttcagtgtcaacgaaattcggaagcgcaccgggaaagggtcatatgtcattcagcttgattgttatacggatgcgaagaaaaacaactatgtcgggacgtttgaatccaagacgttttatatcaaataa

SEQ ID NO: 201 - DNA, 456 bp, Bacillus licheniformis
atgaatagaaaagagatcgaaagcatcttaaaggattatcggtggatgatgaacagcattcaagtcctgcgcgaatccttggaggatgccggcgaagggttaacggcaaaatacgggattgaggcgtctttgccgaaggcgcaaggcactacgagcgatcctgtatataacgaaactatcagaaggtcgaaacgcttcaaaaaaatcgagatatacgagcagaaagtccagaaactgcaagaacgaattagccggatttcagacgaacgggaaaacgaggttttacactggctgttggaaggtaaaagttatcggtggattgcacagcatatgcagctttctttctctcatattcgcaacatccgagaatcaatcattgataagctggccgatgaatcaaattgcacgaattgcacaaaaggcacggatttaaattctttgaaatctgtgggttaa

SEQ ID NO: 202 - DNA, 231 bp, Bacillus licheniformis
atggggaaggttacaagggtgtatccggggcctaacaacgggctgatccggtggattgaagaaaactttggagagatcgacggatatgcggcaacgttcaagatgaaagacggcacgacaatgacgatttacgacgcattaacgccagtcgaagccgtgggaatggctgagatcgggaaaaacgtgattcaggaagcaattaacgaggatgaatttgtctcgagaccataa

SEQ ID NO: 203 - DNA, 444 bp, Bacillus licheniformis
gtgtctcaaagtgtcagattctatgacaagaccaatgatgagtttgtgacggtgacaaaagataacccgttaccggttaccggcgcagggggcggtgaaacacagagtgttgatgtaaacaactggccgaccacgcaaaaggtttccggaagtgtgggtgtaaacaatcatccaaaatggcaggcagtcggcgcgatggtccaagggcaagtggcgacaggagaagaaaaaatgattgatctgtctgcggcaggcgttacattcatcgaaatccaggcatccccggacaatacagttccgttaaaggttggcgatgtctcgggatttacagccttttgggttaagccaggagaaatgcaaaagttctattacggaaaaatctatgtatcccattcagcagatgcggcgcaagaattcgcttatcaggcggttaaatacggatga

SEQ ID NO: 204 - DNA, 543 bp, Bacillus licheniformis
gtgagtaaattgacgccgaaacaagaattattcattcaggagtacatgaaagatttaaacgcaactcaggcggcgaaaagagcaggatacagcgagaaaacggcctatcgaacaggcgcagacctcctcaaaaaacctcaaattctcgcgcgtatagaagaaatgaaagctgagcgagccaaaaggaatcaaatcgacgccgattgggtgttgcaaaacttcatcaaggttgctcagatgtcaatgaaagcagagcctgttatgacttttgattacgaaagcaaggaaatggtcgagacaggcgaatatcagtttgattcagcaggcgctaacaaagcgcttgagaacatcggaaaacatatcggtttctttgataacaaacacaaattgacggaagcgcagatagaaaagatcaaagccgaaaccgaactgacgaaagaacgcatcaagctgttgaaaggcggcaagggagacacagcgcttatcgcaaatgttgctgaactgttcaaagccatgaacaaaggtgaaagcgatggaaattaa

SEQ ID NO: 205 - DNA, 1293 bp, Bacillus licheniformis
atggaaattaagttttcaccaaaacagcaggaaatcataacaaggccattcgatcacacacttgaggccaacgaaggaacgccccggtctggaaaaacgacagcggggcattttcgttacgcgctttatttgagcctgacgccggaccagaaccatttaattgtggcctataaccaggagcaagcgtacaggcttttcattgacggagacggaaccggattaaaacatcaatttgggaatctggcaaaggtcaagcatgacgacttgggcgaccatttagaagtgcagacgccatcaggcataaagaagatttactataaaggcggcgggaaggtagacagtgtgaaagccatcacgggtatgtctctcggctctgtcgtcttctgtgaaatcaatctgctgcatatggacatgattcaagagtgtttccggcgtacgttcgcggcaaagatgcgctatcatctggctgatcttaacccaccagccccgaatcatccggttatcaaagacgtgttcgaggttcagaatacacgctggacacattggactatcgacgacaacccgattttgacccccgagaggaaacaggagatttacaacacgcttgtcaaaaacccatatctcctgaaaagggactgggaaggcaaacgcgtaaaccctcaaggcgttatttatgggatgcttgatctcgaacagcacacgacaaaaacactcaccgggaagccttttcaaatgttcttctcggctgacggtggtcaatctgatgcaacgagcgtctcttgcaacatcgtaacgatgattgacaacaaaaaggccaatcggaaggaatacaggctgaatcgcgtggctcattattaccattccggtgccgagacggggcaagtcaaggcgatgagtgtttacgcgaaggaaatcaaagattttgttagatactgcactgaaaaatatcagatgttttatgcggacttctttgtcgatccggcctgtaagtcattacgagaggaattgcatttactcgggattgatacgacgagggctgacaacaacgcgaaggacatcaagggaacatcgaaaggcattgaggtcggcattgagcgggcgcagaacgtactatcagaaggcttgttcttcctggtcgatgatgacaaattcgatcattaccatttcattaaggaaacggggctttactgccgggatgacaacggcaagcccatcgatgagaacaaccacgcaatggacgaattccggtatagcgtgaaccatttctataaaacttatgtgatagggggataa

SEQ ID NO: 206 - DNA, 441 bp, Bacillus licheniformis
atgaaagaaatcaaaatcagatcagcggaatttcttggaacggattctaaaattgaatataaaaatgaattaattgacgtttgcagacgtatcgtagaacatctatccggaaacgaagaaaaacatgatgccaaaatcaaagacctgacagccgacacgattgaagccgggacgataaagcccccatcaaacaagcccgatgcttttcaaaccttgaggaagcaagctgaagaatggagagagcaacagcagaagcgtcatgaagaggaaatgcgggaactggataaccttatcgaatgtatcaaattcataaaaagacaaacctctaacccgacagaagataaagaagccgatttcgaatattttgcaaggctttatttggatggaattatcgatatgggctatttcaaaaaacaagtattcgagatattcgaaaaataa

SEQ ID NO: 207 - DNA, 1512 bp, Bacillus licheniformis
atgttcaagggcctagtcgcaaagataaagggggtgctgcagaaaatgggcattatcaacgaaatacaatcaataacagacttagagggcatcccggcaacggatgccttttatacgtatatcgaaaacgtctggctcccactgtatcagggagagttaatgaattacaaagatgagcctttccacgaaatcgaatatacgacaatcggcggcggtaaaacgaccaggcgcatgaagagcctgaacatgccgaagacggccagtgaggaaatggcgcgcctcattttcaacgaacgatgcaaaataaacatttctgacgatgcgacggccgcaaacatccaaaacgttctcgcggacaacaatttctataaaatgtttcaggatcaccttgaatacatgtttgcgcttggtggcatggttatgaaagtgtacccgcaaacagaccggctcggacaaaagaaggtcaagatcagttttgttactgccgactgctttataccattgtcttattcaaatggccggattgaagagggtgtgttcttgagcacattcaaaaaaggcgacaattattatacgttgcttgagtggaaccgttgggacggtccgaaattcgttgtcagaaatgaattattccaatcgtccgatgaaagcacgctaggaacacgagtccctctgagtaccatctatgataatctgcagcgcgaagtcgtatattccaaacttacgcggccgacattcatctatacaaaaccgaatatcgcaaacaatatcgatctccaatcaccgttgggtatttctttgtttgcaaatgcgattgatgatctgttgattttagacacaatttacgacagtttcctgcgtgaattcaggctcggcaaaaaacggattattgttccgtctacggcaattagctatgtcatagatcctataacgggtgagcggcaccgttattttgacgcgaatgacgaggcatatgttgcaatgagttttaaagacgtcgataatcaaaagattgttgatacaagcgtcgagttgcgcgttgatgagcacgccaaagccctacaaactcaattagatgttgtatctatgaaattagggttcagcgccgggacattcacttttgatggacaagggctgaaaacagcaacggaagttgtcagcgagaacagcaaaacctataaatcgaaaaacagccacgaaacgattatcgaagaaagcttaaaagagctggttacaaccatttgtgaagtggcagagacacacaagattttcacaccggcaaaagattatgtcgtaactattgattttgatgattccattgtagaggatcgagattctgattctaatttctggctcaagctgcagaataacgggaacattccgaaatggtacgcactacagtacatccttaagattccgccagaggaagcgaaagaactcattaaggaaacccaggaagagcaagcggatgaaatgccggacattgacactcaatttggcggcggtgcttaa

SEQ ID NO: 208 - DNA, 1125 bp, Bacillus licheniformis
atggcacgcttgacaacagagcggatggagcagataacatggcccatcgttcagctgtattcagcaattcaaaccgaaatcctagagagtgtcgctattcgtcttggccatcataaagagttgctcgaccagaacataaccgagtggtacaacatgaaaatccagcagatcggcggactaacgaagcagaatatcgaaattatctcgaaaaaaagcggcctggctccaccactggtaaagaaaatactgaaagaggcaggctttgagggcatcgaccaaaacgaaaaggtgctgcaggatgcacttaaacaaggtgcggccatcatagcagcggcacccgtggcacaagacccgtccatttgggcgattttagacgcgttcgaaaggcaggctctggattcattcaacctgatcaatacaagcatgttaacgggcgcgcagcaggtttatatcgacatcctgactaaaacacaagccgatgtattaaccggcttaaaaacgccgcaggaagccctcagaaccaccataagtaaatgggctgacaaaggtattcctgtcttgagaaaaagagacggaaaaaaagagtacgccgaagcatatgtaaaccgaatcatcagaaccaccacaaacaacgttacaaacgaaatgcaggacatgcaggacgcgcgttttgatagttacggcattgatttggttgaaattagttcccatattggcgcccggccaaaatgcgccccatatcagggaaggatattcagcagaagcggtaaggacaagaaatacaaatccctatcaagcacaagcataggggagcctgacgggttatttggcattaactgcggtcatttccaatacccctttgtgccaggtatatcagtgcagagatattaccctgtagacgctcagaaaaacgccgaagcctacaaaaacagccagcggcagcggagccttgagaacaacatccgaaaggcaaagcgagaattagccatgtgtgaaaaagcgggcgatgaaaccggggtaaagcaggccagggcgaaaattttgaagcgccaaaagcgaatgagggaatttatcgaagagacaggccgcactcgacgccgggagcgggagcaaattttatattag

SEQ ID NO: 209 - DNA, 165 bp, Bacillus licheniformis
ttgaaacttgtaattcattttctattaaaccttttgttgggtgttttttatttttatatcgcgaagcccgtttcttcttttgaagtaatgatagtctcgcttgtttttatcaatggctttgcttggggtgtgaatgccgcaattaaagagaaggggcgtaaataa

SEQ ID NO: 210 - DNA, 153 bp, Bacillus licheniformis
atgttcatttcaaggaagaaatatgagaaaacgcagcaggaactcgaccaattaaaaagcgatgtcgaggatttaaagaaagtggtccgtgatttactattaagccaaacaaaaagaccagagacgaaaaaagagcctacctatttgggataa

SEQ ID NO: 211 - DNA, 408 bp, Bacillus licheniformis
atgaaactatctgagatcgtcgaacaattgaaaggctgcggctttgagtgcgaggctgggccgttagaaaacaatgtcccttttgttgcattggagaagtttgcgaatggaaaagccggaaaaataagtgacggctatcatacttttgatgaattgtatcatcaccgaatgattctattttcggtaatctgcaatcagaataaaaaagaagcatggaagtcttggaagcacgatgatggcagtatgtttgataattatttcatcgttggcatccatacacctcaaggtcactacacttaccattatcataaagatcattgggatttattcgatgttaaagaattagaattggcgcctaaatgggatggtcataagccggaagatatcacaagattattaacactttaa

SEQ ID NO: 212 - DNA, 630 bp, Bacillus licheniformis
atggataaatttttaagactggacttgcaacatttcgcagaaggaggcgaagacggcgcaggtgctacaaataaccccgatccggcggccaatccgggaggaaatcagcaacaggaacctcagcagcaagaaccaacgcaacagcaacaagaaaagcttttgccgcagagcgatgtaaacaacctgattgctaaggaaacgaagaaagcacaagagaagctattgaaacagcttggcatcgaggactttaagtctgcaaaagaaggcctttccaagtttaaagagtggcaggaatcgcagaaaacagaagctgagaagatggccgatagcttgaaagattatgaaactaaatacaataccgctttaagcgaaaacgaaagcctcaaggctcaaatcgcagccatgggagctggtgtgcaagcggatgcggtgcaggatgttgtgacgcttgcgaaaccccttgtttctgatgaggtggatatgaacgcagccattgaaaaggtgcttgaaaagtacccacatttcaaaggtgaagccggtgaagaagatgacacagcattctatactgtcggcgaccacaaaaaacaaactaaaacagattcattcgccagcgctttgtttggcaaatga

SEQ ID NO: 213 - DNA, 888 bp, Bacillus licheniformis
atggcaaacgctattaactacgctcaaaagtatactcaggagttagaccaggttttccagcaatcaatgcttacaacagaactcgaaacgcctagcgttaattggttggatgcgaagacgtttcacgtgccttccatttccctgactggctataaaaatcactcgcgtaacggcggtttcaatcgtggagacgttacaactacgaacgagccgtatacactcagctttgaccgtgacgttgagttctttgttgatgtaatggacgttgatgaatcaaaccaggcggcaagtgcggcaaacatcacacgtacttttatcactgaacatgcagcgccggaaatcgacgcttatcgcttctcaaaacttgcgacaaaatcaattgataaaaaccttgcaactgctgaggatttaacgaaagatactgtttaccctgctattaaacgcgacattctaaaagtccgcaaatacggcccagcaaaccttgtttgctacatttcaagccaaacaatggacgcgcttgagcagtgccaggatttcaaccgacaaatccaagtgcaaaaccaaggcacagccatcgaaacgcgtgtgacaagcattgacggcgttcgtttggtcgaggtttgggattctaaccgtttccatacttctttcgacttcacaactggattccaaagcgcgacaggatcattcgctcttaactggatcatcgtctataaaggctcaatcgtcgcaaaagtaaaacaaagctcaatttacttgttcgcgccagggcagcacacgcaaggcgatggatacctgtaccaaaaccgcctatatcatgatcttttcgtcttgaaaaacaaagctgatggcgtggttacttctcacgtcactactgcacaagcttaa

SEQ ID NO: 214 - DNA, 153 bp, Bacillus licheniformis
atggcaatcttgagaaaagagaatgtaattttgcgagaagatgacacgggaaaaatcgaagaattgaagtttcaaggctatgaagaaatcaaagaagaagatttgaagcctaaaaaagcagcgaagaaacaggaaaaagcagagaaggaataa

SEQ ID NO: 215 - DNA, 417 bp, Bacillus licheniformis
atgccttacatcacaccggactattacaagaatgtctataaaggcgcgcaggcaccaagcgataccgatcttgagcgctatattgagcgggcaagtgacgtcattgacgaggtgacggaatacaaactatacggcggcaaattcgaagcattgccggatggtttcgtcaaagacttagtacggaaggcgacggcggcacaggttgaattctacgtcataaaaggcggcgatgcggccgtgaacgcgggagaagccagcggcatgaacagtgtcagcgtcggttctttcagctattcagggggcggatcgagtaactcaagcgcctcgagccgggacgccgggcgcataagtccggctacgctttccattttgaacgagacgggccttttatatcgtggggtgtttgttcgtggctaa

SEQ ID NO: 216 - DNA, 345 bp, Bacillus licheniformis
atgagaagtaatgttcaggttgatatcgggaatattccggatcgagtcgaagaattcaatcgcgaggcgcaattcttattgtcttctgaggtgctgaaagattccaattactatgcgccgatggacacgggggcattgatatccagttcggaacgtagttcagactttgaaaacggtcgcctcatatgggacacgccatatgcccggcgactttactataatccgcagtataaattctcaaaagacaaaaacccgaacgctcggggcttgtggtttgaagcggcgaaagcggcctttctcccacgttggatcatgacacttgaacgactaaaaaggcgctcaatt

SEQ ID NO: 217 - DNA, 411 bp, Bacillus licheniformis
gtggatttcttgaagcagatgaaaaaatacatcgaaacgaatatccctattttcaaaacgtctttgtcggtcggagccttgaccgatggagagataacggggaatgatattgccatcctcccgatccccgcgacatcgccgaacaaaaaccttgattctggccaaaattatgtttttccctttcaaatactggtcaggcatgaaaagggcagcctttcatattcaacatgccagattatcgcggattatttaaacagcttatcaaacggagcggtcacaagtgcggacggctcctttgtttttgttacgtgtgatctatacgtgacacctaatttcgtggaacgaacgaaatggggcgacatatacaccgccatgtttcgggcggaacttgatattttaaggagtgaatag

SEQ ID NO: 218 - DNA, 453 bp, Bacillus licheniformis
atggctcaaaatgaaggttttttgattcaatcaaaacataaatttcacatcgatactacgccagatgcagccgaaccaacatatgtaaggcttgcgcgcggtttaagttcttttgaacctggtgggaacgaagacaccgaccaaacgccttatcttgacggcggcggccttaaatccacaactgtaatgggtggacaaattacattaacttttgaaggccatcgttattacggtgacccggcccaggattatattttcagtaaggtggctaaattagacgaacgcgaaacccggtttaaatgggaagagccggacggcacactcacagaaggctcagtaaccatcgcaagtatcgaagggccgagcggtgaagcgggttcaaaaggtgaaatctccgtcgagatccatttcaacggaacgcctactattaccgaaccaacagttacaccctag

SEQ ID NO: 219 - DNA, 192 bp, Bacillus licheniformis
atgcacgcttacagaaatcgcgccggatacacttttaacggtaaatgttacggctgtaaattcggccggagaatcaccaatgagtgcgatttcaacccggacacaaccatcagcataaaggagcagatttgctcctttttctttttgaaaaattataagggggcttttacaaatggcagttatcaaaattga

SEQ ID NO: 220 - DNA, 387 bp, Bacillus licheniformis
atggcagttatcaaaattgagttagacaaaccggtacaggaattcgaactcggaggcaaggtgtttgaagtcagatacgacgacgagagcctaaaaagctatgaaaaagtgtatctgaaaatgaaaaaggcttatgaagattatgaaaaaattaacgacttggcagctacagaaaagcaactgcaagaggcagagaagaaaatgactgctttagtcaaagaactgatcgaattgtatttcgggaaaggcagctttgatcatgtttatgaagctagcgggaaatcaattctaaacgttcaaaaagtcgcggcatttgtaatcaagaacctgaacgaaaaggcgactcgcgatcttgaggataaagcggcaaattacctgaaaaagtag

SEQ ID NO: 221 - DNA, 654 bp, Bacillus licheniformis
atgaaactgaccgaccgattcgagccagatgtcataatttttaaaggcaaaaaaataaatttgaccctttctttcgatatcgttttgcgcgcgttcgaactgttggaggacgatgatttcactaagccggaaaaatgggttttgcttgcgcgaatgttcgctgaaaatgaagaagatttaaacgaaatggattttgatgacatcaccttgtttgtggatgccgttttcaacaatttcataaacgagtcagaagacaaagaggaagaacaggccccgcccgatggcgaagcaacagaagcgccagcggacgaggctatttttgatttcgtggaagatgctgaatacatttattcggcctttctttttgattacaacattgatttgctcgagcaacaagggaaaatgcactggcggaaattcaaagcgctattcaaaggattgagcagcaaatccagatttaaagaaattatcgaaatacggacagcggaagttccgaaagccacaaaagacaataaggacgaaatcgcaaaaatcaagaggctaaagcgtgcatttgcgcttaaaaagaaccagaaaagcgcagaggctgcggttgcggcgttagatgcaaagcttgacgcgtattcgaaaagaattaaatccggagggaggtag

SEQ ID NO: 222 - DNA, 2547 bp, Bacillus licheniformis
atgagcgatggacgcgtggtgattgattcgatttttgaaacaaggcaatcagatcgcggaatccgaaacctccaaaggtctttggatggccttaacaccaatcgatacaacgaacgtttaagactcatgtcagctgaaatgaaagcggcttttcgtgagtctcgggcggcgcttattccattcaaacgacagttgttagaaactgaattcaatttcttcaaactatcgcgcagtatggggacttacacaggaacgaataagcaatttatggcggctgttcatcaactcggcctggaacacaaaaaagccaccgaggaaatgatgaaaaacaacaatttaatgaaagccagctttattcagtctgtcggaaccatgctggcgcgcagtggacaaagtgaaaagatcgcggccaatttctcgcgcatgggaaaccctttgtacactgtgaataatggtttactgcgggtgacgtcgaaccttgaaaggatggcacgccaagggaatgcggcggttctggcattgaaaatgctcgggcctaacgcaaacatgaaagaattaaacgatatgacaagaatgatcaaccaggggttgatgagatatacatccgttgcaatagcagcggcagcgacgtctgtcatgttttacggttctatccataaagcggctatggagaataaaacatatgccgaatcgtttaacagaatgatctcgacattacaaaaagcatttcaacctttggttgatgttttcgcggccgtcatgccgtatgtctacaatttcataaccaaaattggtgaattgatcatcaaatttaacgaagcacatccggttttatcgaaagtgatagccggatttactttgttattgcctgctttgacattgcttttatcgccgttgtctatcggtatcggtctgataaacggctggcgtgctgccttttcggccgtctggatgatcatagggccattggtaaccggtcttggggccatgatgggtactgtcatcctggtagcggccgcgatcgctggcgtcagtgctgcattatacctgctgtggactaaaaccgattggttcaaaaaagcggtcatcaccgcatggaacaacataaaaacggccacgcaaacggcatggaactggataatgaacaatgtcatttcccctgtcatgacagccattcaaacatttatccaagaaaaaatggctatgatccagcaattttggaatgaaaatggttcgcaaattatgcaggcggcacaaaatgtttggaatgtcatttccacggtcattcaaacggctatgtctgtaatcgggacaatcatgcagacgctttggcctgttataaaagaacttgtcatcggcacatggcaggcgatccagaacgtcataaacggcgcgattaatatcatcatggggattgttaagactttctcagcccttttcactggcgactggaaaggcgtttgggaaggggcaaaacagatcatcagcggcgcccttgaattaatttggggatgggttcagctattcgggatcggtcgcttgctcaagttctttggcggcttaggcgccaaactgctaagccctatcaaatcaatgtggaacagcatttccaacgtcttttctagcactctcggaaagatatggggctgggtaacgagcaagtttaaaggcatcgtttcatccatcacaagttccatgaattcggcccgaaatttgataaatcgcgtctggaacacaataaaaagcttcttttctagcatcttaagcggcatctggaacactgtgaaaagtaagtttcaaggcgtggtttcagctgttacaaattctatgaattcgactcggaacaaaatcaacagcgtttggaacgccataaaaggatttttcgcaaatatcctaggcggcatctggaatacggtaaaaagcaagtttcagggcattgtaaattcggttggtagcaagatgggcgcggctcaaaacaagatcaaaagcatctggaataaagtgatgtcctttttcaagggaatcaaccttttcagcattggccgagacattatcaatggtttgatcaagggtatcggatcaatggctaatgcggtatggaataaagcgaaaagcatcgctgacggggtgacaaacaagatcaagagcgctttacgtatcgcatcgccttcaaaggtcatgatccagtttggtaagtggacgggcgaaggtctcgaaatcggtatggataaaagcgtaaaaggcattttgaaggcttctgaaaagattgcgagtgctgctattcctgatcttccagatacacagacggtgacaagcaacatctttaaagccccatccatgcagacgccgcaatcagacatgtcaggcattatgatggctattcagaaccttgcgaacgccgttttaaatcagcctgtagaggtcgatatcccggttatccaaacgagcatgaatatcaatagcagacagttcgccacagcaacaaacaaagacatgacgaaagcgcagcgccgccaagatttcagggataaacggaggtacaaataa

SEQ ID NO: 223 - DNA, 735 bp, Bacillus licheniformis
atgtctctcacttttaatggaattacaaaacattttgttcatgcgacagtcgagacacaacggccgatatgggcaccagtcgaaagggaattaattgagattcccggccgtcctggtgcttttttcagaaatactaaggtcaagccccgtattattcccgttggaatcataattaaaggcgttgctgacttgcaaaaggcaaaagaagaagtcgcggaatggctaatcactgataagccggccccgttgattctgccggatgaaccagatcggacctattacgccatgatagacggggaggggcagctttctgagattttcaaatttggaaaaggtacagtcaatttcgtatgtcccgacccgtacaaatacggggcagaacaatctttctctattggcgaggctgccgatcctgtgggacatgttcaaagtaacggaacggccccgacataccctattatcgaatgcacattcacgcaagcggctgacaaatacgaggttcagcttttaaatgatgacttgagcgttaaagcgttcgttctactgaatttcgattttatagcaggcgataaattggttttagattttgccaatcgagcggcaaccctgaacggagaagacaaaaaaacggcatatcatatcacatctgatttttttaagataccaccaaaaaaagatacaccaattagcgcaacgcagccaagtacgctgaaattcacggacaaatatttgtaa

SEQ ID NO: 224 - DNA, 2634 bp, Bacillus licheniformis
atggcagatttatggattttggacaagaatgatagtttgctcacaatcttgtctagtgatgccgataatgcctgtgttttttgggacgcaatattcagagaagaactgaacaaatcatcgacatttcaatttacatgcgatgccacgcataaagatagcaaacatgtagcgaaattgaaccaggtcgttttcaaagacaatgacggttttttccgtctcttcaaaattcgtgagattgaccgtacgaacggcgaaaatcaggccgggaaaatagcgcaatgcgagcctgcagaactggaattgcttgaaaagatcattgatgatatacggccatacaacactactcaattagatgcgctggaacgcgccttagttggcactcgatggaaggctaacgttacagcaagcaacggcataaactcaacgaatttctatcatatcagcgtatatgatgctattacggacattatcaacacatggggcggagaattaaagtttactgtcacattcgataccaaaacaaataaaattgttgaacgcgtcgttaacatcgtgcagcggcggggagcggataacggcactcggttcgaggttggctataacatcgaggaaattcatgaaactgaaatggcttatccggtctcggccctgtggggctggggcggcagcgtcgaggatgaaaacggaaacgactcgcgctttattgactttgctgatgttgtctggagcaaagcgaacggcgacccggtagacaaaccaaaaggccaaaagtgggtagaatacccgccagcaaaagaaaaattcggcttacagacaccggatggcgttattaacgttgagggaaaatggcaagacgaaaacattaaagacccggttgaattacttcaaaaaacatatcatcatcttgtcaatgaagcatcccaaatacagaccaattattcttttgaggttgctctgactaacgagacagtagaactcggcgacacctgtcttgctcttgatcgaactatccctgatccgatcgaatttttcggccgtgtgattgccttagagtatgatgtgtcagaccagactttcccagcaacggtcgaaatgggccaattcttgagcgtatacgagcctgatacccgtctggatcagatcgaggataaaataagggaaatcgaacagggccgggatatcgtggttgacgatggcagtttcccggacaccaagccaccaacaccgaaaaacgttgttactaaaggtctatttgaaaaagttgctatcgactggtattacgagactttctcatacattgcggcttatgaggtatacggttctcaggttaaagacttcacgcctgataccgtgaatttttctaatcgattatggcgagggaaagcaggcggctggattcatgaagctgctgttgatcaagtttggtattatcgcattcgttctgttaacacacgaggcacgcccagcgatttcacggcgcaattttcggcggcaacaacaagaattggtacaaaccatatcgaagatcaatcaatcacaaatgccaaaattaaggatttatctgccgataaaatcacagccgggacaatcaacggtataactatccggggttcactcattcaaggggcgcgattcgaggcgtctaaccaaaatgaagatttccagtcatggcttgagaacggaaccttttaccaatatacgcgggatgacgcgacagacatatacaataaattaactattactgctgggatggtcgaacaagaaacgggtgaattttttatggaaggctgggattctaatgccgttcacactaaaattaacattgggaacggaaaaattgaagttcgaggcattccgggcgaaaacggatatgcatcgccccctttaatagatatgttttccgaaagggattttcaagataatcccaatatggaatttgaagataatgaagtttcgcggtttagattgggttatctattaggaacggactttaaagatatatattccacgacagcgggtgaacataacgcactggatcgtttagatgatgatcaatataacacgttcggccctgtcagcggcagtagtaacggcaccgtttatctttcccgagttgatggcccaaaatcgctgtttagatataagccttttggttttgatgttgtggcagagggcggtgtccgcctaaaagccgataagatgttattcgatgccgccagtcaattgatactgcctcctaaaacaaaaattaaaggcggcgacggcacatatacgccttatcctgctgtttttggaagcattaaaaaaaaacttactgacattcacggaggattacagcactgtttgggtgttttgcttgatgaacttacccttactatgccaatgaacggcggagcctatggatatacaagcttcgattatcctttggtcggcgatggatcttacaacaaaatcgagaactgttttgctgttttcgctcaggcttacggagcgtattcaaacgccgttacggtcgggattgaaaaacaatcgtcaagcggattcacaatatatataagaggaaccggcgcaacatccaatatagaagccaggtctatgactgtaaggttggcaattttctatgaagtagtttag

SEQ ID NO: 225 - DNA, 360 bp, Bacillus licheniformis
atgattcaaagaaaagacgttccggccgcatggtactttgaaggtatggaagtgacagagacggacacaggcatagagataagcgcctgcgttcttaaacatagagacgatatttacccgtttgaagaggtttcattcgatttgattcctgacgataaagtgaaggtcgcatatgatctatacgtcgttttggatcaagagacaaacaaaatggactacatgttagtccgtacctatatagaacccgacggctattatcctggttataacggggataagcggctcattcacacactgttaacaatagaggttgacactactggaaaccgaagcggcacaatacgcaattaccacgagtag

SEQ ID NO: 226 - DNA, 147 bp, Bacillus licheniformis
atgaaacttgaacccattgaacagaatatcgaagcgaaaaagagagccggccagaaaaccaaagaagaaatgttgcgggaacaattagtttatactcagcgtcttgccaatgacttgataatgaagcttgagggaacacaatcgtga

SEQ ID NO: 227 - DNA, 171 bp, Bacillus licheniformis
atgttcgaaggtaaaagtcgctactatggtcacttttattactgctggctaaacggaagtgtgacaacaaaagagctgtacatccatgtcgaaaacggaatgataaccgaagaagagcgcgtagaaattatgaagaatccacgcggcgacgctttcccggacgaagtataa

SEQ ID NO: 228 - DNA, 222 bp, Bacillus licheniformis
atgaaagtcgaagaaatgacaagagagcaattgcaagcagatcgagaaattttcatttatcaaacgaaggcgtttaatgacgagttacaaaaggcgaactatgatttaactcgatataaagctatgtataccttgaaggctaaggaagttgaagatttaacactacagctaaaggaattacagcaacaacttaatcaaaaacaaccaaaagcggcgaaataa

SEQ ID NO: 229 - DNA, 420 bp, Bacillus licheniformis
atgagacaaaacactgataccctttacgcctcgtttgctggtggcagcactggcattttagcctatttgtttggaggtcttgatcatttgttaactgcgttcatcatcattatgactgttgattatttaacgggggttgctgccagccttggcaggataaaagcgtttcatccaaaacggcgtttagcggactcttgaaaaagggtgccatgctatccctaatcattgtagctaatcaagttgatatcattctcggcaatgacggacagttcgcgcgctacgctatgatcatgtttttaattggtatggagggtatttccttcattgaaaaccttggacgcttgggcgtcgcggttccaaaattccttgtcgatcgtttcgagcagatgaaagacgaagacgaaaaaaccccagaaataa

SEQ ID NO: 230 - DNA, 180 bp, Bacillus licheniformis
ttgccgccgtgtcctgcatctaaccatacttttgccataaatgatcaaatcctttcttatttctggggttttttcgtcttcgtctttcatctgctcgaaacgatcgacaaggaattttggaaccgcgacgcccaagcgtccaaggttttcaatgaaggaaataccctccataccaattaa

SEQ ID NO: 231 - DNA, 885 bp, Bacillus licheniformis
atggcaaaagtatggttagatgcaggacacggcggcaaagattccggagcggcggcaaacggcatgaaggaaaaggatttagtcctgaaaatggtcaaatatgcgaaatcttatttagagaaccattataaaggcgtacaggtgaagctgacgcgttcgactgatgtcttttatgaactgtcagagcgcgcagatatggcgaataaatggggcgcggatgtattcgtttccttccatattaatgctggcggcggcaccgggttcgaaacgttccgttatcccgggactgctggtaagactctcgacttacagaaggcgcttcataatgaaattcttgcaactatgaaagcatacggccagatcgcggacagaggtttaaaacaggctaaccttgcggtagtccgtgaaacccgtatgcctgcagtccttacagaaaacctgtttatcgaccgcaaagaggacgcggaacgcctcaaggattccggctttctaaaggcagtcggcgaagcccatgcgcgcggaattgcgaaatatctcggtctttccggaggctcaagcaagcaaccagcaacaacggctccaaaaaaggaagcgccgaaaaaggaaagcgcgaaaaagcctgcagtaaaaaagtacacgctgccgaccgggatttacaaatacaaaagcccgatgatgaaaggaacggccgtccggcagattcaggaggctttagctgccctctatttctatccagacaaagaggcgaagaataacggcatagatggctattacgggccgaagacggcgaacgcggtcaaacggttccagctgatgcacgggctgtctgccgacggcatttacgggccgaagacgcgggcgaagttgaatgacctcttaaattga

SEQ ID NO: 232 - DNA, 459 bp, Bacillus licheniformis
gtgaaaggattgtttcaatataattgggaagttcgacatgcatggtttaagtggtgcctcagccagccgcaagaggagctggtcaagaagcgttcaggcggaatgggaagcattaagaaaaatctgtttcatattgtagatgtggaagtaagctggatctacgccattttagaaaaaccggatattcaacctgattactctcattaccagacgattcagcagatcgctcggttttccgacctgcaccgctcagaaatagaaagtgtaatttttaattattccagcgccttcgaacatctgccggttaaagcggcttggtcagacgaagtctgtacgcaaggcgatattttaaggcatttaatcgcacacgagatccaccatatcggccaaatctccgtctgggcgagggaatcgggctctgctccagtatccgcttcatatatagggcggaaaatataa

SEQ ID NO: 233 - DNA, 444 bp, Bacillus licheniformis
atggggacggtcgtatcttttaacaatgaaaaacaaaagaagcagatcaatttggaaaaacagcttctgcgcgaactgtctttggaaaaaatgctgaattctgcagaggaatgctttgctcctctttttcactttttttctaagcatacggatatcttatatgacggctgcatcgactttgccattgaggcatatttgctgggagccgagtacgggaagttcggctatcacggagaacccgttcatcgagcgatgatccgctcagaaaaagaagaaaaacagctactgcacgagctttatgaatatgctgtcagctggtctgaggcttttaatgttcaagctgcttatgaaccgctctattatgcctgcgaatacttcatccaaagctggtggaaggaaggcttcagccagcgggaaagacgctttaagcttcggctcagataa

SEQ ID NO: 234 - DNA, 714 bp, Bacillus licheniformis
atgaagaaaaaaataaaatggctcgggtttttactcggctttgtcgttttattatgtttatttcaatatcaattcaacaatgatgattcttggcggtcatggaatcttccgctgagcggcaaaatcatttatattgatcctggacacgggggcgccgatggaggggcatcaagcggtgaactccttgaaaaagacgtggctcttgaagtatccctaagaatcagggactatctccaggagcagggcgccttggtgatgctgacgcgggaggacgatcatgatctcgctcctgaagaaacgaggggactcagcagaagaaaagctgaagacttgcggaagagggtcgatatgatcaacaattctgaagccgatctttacctcagcatccatttgaatgcgattccttccgcgcgatggagcggtgcgcaaagcttctattacgggcaatatgaagagaatgaacgggccgccaagtttattcaggatgaattaagacataatcttgaaaacacgacgcggaaggcaaagcggatacacggaatttatttgatgcaaaatgttaaaaagcccggggcccttgtcgaaatcgggtttttgtctaacccggaagaggcaaaacagctggccaagcccaaatatcaggacaaaatcgcagcatccgtttataaaggcgtattgcgctactttacagaagacagagcccctcctgaataa

SEQ ID NO: 235 - DNA, 1062 bp, Bacillus licheniformis
atgttgcgagaagacgatgtaaaaaagatagtcggcgatttggacgagccatttcttcacaagccgctcagagagctggatgccgtaaaagaaattaaaataaaacccgaaaaacggcacgtcagcgtaaaggtggcgctcgcaaaaacgggatctgccgaacaaatgcagcttcagcaggaaatcgtcatacggttgaaagaagccggtgcagagacggtcggcctgcgttttgaggagctgcccgaagaagtcgtaatgagttatcaagagtctgccaaagggcaggatcaatctctgctgaatagtgaaaaacagcctgtgtttttagctgtggcaagcggcaaaggcggcgtcggcaagtcgacggtgtcggtcaatttggctgtgtccctggcgcgaatcggaaagaaagtcggattaatcgacgccgatatttacggtttcagtgttccggatatgatgggaatcactgtacggccgacgatcgaaggagaaaaggtcgtgccggttgaaagattcggggtcaaagtgatttcgatgggattctttgttgaagacaatgcccctgtcatttggagaggccccatgcttggaaaaatgctgaataacttcttccatgaggttgaatggggggatgtcgattatattatcttagacctgccgccgggaacaggcgatgtagcgcttgatgttcactcaatgcttccaagctgcaaagaggtgatcgtgtcgacgccgcaccctactgccgcgtttgtcgctgcaagagcgggcgcgatggccttgaagaccgatcatgaaatcgtggggatcgttgaaaatatggcttattacgaaagcgtcaaaacaggagagaaagaatatgtattcggcaaaggcggaggcgaaaagctcgcagaggaactaggcgttccaattctgggcaaaattccgctgaagcagccggattgggatgacagcgaatttgcgccgtccgtttatgatgaaagccacccgaccggcgccatttatttggatatcgccaaaaaaatcgacgaaagcattggcgcaaaagcttaa

SEQ ID NO: 236 - DNA, 582 bp, Bacillus licheniformis
atgttcaagaccgcaatgctatcgataagctgttttctgtttctatctgtaacagcttgtgctcccacggaccaagcagctgagatggactatgatcaaaccaaaaaaatggttgtcgatatattaaagacagatgacggaaaaaaagcgattcaagaaatattaaatgatgacaaattaaatgaaacacttgtaatggatgaaaaaactgtcaaagaaaccgttgaaaaaacaatgacctccaaaaaaggagctgaattttggaaaaaagtctttgaagatccaaaattcgctgaaggctttgccaaaacacttcaaaatgaacatgaaaaagtgctgaaaaaactgatgaaagatcctgagtaccaaaaaatgctgatgcaggtcatgcaggatcctgaaatggccaaaaaatacggtgaacttgtcagaagccaggaattccgaagccacctgcaggaagtcatatctgacactctgacaagccctctttacagaaagcagtttgaagaggaactgaaaaaagctgctgctgaaagcatgaaagaagaaatgaaaggcggcgaagaaaaacaaagctga

SEQ ID NO: 237 - DNA, 147 bp, Bacillus licheniformis
atgtataaatttttaaaagacattcatattaaaggtaagacgagttttcgaaaggagcttaagcatgttcaagaccgcaatgctatcgataagctgttttctgtttctatctgtaacagcttgtgctcccacggaccaagcagctga

SEQ ID NO: 238 - DNA, 600 bp, Bacillus licheniformis
atgaaaagccgtaatctcgtccgatttttcttttccgtattgggtgtcggagctttgactacaagtattgtcggttttgccatagagtggggaagatataaggagctgtttctttccttcgaggtattggagattctgtctgttcttttctggtttatcggggttggcatgatctttagcgtgattgctcaaatgggatttgtgattttcttaacgattcaccgctttgcactggaaattttcagatctcattctttgtggaattcgattcagctgtttttgattatatttgtcgcgtttgacttggtttacttgcgctttctgttttttgaaaaagatggaggctccatcattccgtacatttggctgccgctctttattttggcggtaggcattgcggccgcttatgcaaagcaaaaacagtcctctaaaaaaacgttcgtttccgcattatttctaatgtttgtttttactgtgatggagtggttcccggcgttaagggtcaatgaagaggactggctctatttaatgctgcttcctttattagcctgcaacgcttttcagcttttaatgctgccaaaatttcaggcacgcgcttag

SEQ ID NO: 239 - DNA, 765 bp, Bacillus licheniformis
gtgaaccatttttatgtgtggcatatcaaacggattaagcagctaatcattattatgatagccgcttttgcgacagcaagttttttttatgtgcaaaacctgctccctcttcctgtgttttctacagaaggcggagcaaaagcggtatatagaggagattcagatacaaatgaagtagcccttacatttaatatcagctggggagatcaaaaggcaatgcccattttagacacattaaaagcaaacggtattaaagacgcgaccttttttctatcagcttcatgggcagagcgccacccggatgtcgtagaaagaatccgtaaagatggtcaccagatcgggagtatgggctatgcttataaaaactattcgcaaatgaagaaaagcgagatcaaaaaagacttagcaaaagcacgacactcctttcaaaaactcgggcttgacgaccttacgcttttaagaccgccgaccggccagtttaataaagacgtactcgatgttgctaaacagtacggctacaccgttgttcattatagtattaactcggatgactggacgaacccgggggttcaaaagatcgtccaaaacgtaaatggaacggtaaacgccggtgacatcgtgctctttcacgcttcagattccgccaaacaaacaaaagaagccctgccagagatcgtgcaccatctcagaagcaaggggctcaaaaacgtaacagtcagcgaattaatcgcaaatacggatgcaaaatcttcagaagtaaagtag

SEQ ID NO: 240 - DNA, 915 bp, Bacillus licheniformis
atgcttatcagatttgctatgaaagaatttttatcagagaaagaatatgaaaacttatcaaagaaaaccatttcagcttatcaaatgctttttgatgacttcttgaggtggtgtgaggagcaaggcttctccagagttcaagatttgaacacaagagcaattaagaactacctcaccctttgcaaaactgaaaagggaaacaaccctacaagtttaaacaccaaaagaagacaattcagagcttggtttaatttccttgttcaagaggagattatcgagagcaaccccacagaccctattaagagggcaaaagaggatattcacataaagactttcactgatgatgaagtcaaggagattctttcccacctcagaagaacaaaaagacgagaggacactctttttgctgttcgtaactatactatttttctcacacttattggaactggcttaagggcttctgaacttactaatttgaaatggaatgatgtggatttaatcaatcgttcgttcaaagtctttggtaaagccagaaaagagcaacttgttccactttcagaaacacttgttaaggagctaagcttctggaaggagtattgcttgaatcagttcaaagagctttccccttgggtatttgttaatcagaaaaacaatcaattcactgttaatggcttgaagtgctggttcaagaggttagctcaattgatggactttccagagacacgctgttcagctcactcttgtagacattactttgcaaagaagtggattcaatcaggaggggatatttcaacgctctccaaagtgctgagacacacgagcataaagactacagagaaataccttcaattctggggtaatgaggttgctgatgattatgacaaatacaatcctttaagggagatgagcttatga

SEQ ID NO: 241 - DNA, 126 bp, Bacillus licheniformis
atgagctgggaaaagatttgtgatgagctaatggagtatggtttaagccttggatttacagaggaagaaataagagagatttttgaagaaaacaaagagcttttagattggattcagaaaaagtaa

SEQ ID NO: 242 - DNA, 777 bp, Bacillus licheniformis
atgcaatctttaagggattatgagacatttgagaccgtctcagaaatggatgaatacataagtaaggttttggctcactttgaacttaaaaagaccgagagggagcttctctggctccttgctggtcattctgttaaattcattggagtgagcttcttaaagctggactcaatggcttcagctcttggggtatctaagagaacagttcagagggctttgaaggttttgggtgaactgggtatcattaaccgagtaagaacactaagaccagttagagggggctttggagcttccattactcagatttgtccagtcgaattgtccactcgctcagagagtgaaactccagaggagacaaaggaagaagagccttttcagaaaaaagaaacattttctttcaaagcatttaaaaaagatttaaaaacattacgtcagccaaagaagaaaattgaggtagattacacattccttgaagcatttggagtgccagctcatttcattgatattgttaagccttttgtaagccctgaagaagcttactctatttggggtaaagctcaagtgcttgctaaaaggtatgctcctgatgttacagagattattgagccagttgtcagagcgtttaaagcttcagtgacagcttacaagtttaaccgtatcaaaaagagctttggtagctatttatggggagctattcagggggctttaagtgtagagcagagaagagtaaacgctggaagaggactattgagctggaactggttagaggaagcataa

SEQ ID NO: 243 - DNA, 243 bp, Bacillus licheniformis
atgagtgaaaacaaaacaagtattttcgacagatacagccatgaaatacttgatattgaaaacaagctcaatgaccttaaaaacaacagaatttatgaaataactggagctaaaatggatggctaccttgctactaacgctgagcaactcagggagaaaattcacaaactacttctccagatagacagagatgctccttctttttatgaaaagctctctgaagccttggataacaagaaatga

SEQ ID NO: 244 - DNA, 303 bp, Bacillus licheniformis
gtgccaaaacttattacagtagaacgagctgaaagagaaatcaaaaggctacaacactacataaacctagttgatacatacccagaggacaccttagaaaaatggataatcaaagaatatgcttacaccaacagcattgtaaaagtagtccagaacgcaaacgaaaaaggtctcactcaccaagatgaaccactaacaaaggagtatgtaacttctgttattagtgggaaaggtaatgatgagcttcatagacttttacggtctggctacaatgcaagaataaagcataacaaaacaaaatac

SEQ ID NO: 245 - DNA, 330 bp, Bacillus licheniformis
atggaagaatactctggaggaaattcaaagacaaaaaaaatcaggggaggggggcttttacacacacatagtaacatttttacaagaaatatttttaaaaacagccttggaagtaatctccagaagcaaacccctcagagaccagctcaagagaatacaattcacaccaataccaccaaagagcccacttcagaaagacaaataactgagcaaaacaagggaggggagtctcttaaaatccaccttaaaatttattttaaaaatttttttcaaatgcttatttatcaagggtttgaggagttttcctctggagttggttctggagtgtat

SEQ ID NO: 246 - DNA, 165 bp, Bacillus licheniformis
ttgaagctcaaaacccttggggctcaagggctgaaaatttttttgttttttttaaaaataattttgttatctgttctcatgggttttaccttaaaaagctcatcactctattcttttcatacgttgtttacaattaaaaggaactatccttgggagcagaaataa

SEQ ID NO: 247 - DNA, 286 bp, Bacillus licheniformis
atgaaaattgtaaaggagacaaagaaaacaagacaattagaaatttacagtgaaactggtgaactggttcaaagagtttgcagaacatgccagctcgtgaagttgccagaggattttccaaagtacactcaaggttatttgagaccagattgccatgagtgccacaaaaagaaacaaagaaaatatattagcgagacagcagaccaaagaacggtttacaagcaacgtgaaagagccagaaaagttggtgctcctgataattacactctggaagatttcttggagt

SEQ ID NO: 248 - DNA, 114 bp, Bacillus licheniformis
atgaaaacttttagatacctagctgaagccaataacatgacaatggctcagtacattgagtttttagaaggcatggaggaattggctgaacgagcaaaaaccttcagggggtga

SEQ ID NO: 249 - DNA, 228 bp, Bacillus licheniformis
gtgtcagttcaattttatgtagatattgaaaagattttagagcgtaaaaatatgactctcggagagttggcaaaaaagacagggattcaaaaagcgagtctttcaagaatgaagaagaccaaaaaagtgacgttctcaacacttaatagaattgctaatagtcttggagagactgactgggagggtctggtaagtgcggagtttaagtcaagtgggaaaataattcga

SEQ ID NO: 250 - DNA, 660 bp, Bacillus licheniformis
atgaaacttattgatattttaactaagaatgtgaaaaatgctgagagcactgagaaggtagttcagaaagcacaaaatgaaatgaacgcaattcaggctgagatttctgagaagaacaaacaaaagcaacaactccagcaagccatgaacgtgattttcgctagtttggtaattgacccagacgacaaaaacgctcttactcagaagaaaaaagctgataacaaaatttctgagctggacaaagagctggagaagcttactgagaaggcaaaaaaagctcaagaagctttaacacaagctcaaaaggataataacacttcaaaaggtgaagtgtttaaacaagaatacattcaaggtgttacattaggttcttttaaacttaaactcgaacaccttccagagagaatgaaccgcaaatttccaagttactcttataaaaattgggttgattggtcaaaggcttatggtttgccagttcagtctgttgtaactccagctggagtgagacttgaggagagaagagaaaatgttcctttcctcaaagaacaacaaagagaagctgaagctattggcatacgaaaagcagaagagcttattgcaaaagtagaaaaagctattgaagagattcttgctgaagaaggaattgagttgaacaagtaa

SEQ ID NO: 251 - DNA, 165 bp, Bacillus licheniformis
atgctacgcaaaggagctgatattgaattattaaaactaaaaatggagtttattaactctaagagaaatagagagcttgactggttcttgagattacaagagagaaagctagaagaagtaagtgagacattgagacaagtgggggagagaaacaatggattacgc

SEQ ID NO: 252 - DNA, 822 bp, Bacillus licheniformis
atggattacgctaaaacgactattgaggaaggaattagagctggtggtcaattcaagacacctcaaagagtgaaacaagatgaagcatacaagaagaaattgaaacagatggagaattacaaccaagagcatttcacagctttccatgataaggagtgtttactggtgttcaatacattaacgcttgaactggctggagtccttcttaatatgtttgcttatatggaacaaggtgagtcaggacaactcaagcttgaaggaaaacgcatgggagtaaaagagctttctaagattctcaggaagtctgaaagaacagttaaaggatacctgaatgagcttgaagctcttggatacattgaagctgataaagatggaaagagaaaagtttactcagtagatactcgactagcaaaccgagggagaagggttgttaaagggtattttacaaagctttatattgtgagactcagagacgctctcaaggtgatgacaattcaagaagctggtttgctgttctttatgattcctcatatgaacacaagagcttttgtcctttgttcaaacccatatgagacagatattgaaaaaattgagctctggactagagaacaacttgctgaaggtgctgggttgtcactggttcaagtaaagagactggtttctagcttaatgaaaaagcaagtacttctttcagtgacaactcatagaacagctattgttctcagccctgaactaataagccgacaaactacaaagatttcaacttatgagattgcacagattcttagaaatgaagttaatggctctgaagtgagctggtaa

SEQ ID NO: 253 - DNA, 216 bp, Bacillus licheniformis
gtgagcactttggaaaacattaaaaataattacaaagctcttgtaatggagtatgaagaagcttctcagttctacttgcgaactgggctaacaaggcttctggctcacgctctacaaaacttggagcaatttgagagggcttttgttgagtgctactcattagaagaacttggagagctacaaattgagctaaatgctcaaggcttagcgatagtt

SEQ ID NO: 254 - DNA, 405 bp, Bacillus licheniformis
atggcaaaagaaaataaagcaaacctagaggatttagtgaaaaaggtgagaaaaggtgagtctctctcaaaagaagaaatagagcttttacactcaattctaagaaaggctaaagaggaaaaggaagccaagaaggatgaaaaagaaagtctttctgaggtaattgaaagaactatgaaaattgctcttgcagaacaaacattggagcaagcaaaaaagaactacttcaaaaatttaccccttagtgaaaaaacaaagattcttcaagggaaagtagacaaattagaaactttctatgagaagaaaacaccaaaacttaaagctgaagcaaaacgactcaagaaggaacgtgaagagcgtgagttctatgagaattactttaagaaatatggttacgagctgtaa

SEQ ID NO: 255 - DNA, 642 bp, Bacillus licheniformis
ttggctaaacgaggtagaccaaagaaagcaagtctcccagaggagctaaaaagaaaaattgaagctctggagaatgagactgatgaagtaaaaattaaagaaatgaaaaagctcatgaaaaaggagccagacatttgtggagcacttcaggggaatggaactgtttgtgttaaggctccttacattcgcaaagatggttccacttcagggagatgtattactcatggaggtggcgacacaagagcaaaaacaccagaagggagggcgagacaattggcaaatttacaccctaaagcaaggctaattcatggaatgtattctaaaaacattgaatttacgaaagaggaaactgagttttataacgagacaattgaatactttgttgagaattacccagaagacgttgacccaattaacatgagtttactacacagatttgcaattaaccatattaaagcaacaagattagagagcatgaacttcttgaaagaaagtcgctctaataatagctttgagaagttaatgcaaagctttgctcaagaccttggactcaataagagatacaaggacagtaaagaacacaagaacaacccaagtaatggagatattgctctattgtttatggatgataacgagaactaa

SEQ ID NO: 256 - DNA, 429 bp, Bacillus licheniformis
atggcaaaaaactttgtagaacaccatattcaagaaggtgctttccacacttttaaggtggaagctggtcaggtagttaaaattggtcaagtagttgaggttacacctaacggaggggttcaagtcgctggagctggttcaactaaagtccttggtgtagtttattccggaactgttggagttgatggaaagaatgtaggctattctggagataacaatgaagttgctactgttgtagctcttaagccacttgtttacttagaagcgaatgaaacaattaacgctggtgatatggttgaagctggtactaatggaactattgtggttcacaatgagggtgcaacttacttagccaatgaaggacaccaaaaaattgggttggctcttcaaaatggaaatgctggagaacgaattttaattgctcttgga

SEQ ID NO: 257 - DNA, 273 bp, Bacillus licheniformis
atgttcgattactacgaatttgatagtaagttaatagttagattgaaaaggagctatgatattgactctctaggagtaaaaacagctattgaggagcttctcaaggaaaccaatgctgttcaagctgttgtgtctaaccatgaaaggacaattcacaaaacctttgagaatgaggataagattgactttgaaagtatgatgatttctgctccaccacttggaggacattctaggaagagtagagcaattaattctcaagaaattggaaataaa

SEQ ID NO: 258 - DNA, 1239 bp, Bacillus licheniformis
gtgactaataagaagcgtgacccagagtccgttaagctagcgaacctcatcttagaaaagtaccaaccagagacagtagaagatatgcaaaatgcattaaaagatatttttgggcccatgtttgaatcaatgttaaaaggtgaaatgaaccatcatttaggatatgaatcgaataataaagaagagaaaaagactaccaatcgtcgcaatgggtacgggaagaaagccattaaaacaagctctggtgaagtgaatatacaagtccctcgtgacagagatgggacatttgaaccgcagctagttccaaaaagaaaaaaagacgtgtcagctattgaagataaagtcttgtctatgtatgcacggggtatgtcccaacgagatatttcttccaccattgaagacatttatggtttctcggtgtcacatgaaatgatatcggacatgacggatcaagtacttgtcgatctagaagaatggcagtccagacctttaagcccctgttatgcttttttattcgtagactgcatgtttacaactattcgaaaccaatatgaaacgaagaaatatgcggtatacaccattttaggctatacgatggaagggaaaaaggacatccttggtttatggttgaatgaaacagaaagtaagcataaatggatgcaaatctttgatgagatcaaatcccgaggtgtagaggatgtatttttcttatctatggatggagtcagtgggctagaagaaggtgctcgtgcgatttttcctgatattattgtacagcgatgtgtggtccatttgattcgcaactctataaaatatgttccaagcaaagaatataagccatttacagctgctctcaagaaagtatatggtgccccaagccttaaggcttgccatagtgcctttgaggcatttcaaacacagtggtctacttatccaggagctgtagatgtgtgggtccgaaacttcaaccatgtggaacaactttttgactatggaagtaccatacgcaaagtcatgtataccacaaatgccgtagagagtatccactccagctttcgtaaggtgacgaaaaaaggagcatttccaaatgaaaatgccctgtttaaactcctctatttacgcatccaagaattagaaaataaatgggagggcgggtttgttaaaaactggtcaatggttatgaaccagcttttagtccacgaacacctcaaagatcgagtcctaaaatacctggagtaa

SEQ ID NO: 259 - DNA, 441 bp, Bacillus licheniformis
atgactgacacggtttcaaaagaacaaagaagaaaaaacatgcaggcaatcaaatctcgttcaaaattagaagataaggttactaaagaactatggcaccgtggaataagattccgaaaaaatgttaagaaattatacggtagtccagatatagtaatacagaaatataaaatagtcatattcattgattcttgtttctggcatgcgtgtgaaaaacacgggaatataccaaaaagtaatacggaatattgggagaaaaaactcgaaagaaataaaaaaagagataaggaagttaataaatattacgaggaaaaggattggaacattaaaagaatatgggaacatgaaataaaggaagactttaatgaaacaataaatcgtatcgttacatttatagaagttgttaagcatgagccaaaaagaaaaaggagtggtcagtaa

SEQ ID NO: 260 - DNA, 1146 bp, Bacillus licheniformis
atgttctatactaatcaaccagccatcaactgcactacatacaaacaaatgctccgctcaactggttcgctatccaatttgttctctgaaagtgactcgccttatttggtctcaaggaatgtggaaaatgctttttgtgaagcatttggagctgaaaacttggggaggtcagactgttctgctgacgcttcattaaatcgtgtcggaattggtattaagacttttcttcatggtaatggtcatactcttcaaaaagtagctgaattcaataaagactcagacttgtatcgtgggaaatctccaaaagagctaataaacacggttgcttctctccgtaacgagagaattgaatttactaaaagaacatatggtattgattcaatgatataccactgtgtaacaagaaagccagggaaaattcttatttttgaagagccaatggacttggttgaaatctcctcaattacaaatgtgaaagtaagtaacaacagaaatacaatcacctttgaagacggtctacacgaatacagctttaatgtcactaagagcaccctttataagcgttttatcactgataaacctattgaagaaattaatgttgaaatcttagaaaatccttatcatgaattggctaaactatttggctttgaaattccaaaaattccagcaccaactgtcaatccttttgaaaaccttgagcacgttattcttccactcttttcagaccgtggctcaaagcgtcatgtaccagaaaaaagcggtctaaaccaatggaatgctttaggtcgaccacgaaaccctaacgagatttatataccaattccaaaatggattcataatgtattcccaacatttttcccagctcgtgataaaccttttcagttacgcttgccagacaaatcgcttttatcagccaaggtatgccaagacaatagtaaagcacttatgtctaatccaaatagtgctcttggagaatggctactaagacaagttatgaacttagaggaaaaagaacttctaacctatgaaatgctggaaagactaaatattgactcagtaattgtttataaacacagcgaacaacattactccattgatttttgtgaaatgggttcttatgatgaatttgaaaatgaaaacaaataa

SEQ ID NO: 261 - DNA, 237 bp, Bacillus licheniformis
atgatacctttccttggaaatcgtattcaaaatgcaagagaagctcgtaggttattacccagccaaatcgctgaaaaagtcggggtcactagaagcacttggtcactatatgaaagtgaaaatagaactccatcattggacactttcaaaagaatagctgaaacattgaacgtatcagctgactaccttttgggtctgaaagaagaaatgacaagcataaaagaggaggaaaaataa

SEQ ID NO: 262 - DNA, 1014 bp, Bacillus licheniformis
ttgacttatcgagtaggtagtatgtttgctgggataggtggaacttgtttagggtttatccaagctggcgctaggattgtctgggcaaatgaaatagacaaaaatgcttgtattacttatagaaattattttggggatgcttacttacaagagggtgacattaacctaatagataaaaactccatacctgaactggacattttgattggaggttttccttgccaagccttctctatagctggctatcgtaaagggtttgaagatgaaaggggaaacgtgttctttcaaatattagaggtattggaagcacaaagaaatgtttatggacacttaccccaagcaataatgcttgagaatgtaaagaacttatttacacatgatagaggtaatacgtacagagtaataaaagaggctttggaagcctttggttataccgtaaaagctgaggttcttaattcaatggaatacggtaacgtgccacaaaacagagagcggatttatattgtaggttttcaagatgagagccaagctgaaaggtttagctttccagacccaattcctttaacaaatcaacttaatgatgtaattgaccgaactcggagagttgataaaagatattattatgatgaaacctctcaatattatgatatgttgcgagaagccatggacagtacagatacaacttatcaaataagacgtatatatgttcgagaaaatagaagcaatgtttgtcctacactgacagcgaatatgggaactggagggcataatgttcctattgtattagactttgaaaataatataagaaaactaacaccagaagaatgcttactattgcaaggtttcccagctgactatcattttccagaaggcatggcaaacactcacaaatataaacaagctggtaactctgttacggtgccagttataagaagaattgccactaatattattagcgtattgaacattggaatgaatataaatcaagaacatgaatatgcaatagctgaataa

SEQ ID NO: 263 - DNA, 327 bp, Bacillus licheniformis
atgatggaaaatctaactattaatacaattggaaattactttgttgctggtattgatggaattgaattgattgttaaggttattccaactggttttgaagcaaagctttcaagaaatggtaaagaagttaaatctaatgaggttttctgcttcaaggaagagcttagagagaaagtacatgagaatattgtagaagagcttgtaaacgagctggaatttgctgataaggacttggatagaataactcaagaattagatgaccagctcaataacttccttgaggaagttgttttagaaggggagaaaactcacagatatgttaattaa

SEQ ID NO: 264 - DNA, 120 bp, Bacillus licheniformis
ttgaatgaatggttagctttcttaatttttttagttaatttattaaattcagatgttggaaagaaattatacaagaaactaaagaaattattgatgaaaatttatcatgtattgaaataa

SEQ ID NO: 265 - DNA, 186 bp, Bacillus licheniformis
atgagcaaaagtacaatgtcacttgtgaaagtctggaagagtggaaacagcttcaatgttcatattaatgagctgggcattatgcttgtagttaataaagacaagcaaccaaagagctatgaaaagattgaacactggctctccagagatgatgaaaactttataactccaacctttgaagagtag

SEQ ID NO: 266 - DNA, 216 bp, Bacillus licheniformis
atgaaaaacacagttatcaggttcgctcttgaggaatacttaaaacagaaaaatgtgagccagaagaagctttgtgaggaaactggtcttagagaatcaaccctctcaagtatgaaaagaagtgacaaagtaaatattgttcatcttgctactattatggaatactttaatgaccctgaaataagtaactttctaaaagttgagtatgaggagtaa

SEQ ID NO: 267 - DNA, 153 bp, Bacillus licheniformis
ttggtagagcacttccatggtaaggaagaggtcagcggttcgagcccgcttggaagcttaagtgaatacgttgatatgacaaggtttctcctgttgtggggaaagctttttttgttttgcgatattttgcttttagacttattgaatgtataa

SEQ ID NO: 268 - DNA, 1170 bp, Bacillus licheniformis
atggcaagaacatacagaacgcgaataaagaaaagaaaaaagcagaaaacaaaaagaaggcttatcatattttcctttttggttgtttttggattaatttatcttgcacttccaagcggtatgcgagatcaccaggaaaaccaattgcaagcaagtgaaaaaaaggcacagcctgaagcaaagaaaaagccaacacaaaatgaaacaaaaaagagcaaaatcgtcacaaaaaatgataatgctcaattggatcaatatttgaaaagcattggattcagcggcacagcattgatcgtagaagatggaaaagtggtgacaagcaaagggtatttatatgcaaaccgcgaggaaatggttcccaatacaccagataccgtcttttatgtggggtcatcacaaaaagcgattattgcaacggcaattttacagctggaggaaaaaggattgctatctgtaaatgaccctgtttctaagtatcttcccaattttccaaacggctcaaagatcaccctttatcatttcttgacgcatacatccggaattaggggtcacaaagaaggccgcggatatatttcgccggaagatttaattaaagatatcgaaaaacggggtgtaaaatacccaacagggaaatgggattatagagactccaattactcggttctggcatacattgtttccatggtaagcggtgaaccagtcgaccaatacatcaaaaagcatatttttaaacctgccggtatgaaacatgcaggcttttataaaacatttgctaaagagtcaaatccatcgacaggatataaattaaacctgcaaaaaaagctttatacgcctgacatgccggatttatcacagctttacggggccggtgatatttatatgaccgcttatgacatgtatttgtttgataaagcactttacgaaagaaaaatcatttccaatgaaagttttatgaaaatgtttacgccgaataaagcaacatacggcatgggcttttatgtgtctccaggaagctattcaagccacggtgtcatgcccggctacaacatattaaacagtttcagtctgacagggagcagatacgtcattctattttcaaacatccaaaacaacattaagtcttttggcagtgtgaataatcggatcttctctattttaaatggattttga

SEQ ID NO: 269 - DNA, 222 bp, Bacillus licheniformis
atgaataagctgttgtatcgttccatggaagacggcattccggtagaaatcatatacatgaaaaaaagcggtttttctaagcgggcgattcttgtgaaagaaataaaaaacggttatgtgaaagcattttgcttccaaaaacaacagatcagaatgtttaaaatagagtccattttgtccgtgttcccatataaaaaaagaaattcagcccattatgcttaa

SEQ ID NO: 270 - DNA, 978 bp, Bacillus licheniformis
atgcttcagacaatcaataaaacacttggtaagattatgcctttgctgacgcctttaagcgttgtcagcggagtactgcttgcagattatttaaatgggctggcgagtcttgtgccgtggatttttgcgtttatgacgtttgccggcagcctgggagcaaattttcagtcgctgaaaacagcggtggctcatcccttgccgatgtttctcgctttatttgttttgcacatatttatgcctgttttggcatggagcacggggcatcttgtgtttagcggggattcattgacgattacagggcttacccttggtgttgtcattccgacgggtattacgagcatgatttgggctgcaatgtataaaggtaacatcggtttaaccctgtcaattattttagtggacacgattctttcgccttttattgttccattcagtctttccatcttggccggggcgcatgttgaaatggatgtcatcggcatgatgaaggggttagttggaatgattgtgattccttctttattgggaatgctcgtcaatcaattttcaacgccggagcggacagcgcgattaagcgcaaattgtgctccgttttcgaaagtcgggttagccgccgtagtggcgattaacagctcggtggtcgctccttaccttaaaaacgtcgatttaaagtttttaacgatagccgttacggtctttttggtggcatttacaggctacctgacagcttggctgataggacggctgatgaagcggccccaggaggaaatcgtggctttaatttttactggaggaatgcggaatattagcgcgggcgctgtgttggccactagcttttttccgcctcaagtggcggtgcccgttgtcgttggcatgctgttccaacagattctggccgcgctgtttgggcatttgcttgcaagaagcgagctgaaaaaagcgcatcatttggacaaaaagacgagtctgccctcatag

SEQ ID NO: 271 - DNA, 414 bp, Bacillus licheniformis
atgaaaaccaatagagtaagtgtaatgatctggactttaatctccgcttttctgttttgttctatgatagtcgcagcttcactttctccgctcgctcattcaggccctcatgctaatgagtttggcactttggggatgtgggcggcaatcggaaccgttttgctcttttatatgctgcccctcgctgtttatatggccgggtttgatgcaatgaagtttgtaatggctgttctttgcggaattgggttaatcatcacgctgactatgagtccagtgtttgtgttgattggcgctattggcggaaatgcttctgcattactgggtgtcgcaggtctttgcgttctgttagcgattgtgaatgtgatttggctagtggttgcttttcgccggacgtcagcaagtgcctctttctga

SEQ ID NO: 272 - DNA, 870 bp, Bacillus licheniformis
atggatttttatcttgtggatgtgtttgcagaaacaaaatatacaggaaaccagctcgctgtttttaaagcagaaaagaacctatcaagtgatgaaatgcaaaaaatagccagggaaatcaatttttccgagactacttttatattgggaaaacagggaaacggcgggtacgatgtccgaatcttcaccccggaaaaagaaattccgtttgcaggacatccaacgctgggcacagcgtttatcattaagaatgaaatcgaaactgaaccatcttctaatgtcattttaaatgtaacagcaggcgcaataccggtgacgtttgaaaaaggtgctgatcaaatcatttggatgaagcaaaatccgcccgtgtttaaccgaacctttgataaagaaatgatggcgggggtaattggaatcgacacatctgatatggattcgaatttcccgatacaggaggtttctacagggcttccagcggttatcgtaccgttaaactcgttaaatgcagttaaaaaatgcaaaatcaacaaggatcggtttgaagctttcatgaaagaaacagaagcaagtctgctcgtttttactaccgaaacatatcatgaacaaaaccacatcaatgcacgagtattttgcgactgtttcagcgttcctgaagatccggcaacaggaagcgcaatcgggggtctcgcagggtatttactgcatcacggctattttaatcaacactacctcagcataagggctgaacaaggatttgaaataaaccgcccttccctgcttcatcttgaagcccaaataacggaaaacagcacagaaattcacgtcgggggaaacgtccacctgatcgctaaaggaagttggcaaatttga

SEQ ID NO: 273 - DNA, 1230 bp, Bacillus licheniformis
atgggaaaaaaagcaatctggctgcttgctggaatgtttgtcttcagtacactaaccgcagcagctgcctttccggacaaagaaaaaaaagcaaaggtctcaccgggtattgaagtgctcatgaacaaaaaaagcatattaaaaggaaaaagggtcggtctcattacaaatccaaccggtgtcaattcgacattaacaagcagcatcgatttgcttcaccaagcccccggtattgagctgaccgctctctatggtccagagcacggtgtaagaggagacgctcaagccggtgacaaggttgactcttatattgatgaaaaaaccggtctccccgtctacagcctctacggagatacgagaaagccgacaccggagatgttgaaaaacgttgacgtcctgctatttgatatccaagatgtcggaacacggttttacacttacatttacactatggcatatgcgatggaagcggcaaaagaaaatgatattccattcatcgtccttgaccgcccaaacccgcaaaacggcttaaaagttgaagggcctgtcctagatccggattattcttcatttgtcggaatgtatcccgtccctctaagtcacggaatgacggcaggagaattggcaaagctgtttaatgatgaatttaacatcggagccgacctaaccgtcataaaaatgaaaggctggaagcggcagatgttctttgaagacaccggtcttcctttcgtcctgccttccccgaacatgccgacgccggatacgagcatcgtctacccgggcacaggtttaattgaaggaaccaacatgtcagagggaaggggcacgacaaagccatttgaattgattggtgcgccttacatgaaaagtacggagctcgccgaaaaattaaacggtctgaagctgcctggcgtcagattcagagccgcctccttcaatccgacattttcaaagcatcagaataaactgtgccacggggtggagctttacgtgaccaacaggtccgcttttaagcctgtaaataccggtattgcgatcatcaaaaccgtccatgacctctacccggacgactttgagttcctcccttcaggcaatttcaaccgtctgatcgggaacggatgggtcaaaacaatgattgagcaaggcgcttcaattgatgaaatcgccaaaaaatacgaagcagagcaaaaacggtttatgaatatcagaaagaagtatttgctttattag

SEQ ID NO: 274 - DNA, 1932 bp, Bacillus licheniformis
atgaaaagatttcttcaatgcgcgttgattgcattgctgttatcgtctctcgctttgcagccggccgctcgcgaagcagaagcaaaacagcgtccggaacaaaacatcaaacaaatggtcagcagcatgtcgcttgaagagaaaatcgggcaaatgctgatgcctgactttagaaactggaagaaaaaaggggaatcgagcgccaaaggattaacagaaatgaatgacgaagttgctggaatcattgaaaaataccggctcgggggcgtcattctttttgctgaaaacgtcacaggcacagagcagactgtacggttaacggacggcctgcaacaagcgagccctgacattccgctctttatcacgatcgatcaggaaggcgggattgtcacgagactcgaatcaggaacaaacctggccggcaatatggcagtcggagcatcgagaagcagcaaaaacgccttcagatcaggaaaaatcatcggaaaagaattatcatcactgggcattaacgtgaattttagtcctgtacttgatgtcaacaacaatcccgacaaccctgtcatcggcgtccgttctttcagttccaagcctgagctgacttcaaagctcggcatccagatgatgaagggccttcaggacgagcaaatgatcgccacagcaaagcactttcccggacacggcgatacagcggttgacagtcattacggattgccgcttgttccgcataatgaaaaaaggctgagaagtgttgaacttgcgccatttcaaaaggcgatcgatgcaggtattgacatgatcatgacagcgcatgtccagttccccgcctttgacgatactacctataaaagcaaaaaagacggcgaggacatcatggtgcctgctacgctttccaaaaaagtcatgacagaccttctccgcaaagatctcagctttaagggcgttgttgtaacagacgctttaaatatgaaagccatttctgataatttcggacaggaggaagccgtcgtcatggctgttaaagcaggagtcgacatcgcactcatgcccgcgcaagtcacatcgcttgagaccgaaaaaaatctggcgcgtgtattcgaagctcttctgacagccgttaaaaatggggatatccccatggaacaaatcgatcagtcggtggagcgaatccttcaattaaaaatagaccgaggcatcatagatcacaccggctccgaaccgcttcagaaaaaaatcaaatacgccttgaaaacggtcggcagcagcaaacacatgaaatacgaaaagaaaatggcaagggatagcgtcactatccttaaaaacgacaaaagcaccctgccgtttaaaccgaaaaaaggggacaccgtcctcattctcgctccatatgaagagcaaacagcagcaatcgcaaagaccatcagcaaaataaggaaaaacatcaaggtagtcgaataccgctttgcagaaaaaacgtttgaggaagagattcaaaagaaaattgacgaagccgattatgtcatcacaggatcatacgtcatcaaaaacgatccggttgtgaacgacggtgtcattgatgacagcattcaagactcaagcaagtgggcaaccgcttttccgcgcgccgccatgaaatacgcgcaggccaacggaaaaaaattcgtcttaatgagcctgagaaacccttatgacacggcaaattttgaagaagccgaagccgtgattgcggtatacggctttaaaggctatgcaaatggacgcttcaggcagccgaatatcccggccggagtggaagccattttcggaaaggcaaagcctaaaggaacattgcccgtagacattccttcagtcacgcgccccggggaaaccctttacccgtatggctacggattgaatattaaaaacggcaagccgcttcacaaaggagggtcatga

SEQ ID NO: 275 - DNA, 1347 bp, Bacillus licheniformis
atgatcagggcggccgcgtccctattgctgctgacatgcttttttccgcttccgtccacagcacagactgccatcgggaacgagacaaaacagcggctgacatatcctgttttaacgaaagcgaaaacgcctgaagaagccggtttttcttcgaaaaagcttaaagctgtggaccgtctgatcgaacaggatgtcaaagcgggctttcccggcgctgcccttattttgattaaagacggaaaaatcatcaaaaaagaagtctacggctacaagcagaaatacaacggcctcatagcgctcaaacatccaaaaaaaatgaaagcaaacacgatgttcgacctagcctccaatacaaaaatgtatgccgtcaattttgccttgcagcatttagtgagcaccggaaagcttgacttgaacaaaaacatttctcaatatctccctgatttcaaagatcacccggaagacgatgtaaagggaaaaaaccggctccgcgtgattgatttgcttcatcataacgcaggcttccctgcaagctggaattattacgacccgaaatcagccggacacctctactctcaatcacggagcaaaacgcttgaatatcttgtgaaaacccccttggcatatgaacccggcacaaagcaaatttacagtgacatcgactatatgctcctcgggctgatcattgaaaaaatcacaaacgagcgtttagatacctttgttgaaaaccggttttaccggcctctcggattgcggcatactttgtttaatccgctccaaaagggctttaaacggtcgcattttgcagctacggaacgattgggaaacaccagagacggcaccatttcgttcccaaacatcagaacttacacacttcagggggaagtccacgatgaaaaagcattctattcaatggaaggcgtttctgggcatgccggcctgttttccaccgttgacgacgcagcagtgctccttcaagtcatgctgaacggcggcggttacggaagacagcatctattcagcagttctgtcatttcacaatttacagagccgtcaaaaacaaatcccacatatggactaggatggcggctcaacggcaataccgatatggagtggatgttcggcaagcacgccagcagcaaagcatacggccataccggctggacgggaacggttactatcattgatcccgtgtatcaaatcggcattgtgttgttaaccaataaaaagcactctcctgttatcaaccctaaagaaaacccgaatcaattcgaaggtgatgaatttgcaaccggaaagtacggcagcgtcattacagctgtttacgaggcgttacatcaccaatag

SEQ ID NO: 276 - DNA, 120 bp, Bacillus licheniformis
atggcagtctgtgctgtggacggaagcggaaaaaagcatgtcagcagcaatagggacgcggccgccctgatcataaactttttcagcttgcttcactcctttctgttaaaaattgcatag

SEQ ID NO: 277 - DNA, 1368 bp, Bacillus licheniformis
atgagcgatgagaaaaaatatgccgggctggcaagactgattttacaacacatcggcggcccgtctaacgtcgcagatcatacccactgtatgacgcgcctgcgcatcacgcctgtcaacagtcaaaaaaccgacatcgactcgatcaaagcgcttgaaggcgtgatcggcgtagttgaggaggaaacgcttcagattatcctcggcacaggcgttgtacagcacgtatcagacgagttcgggaagctgcttaaatccgcagaacacgttgacttaaaagaatccgcagccaaacataaagcggagatttccaagaaaaacgcgacgcctttcaagctgtttctccggcgaatcgcaagcatttttataccgctgatccccgctttggtcgcctcaggcttgattaccggaatcaccaaagccgttatccaggctggctggctcgcggaaacctcacaaaccgcgattattttaacggtaataggctcaggtctatttacgtatttgggtatcctggtggggatcaatacggcgaaagaattcggcggctcccccgcactcggcggattagccggtattttaatcattaaccccgccgttggtgaaatttcacttttcggtgaagcgcttttgccgggacgcggcgggttaatcggcattttattcgcagctgcatttatcgcttttctcgaaaaacgggtcaggcgccttgtacctcactcactcgacatcatcatcacacctacagtctcccttcttatcacaggaatcgtcacctacgttgtcttcatgcctgtcggcggcttgatttccgacgccattacgtcaggtcttctcgccatcttagatcttgggggcattatcgccggctttgtactgggcgccaccttccttccgctcgtcgtaaccggacttcatcaaggactgacacccgttcatatggaattaatcaattcaatcggcgatgacccgctgctgccgattttggccatggggggcgcaggacaagtaggcgccgcttttgcgatctatttcaaaacgaaaaaagcaaagctaaaaagagccattgccggcggactgccgtcaggcctgctcggcatcggcgaaccgctcatattcggtgtaacccttccgctcggacgtccgtttttaaccgcgtgcctcggggccggagtaggcggagcatttcaagcgtatttcaaaattgcgaccgtatcgataggcgtatcagggctccctttgtcgtttttggttcatacccaccaagttcttttgtatattctcggtttgtttatttcctatgctgccggctttgtcttaacatactcctttggtttcaaggacgatatggcagttgaatttgattaa

SEQ ID NO: 278 - DNA, 849 bp, Bacillus licheniformis
atggctgcaggaggattggaaatcattcagaatatgcttcacaaattgccgcaatctgaacgaaagcttgccgaatacattttgaaaaacccccacgagatcgtaaacggcaccattcaggaggtgagctcttcggcaaagacaagcggggcggcggcgatacggctctgcaaatctttggggctgaaaggctttcaagatttaaaaatgagagtcgccggtgatttaatgaagccgtctgatcagggataccgggatatcgaaccacaggagccgctccattcaatcgttcaaaaaacaaccagcaattcgattcaggcgattcgcgatacctttgaaaacattgaccacgaagaacttcaaaaagcgattcaaatattgatcaacgcagaaacggttcatttttgcgggatcggggcttcaggaatcgtcgcacgagacgcccagcagaaatttttgcgcatcaataaaaaggccaccgcttttagtgatatgcatcttgttgcgacattaatcgccaatgccggcgagaatgacgttctgtttgctatatcccattcaggagaaacacaggaaatcgccaatgcagtcaggctcgccaaaaaacatggtattaaaaccattgggctgacgcggttgggacagtctgctgtcgcttcattaagcgatatcgccctgtatacgtcatgctcaaatgaagcgccgtttcgcagcgccgccacctcctctcgtttaactcagctttacatgattgacttactgtttttaggcatggccgcagagcgctacgaggacatcattcagtatattgatcaaacaaaagcggccatccgcatgatgggaatttag

SEQ ID NO: 279 - DNA, 915 bp, Bacillus licheniformis
atggaaaacagccatttaggttccttaacgaccgaacgccgcaatgaaagatccaagcgcattcaccaggcagaaacgatcgatatgttgaaaatcatgaatgatgaagataaaacggtagccgaagctgtacaagaagtcttgcccgatgttaagaccgccgttgactacgccgtcgggtcgttaaagaaagggggacggatcatctacatcggtgccggtacaagcgggaggctcggcgtacttgatgcagctgaatgcccgccgacattcagcatatctcccgagtcggtcataggcatcattgcagggggagaaaaagctttgtacaatgccgtcgaaggcgctgaagatcatgaggcttttggcagacgggatttagaagccgttaacctctcaaacaatgataccgtaatcggaatcgccgccagcggccgaactccgtacgtcctaggcgccctgaagtatgccaagaaaacaggtgccaaggccatatcgctgacatgcaatgaaaactcggcgatcagccaggcggcagatcacagcatagaagtagtcgtcggccctgaagtcattgccggatcgacgagaatgaaagccgcaaccgctcataaaatgattttaaacatgatctcaacggcggccatgatcaaaatggggaaagtctatgaaaacctcatggtagatgtaaaagtaagcaatgacaaattaaaggagcgggcgatccgcatcatccaaacggtcacaggtatgccaaaagaaacagcggcgcaagcattggaaatgtccaataaccaagtcaaaaccgccatcatcatgctgaaaacaaacgaagatgcagccgctgcagaaaaactgctggagaaatcagaaggcgatattgaaaaggccctatccatttatgaaaaatcttaa

SEQ ID NO: 280 - DNA, 477 bp, Bacillus licheniformis
atgtgcaagagaggggaccgaataatgatactggtaagttcatgtctggccggagtggaatgccgctataacggttcgcacagctatgtcgaaaaaatcaataagctcgttgaagaaaaaaaagcggtgatggcttgtcccgagctgctcggcggatttcaaacaccaagggaaccggccgaaattataggcgggacgggagaagacgttttagacggcaaagcggtgatcaagacacaatcgggaaatgacgtaacagaccctatatataaaaggggcatatcaaacattggagatggcaaggcaaatcaaggctgatacgatcgtgctgaaggaaaacagcccgtcttgcggcagcagccatatatacgatggaagtttctcaagcaaaaaaatagccggcaacggccttacgtcggcacttctgaaaaaagaaggcttccgtgtgatttccgaacatcaaatagacgagctgta

SEQ ID NO: 281 - DNA, 915 bp, Bacillus licheniformis
atgttaaaacagcagatttcaatgatcggcgtgccgatggatcttggacagctgaggcggggagtcgatatgggaccgagcgcgattcgctgtgcaggtgttaatgaacggctggaatgtctttgtcaggatattgaagacctcggcgatatgacgatcgggcaaagagaggatgagaaagaaggcggggagccggcatctgaagagctaagaaatttgaaagcgattacaaaagcgagtgtaaaacttgctgagactgtcgataatatcgtagcttctggcgcttttccgctcgtgctgggcggtgaccacagcattgcgatcggaacgcttgccggccttgcgaagcattatcaaaacctgggtgtgatctggtatgacgcccatgccgatttaaatacaaaagaaacgtctccctcaggcaacattcacggcatgccgctcgccatcagcctgggaatcggccgcgaagggctgaccgccatctatggaaaagaagctaaaattaaagcggagaacatcgtcatcatcggtgcgaggtcacttgatgacggggaaaaagaattgattcgcgacaaagggatcaaagtatatacgatgcatgaaatcgaccgcctcggcatgacaagggtgatggaagaaacgatagactatttgcgaggcaggacggacggtgtccatctgtcactcgatttggacgcgcttgatccgaacgatgcaccgggtgtcggaactccggtagcaggaggcatcagctacagggaaagccatctggctatggaaatgcttgaggaatcgaagctgattacgtccgccgagtttgtcgaagtaaacccgatattggatgagaaaaacaggacggcggaagcggctgtagccttaatgggatcgctgtttggcgaaaagctgctttag

SEQ ID NO: 282 - DNA, 564 bp, Bacillus licheniformis
atggaaacaatgattaaaaaaagaatcaaacaggtgaaaaaaggcgatcgtaacgcatttgcagacatcgtggatatttacaaagacaaaatttatcagctttgctaccgtatgctcggcaatgcgcatgaggcggaagatattgcgcaggaagcgtttatcagagcatacgtgaatatcgacagttttgatatcaaccggaaattttccacatggctttatcgaatcgcaaccaatttgaccatcgatcgtatccgtaaaaaaaagccggactattacttggatgcagaggtggcagggactgaaggactgacaatgtattcccaggttgcggcggatgttgcgcttccagaggatgaagtggtttctttggagctgcacagcaccatccaggaaaaaatcttaaggcttcccgataaatacaggacggtcatcgtattaaagtacattgatgagctttcactcattgagatcagtgaaatcctcaatattcccgtaggtacggtgaaaacgaggatacacaggggcagagaggctctcagaaaacaattaagggatctttaa

SEQ ID NO: 283 - DNA, 621 bp, Bacillus licheniformis
atgagctgtccggagcatattgttcagcttatgcataaataccttgacggagacatacttccggaagatgaaacgcgtttaaaagagcacctccaatcatgcgaaggctgcaaaaagcaccttcatgaaatggaaaaatccatcgctcttgtccagagcacgtcgcatcttacagctccggcgaactttacagccaatgtgctggcgaatctgccgaaagaaaagcggacggcatcgatcaacaggtggcttaaagcccatccgtttttagtggcggcggctttatttgcaattttgatgggcggcagctttttctccagctggaaaaacgatcacgatttcagcgtatccagccagcctaatcttgtggtgaaaaacaacacggtcatcgtgcctgaaggcgaagttgtcaaaggcgatgtgaccgtgaaaaacggaaagctgattatagagggcaaagtcgacggcgatgtcacgattgtaaacggtgaaaaatatacggcttcagcaggacaagtcaccggtcagatccatgagatcaacgaggtgttcgactggatctggtataagatcaaatcgaccggaaaatcggtttttggtgtgaaggagtctaaagagtag

SEQ ID NO: 284 - DNA, 822 bp, Bacillus licheniformis
atggcttttgaggatatccctttcttgcagtacctcggcgatgccgttgatattctccttgtttggtacgtaatatataaattaatgatggtcatccgcgggacaaaggcggttcagcttttaaagggaatcgtggtcattgttctcgtcaggctggccagtcaatatttaggattaagcaccctgcagtggctggttgaccaggcgatcacatgggggttcctggcgattattatcatcttccagcctgaattgaggagagcgctggaacagctggggcgggggcgctttttttcgaggagcggaacacctgaggaagagcagcagcagaaaacgattgatgcgattacaaaagcgattaaatatatggcgaaacgccggattggcgcgcttctgacaattgaacgggagacgggaatgggcgattacatagaaacggggatccctttgaatgcaaaggtcagctctgagctattgatcaacatctttattccgaacactccgcttcatgacggagccgtgattatgaaaaacgatgaggttgctgcagctgcctgctaccttccgctttctgaaagcccttttatttcaaaagagcttggaacgaggcacagagcagcagtgggaatcagtgaagtgaccgacagtctgacggttgttgtatccgaagagacgggtggcatcagcgtcgccaaaaacggagaccttcaccgtgatttatcggaagaggcattgaaaaatatgcttgaagcggaatttaagaaaaattcgcgggaaacttcctcaaatcgctggtattggagggcgaagaaaaatggataa

SEQ ID NO: 285 - DNA, 1317 bp, Bacillus licheniformis
atggataagttcttaaacaatccctgggctgtcaaagttgtcgcgttattgttcgcgtttcttctttactttgcggtccacagcgctcaggcgccgactccgaagaaaccaggtgaatcgtttttcccgacatcgacaacagacgaagcgacgctcaccgatataccggtcaaatcgttttatgatgatgaaaactacgtcgtaacaggcgtgccgcagacggtgaatgtcacgattaaaggcccgaccggaaccgtcaagaaggtcagacaagtgaaggattttgagatttatgccgacatgcaaaacctgaaaacaggcaggcataaagtcgagctgaaggccagaaatgttgccgacggcctcactctgaccatcaatccatcggtgacaaccgtgacgatcgaagaaaaaacgacgaaggaattcccggtcgaggttgatttttataataaaaacaaaatgaaagacggctacacgccggagctgccgatcatcaacccgaaaaacgtcagcgtcaccggctcaaaagccgtgatcgacagaatccagaacatcaaggcgacgatcaatttagagggcgtcgaccagacggttgaaaaagaagccaagcttacagtatacgacaaggacggaaatgtcctgccggttgaagtcagcccttccgtcgttaaaatcaccgttccggtgacgagcccgagcaaaaagattccggtcaaagttgaccggaaaggcagccttccggacggcatcagcatttccagcctcgatataagtccgggagaggtgaccgtctacgggccgcaaaatgttcttgattcgttagaatttgtcgaggccgacgagattgatttaagtaaaataaaggatgatactgaattggaagccggcattaaagtgccggacggcgctaaaaaggtgtcacccgaaaaagtgaaaatccaggtgaaagttgacaaggaagaagagaaaaaactgaaaaacgtttcaattaaaaccgcggggctgaatgacagccgggatcttgaatttctcgatccgaagtcaggcaagctggatatcacggcaaagggctcgacagccgcgatcgaaaaactccagccttccgacgtcgagctctatgtcaatgtggcggatcttgatgacggcgagcacaatataaagctggaagtaaacggtccgcagaacattacatggtcgctgccgcggcaaagcattcgagtgaaaatctcatctcaaacaacccaaaacgaaaaaaacaatggtcaggatgaagaagaagagaatcattctgaaaaggattcacaaccttcatga

SEQ ID NO: 286 - DNA, 1347 bp, Bacillus licheniformis
atgggcaagtattttggtacagacggtgtaagaggcgtggcaaacagtgaacttacacctgagctggcctttaaagtcggacgctttggcggatatgtcctaacaaaagataaggagcgtcccaaggttctgatcggccgtgacacgcgcatttcagggcatatgctggaaggggcccttgtagcaggccttctttcgataggagcagaagtcatgcgtctcggcgtgatttcgacgcccggagtcgcatatttgacgaaggctatggacgcggaggcgggtgtgatgatttccgcttcccacaaccctgtccaggacaacggaattaagtttttcggcggcgacggctttaagctttccgatgaacaggagcttgaaatcgagcgtctgatggatcagccggaagatcacctgccaaggcctgtaggcgctgatctgggcatggtgaacgactactttgaaggcggacagaaatatttgcagtttcttaagcagtctgctgatgaagacttcacaggcattcatgtcgcgcttgactgtgcgcacggggcgacatcttcgctggcgacccacctgtttgccgatcttgacgcagatgtatcgacgatggggacttctccgaacggattaaacatcaatgacggagtcggatcaacccaccctgaagccctggcagaatttgtgaaggaaaagggagctgacgtcggcatggcgtttgacggggatggcgaccgcttaatcgctgtcgacgaaaaagggaatatcgtagacggcgatcaaatcatgtacatatgcgcgaagtacttgaagagcgaggggcgcctgacggacaataccgttgtctccacggtgatgagcaacctcggtttctacaaagcgcttgaagcggaaggcattaaaagcgttcagacagcggtcggcgaccgctatgtagtggaggcgatgaaaaagggcggatttaccctcggcggagaacagtcgggacacctgattttccttgattacaatacgacaggcgacggactgctttctgcgatcatgctgatgaacacgattaaaatgacaggcaagccgctgtctgagcttgcggcagagatgcagaagtttccgcagctcctcttgaatgtgaaagtaaccgataaacataaagtaacggaaaacgaaaaggtaaaagcggtcatcgaagaagttgagaaggaaatgaacggtgacggccgcatccttgtgcgcccatccggcaccgagccgcttgtccgtgtcatggctgaagcgaaaacgaaggagctttgcgagaagtacgtaggccgcattgcagatgtcgtgaaagctgaaatgggagcagagtaa

SEQ ID NO: 287 - DNA, 123 bp, Bacillus licheniformis
ttgacgaggatggaggtttatcgaattttcggcggatgcctcccggctgacctcaaagatcacagccgcaaggatttcctcaaaccaaagaggcgactctttgaacaaagggaaattgcatga

SEQ ID NO: 288 - DNA, 1803 bp, Bacillus licheniformis
atgtgtggtattgtaggttatattggccagcttgatgcaaaggaaattttacttaaaggtttggagaagctggagtatcgcggctacgattcagctggaatcgctgtagcgaacgaagacggcgtacacgtgtttaaagaaaaaggacggatcgccgatcttcgcgcagccgttgatgcaaacgtgaagtcacaagcgggaatcggacacacgcgctgggcgactcacggagaaccgagccgtctaaacgctcatccgcatcaaagcgcatcaggccgttttacacttgttcataacggcgtcatcgaaaactatgttcaactgacgcgcgaatatttacacgatgtaacccttaaaagcgatacggatacagaggttgtcgttcaagtgatcgagcaattcgtcaataacggccttgacacagaagaagcgttccgccaaacgctcatgctgctcaaaggctcttatgcgattgcattattcgatcatgaaaacaaagaaacaatctatgttgcgaaaaataaaagcccgcttcttgtcggccttggagacaatttcaatgttgtcgcgtctgatgcgatggcgatgcttcaagtgacaaacgaatacgtggagcttatggataaagaaatggtgattgtcacagacaaaaaagtcgtgatcaaaaacctcgacggagaattgatgtcacgtgcctcatatattgcagagcttgatgcgagcgatatcgaaaaaggcacataccctcactacatgttaaaagaaatcgatgaacagccgcttgtcatgcggaaaatcattcagacgtaccaagatgaaaacggcaagctctccattcctggagacatttcaaacgctgttgctgaagccgaccgcgtctatatcatcgcctgcggaactagctaccatgcaggtcttgtcggcaagcaatttattgaaacatgggcgaaagttccggctgaagtccatgtcgcaagcgaattctcttacaatatgccattgctttctgagaagccgctgtttatctttatttctcaaagcggagaaacggctgacagccgcgcggttctcgtacaggtgaaaaagctcggacacaaagcgctgacattgaccaacgtaccgggatccacgctttcccgtgaagcggactatacgcttttactgaatgccggccctgaaatcgcggtagcgtcaacaaaagcatatacggcgcaaatcgccgttctcgcaattttggcagccgtgactgcggaaagccgcggcaaagaactcggctttgatcttgtcaaagagctcggcattatcggaaacgcaatggaagccctttgcgcccaaaaagacgaaatggaaatgatcgcccgtgaatacttgaccgtaacacgcaatgcatttttcatcggccgcggcctcgactatttcgtctgcctcgaaggatccctgaagctgaaagagatttcttacattcaagctgaaggcttcgccggcggcgaattgaagcacggtacgatcgcattgatcgaagacggcacaccggtcatcgcccttgcgacacaggagcacgtcaacttaagcatccgcggaaacgtcaaagaagtgacagcccgcggcgccaacccttgcgtgatctccctgaaaggcctggaagaagcagacgaccgcttcgtcctgcctgaagtgcatccggagctcgcaccgctcgtctccgtcatcccgctgcagctgatcgcatactacgcagcgctgcaccgcggctgtgacgttgataagccgcggaacctggcgaagagtgtgacggtggagtag

SEQ ID NO: 289 - DNA, 324 bp, Bacillus licheniformis
atgaacaatgaaacgtacattgaagttaacagaacatcgcagcttatgaataaaatgagaaaatttacagtgctgattgatggtgtcgaggctggaaaaatcaaagatggcgggagactgcgaattgatttggagcctggcgaacatgagatccaagtgaaaattgattggtgtgtaagccaagctttgaggtttactttagatgaaggagaagtgttaaagtttagatgcggaagtccggttcgtgggtggaagatgttcttcggacttttttatgtattggccgatccagagaaatactcgtttattgaactggaagaatag

SEQ ID NO: 290 - DNA, 609 bp, Bacillus licheniformis
atgttcaacttaattcttaaagatattatcttgcagaaaaaaacattggcggcttcgtttttggtattatgtgtttatttaatgttagatatttctccaatctgggttggggttgtatttagtatagttatatcgatgtatgccttttcaatagatgaaaagtcttctatacatatgcttctcaattctttgccttatacacggaaagagattgtcagttcaaagtatattgtcgtcgttctctttacatctatggtggctgcagccatatttatcgtacacttcatcattcaccgggaatttacgatctggaaagacatcttgctaatggttgccattgtgatgacagctgcttcattcatgctgccattctgttataaattcaaaagcaactatctcgtgattgcttctattgctgcatttggcttatatatgctaacgattaactttttcgtccaaaatttgaacgatcaaattagagagttcattcacatgcttctaaccttacaaaatacttttctctatctgatcgttgccatatcaattattacgctgtatgggtgttcatggcttctgtcgattcggatttatagaaataaagtgttttaa

SEQ ID NO: 291 - DNA, 882 bp, Bacillus licheniformis
atggacaatgtaattgaactccggcatgttcataaatcgttcgatggtttccagctcaaggacttttcgatgaatgtaaaaaaaggttttatcaccggatttatcggcggaaatggcgtgggaaaatcgacaacgattaaactgatcatgaacttattgcagcctgacagcggaacaattacggtatttggcatgaattacaaggagcatgagaaagaaatcaaacaacgtattggctttgtatttgattccaacatattttatgaacatttaacgttagctgaaatgaaagatattgtgaaaagatcctatgtcaattgggatgaacaagtatttaatgattatgtgaacacatttaacttgccgctcacaaaaaaaatcaagacgttctcaaaagggatgataatgaaagcatcattaaccgttgctttgtcccatcatgcggaattaattattatggatgaaccgacgtccggactcgacccgattttccgccgggagctgttggaaatcttgcatcagctcatgcaagatggggataagacgatctttttttcgactcatattacaactgatttagataagattgcagattatatcacgttcattgataaaggagagcacatctttacaaaggacttttacgaaattgaggaacaatatgcaattgtaaaaggcggaatggagttgttagaccgggagaccgaacaggaatttatagcggttcgaaaatcaactcatggatttgaagcattgactgcgaataaatcacgaacagaaaaaatctttggggacatggcgttaatagaaaaaccgacccttgaagatattatgttctatacgaagaaaggagccaaagaacatgttcaacttaattcttaa

SEQ ID NO: 292 - DNA, 378 bp, Bacillus licheniformis
atgaaaattataatttcaaatagttcaaagcaacccatttatgaacaaatttacacccaaattaaggatcaaattcttgcgaatgaattgaaacccggacagccgctgccttctatgcgccaattggcaaaggacatgaatgtcagtcttattacgtcaaagcgcgcttatgaagaactggagaagaatgggttcatttattccgtagtcgggaaaggctcttttgtatcagatcagaatgacgaaataatgaaagaaggaaaaatgaaagccatcgaagagcaattgtcggcagcgataaaaaacagcaaagacataggcgttacccttacagaattaaaagacttgcttaccattttatatcaggaggaagaatga

SEQ ID NO: 293 - DNA, 312 bp, Bacillus licheniformis
atgattggtatggaacctattgaaattttcaaagctttatcaaatgaatcaaggctgcaaattttgcaatggctgaaggagcctgatcgtcattttaagccccatgaagggattgatatgaacacaatcggggtgtgtgtcagccaaatcacggacaaattgaaaatgacgcaatcgacggcttcccaatatctcgcgatccttttaagagccggcctgattaaggcggagcgaatcggaaagtatacgtactacaaaagagacgaagaggccattggaaagcttgctgactttcttaaaacagagatatga

SEQ ID NO: 294 - DNA, 1173 bp, Bacillus licheniformis
atgtttagcacttggaaaatttatcttttagcaatcatcagttttttggtagggacctcagagtacatcatttccggtattttggatcagatcgcccacacactcgggataactttagctgcagcggggcagctcattacgatcttttcactggtgtatgctgttttcaccccggtcctgatggcgttgacggcaagtatggataggcgcaagttaatgatgtatgctctcggtttgtttgtgataggaaatattttggcttttaccctgcctggttatggttggtttgttgcagcgcgtgtcgttatggctttgggggcaggcatggttgtggtcacggccttaacgattgccgccaagatcgcaccggcgggtaagcagggcagtgcaattgctacagtcgtcatggggtttaccgcttctttgattataggtgttccactcggaagaatgacggcagaagcattagggtggaagtctgtatttgggggaattgctttattgggattcatcgcaatgattgttctattcttaacattgccgcatactgaaggcgataagcccgtccctttgcttcagcagctttcccttttaaagaaacggaaagtagcgatggggttatcggtcacttttttctggctcggaggatattccgttgcatatacttatctgtctccttaccttctgaccgtttcagggatcagcggcaatttgctcagcggcgttttgcttatatttggaatcgccagcttggttggatcgaagtttggcggatatagcactgataaatggggagttccttttacgctcgttggcgggatggcgctgcatatcatcgcactgattttgctgtcgcttgtcacccattcctatgtcggagtactgttgattctcatattatggtcgttcgccgcatggtctaccggcccgacgcagcaatatcacttagcgacgcttgaacccgaattgtcaggtgtattgctcggcatcaatcaatcgatgatgcaattcgccatggccgcaggtgcaggaatcggagggatttttgtagaaaaagtgtcgctggcttctattacgtggtttggggcattgggggttatgattgcgattgttgttgttttgacgaccttcagttcacggaaagcagcacatgtaagagaaatcagttcataa

SEQ ID NO: 295 - DNA, 516 bp, Bacillus licheniformis
atgaactttcaactcgaggaagccatcgaaatcctggagcgcacaccacaaacattgagtcagctgctgaccggattatcaaacccctggatcagctgcgatgaaggcgaagacacttggaacgcctttgatgtagtcggccatctgattgagggagaaaaaaacaactggttgccccgaatcaaaatgatcgtgacaaaaggagcaacggaaacttttccgccgttcgaccgcttcagccagttgaatcaaaacgacgggaaaacgattgaacagctgcttaacgaatttgctgaaatcagacgggcgaatctgaaaacattgcgacagattcttgatcctgaaaccgacttcgaacaaacggggatgcacccggagtttggaatcgtcaagcttagagaacagatctcaacttgggttgcccacgatctcactcacctctcgcaaatcgcaagagtgctggcgaagcggtatcagatgatgtcggaccttggaaagcttatttgcggattttag

SEQ ID NO: 296 - DNA, 1737 bp, Bacillus licheniformis
atgaaaacagaaaacaacaatagcatgaaaccgtttttctcaatgattctcacatccggcgtacccaggctggctttaagcgccggtttgaccgcaagcctcgtcacgactttggtcggcttgtccattccgctgttgacaagggaaatggttgacggcttttccgccaattcgatcaatctggccttagcgggaatccttgcgctcgtttttatcgttcaagcggtctgcgacgggttttcgacctattttctttcttacgccgggcagaaagtggtcgcttccctgcgggagcgcatgtggttcaagctgctgcgccttcctgtccgctactttgacgaaaagacgagcggcgaaaccgtcagccgagttgtcaatgataccggcattgttgaaagcttgatttccgaccattttccgcagtttgtttccggaatcatcaccattgtcggatctgtggtcattctgctgatcatggattggaaaatgacgcttcttatgctgatctccgttccgatcacgaccttcatcatgatcccgctcggcatgaaaatgcagcgcatttccaaaacaatgcaggatgaaacagcttccttcaccggacatgtccagcagacattaagcgaaatcagattgatgaaagcatcaaacgccgagcatacagaaaaaatgaaagggttatcaggcatttcaaagctctttcaatacggcctcaaggaagctcggatattcgcgctcgtctccccgttcatgcaccttgtcattatgattgtgatcgtcgccatcatcggctacggcggcatccgcgtctctgaagggacgatgtcggcaggctcgctgatcgcctttttgctttatctgtttcaaatcattttcccgatcacatcgttcacaatgtttttcactcagctgcaaaaagcaaaaggggcaacagagcggatcatcgagattatgcattctgaagaggaagaaggccaggaagggcttgagatggacatctccaatctgccgatacatgtcgagaatgtaactttcacttacgccggtggcgagccggtcttacgcggggtatctttcgacgtcgatcccgggcagatgattgcgtttgtcggtccgagcggcggcggaaaaaccacgatgttcggcctcttggaacgattttacgaaccggactcaggagccattaacatcggggaaacaccgatcagcaagctgtcgatgaaatcgtggcgcagccagatcggctacgtatctcaagacagcccgatgatgtccggcaccatccgtgagaacttatgctacggcttggatcacgccgacagcattgatgatcaagaactgtggaaagtcgcggaaatggcgtatgccgatacatttattaaacaattccctgagcagcttgatacagaagtcggcgaacgcggcgtcaagctgtccggcggacagagacagcggatcgccatcgcccgcgccttcctgcgcgacccgaaaattttaatgatggacgaagcgacggccagcctcgacagccaatcagaagccatcgtccagcaggcgcttgcccgcctcatggaaggccgcaccaccttcgtcatcgcccaccggctatcgacaatcgtgaacgcggaccaaattatgtttatcgaaaaaggcgagattacagggcggggacggcaccatgagctgattgcttcgcatgcgctgtatcgggagtttgctgagcggcagttgacgtga

SEQ ID NO: 297 - DNA, 645 bp, Bacillus licheniformis
atgacaataaatattaaagtatattccgattatgtctgtccattctgttttctcggaaaagaccagctcgaaaaagcgatcgaaggcaaagatgtggaagtcgagtggctgccattcgaactgaggccgcgcccatcggagcagcttgatccgttaaacgacccggccaaattggcgatgtgggacggcgccattaagccgcgaatcgaggcttggggcgtcaatatgaagctgccgaacgtctctccgcatccttatacagatctggctcatgaaggctatcacttcgcaaaagaacacggtaaagggaaagcgtacaatgaccgggtttacaaagcgttttttcaggaagagcaggatatcggcgacatcgacgtattaacgtcgctggccaaagaagccggactggatgaacatgcttttaaagaagctttaagcgcaagaacatatcaggacgtgcagcggaaggcgctccaacacgcttacgaagaagccggcatcacggtcgttccgacttttatcatcggcaatgagcggattgccggagccgcggcgaaggaagtgtttgaacaggcgatcgaaaaagaaagcagacaaaaacctgttgacggcttgcagtgcgatcttgacggaaacaactgctaa

SEQ ID NO: 298 - DNA, 129 bp, Bacillus licheniformis
atgagcgatttgaagaaccctttaatagggttcttttttataaaggaaagaagagggaagacagttgacacttcatcattttattgcagccgatcgggagcttccgagaccaaacagaagaaggtttga

SEQ ID NO: 299 - DNA, 309 bp, Bacillus licheniformis
atggtcaaaacaaaactcagcaagccgtttgtatatgaggcaaccggctgtttacatagacccggaaatgacataagggcgctattcagctatatcaattcaaatattcccgagggtgaagatatagaagtttactcttgctgggacggtgaggaagacaaagaaaaagacgaccgcttagactttttcattgatatagagaaccttcagctgggcaagcatgtcaagctggataaaaagaaatacatcgatgaaattgccggcctgttttatttcgaggagcggcagctggtcaagattcgcaaataa

SEQ ID NO: 300 - DNA, 525 bp, Bacillus licheniformis
atgtccgatcacaaagcggtacacatcgttcaagcgaaagcggaggggaaaactctggtcatggagcggagtttcgaggcgccgcgggagctggtgtttaaggctttttctgggtcagtgcatttggaaagctggtgggggccgaaaggatggcagactgccaacagcaggtttgagtttcagccggatggcgtatggctttactgtatggaatgcagagatcaaaaccaaggcgaattctatggccggaaatcttgcggcaaggctgtttttcaagagattgcggcgccggaaaagatcgtgtacacggatatgtttacagacgaggaagggaatgttgttcccggcatgccggagattttgaatgaggtttattttcaagagcgcgacgtggggacaaaactgattacacgctcacatttttcttctccgaaagagcttcaacagctgctggataaggggatggtcgaaggcttttcttcacagctggagcgccttgaagactacctgaaagccattcgctaa

SEQ ID NO: 301 - DNA, 870 bp, Bacillus licheniformis
atgcgtacagagcaggaaatcatcgatttggtgctgaaggtcgcacgggaggacagccgtgtcagagcggtcggcatgaacggctcgcggacgaacccaaacgtcccgaaggacccttttcgcgattatgatattgtctatgttgtaacagatatgcagtcttttctcgatgagccgggctgggtggacgtttttggagagcggatcatcatgcagacgccggaagcgatggagctgtttccgaatgagcttggcaaccgcttttcgtatttgatgttatttacagacggcagccgcattgatttgattcttgtgccgcttgaagaaaagctggaatatagcagggaagacggcttgaccgtgatcctgctggataaggatcaggatctgcccgtcatcccgccgccgacggatcgggaatattgggtgcaaaaaccgtccccgcaatgcttcgccgactgctgcaatgaattttggtggacatcgacatatgtggccaaaggcttgtggcggcaggaaattctttatgcactcgatcatttaaatctcgtcagggccatgctgttgaaaatgctcgaatggaaggtcggctttgaaacgggcttttcgctgagcataggcaaaaatgcaaaatttttggatcgctatgttgatcaaaatacgtgggaaaggcttttggagacgtatccgccagctgattataagcgggtatggaacagtttgtttaagatgtgggagctgtttgaagagacagcagcagcagttgctgaacatctgaatgaacaataccttttcgcagaagcggagaaagtcagacagtatctgaggcgcgttcagcagctgaaacctgatgcaaaggaaattgactaa

SEQ ID NO: 302 - DNA, 948 bp, Bacillus licheniformis
atgttcagtattaaaaaaatgctgcagaaccattatggaatcgacagtgtgaacatttctcccgagcaaggcgggtggacagcacttgcttatcaagtaaccgacggtgaagcggctttctttttaaaagtgtatgataaaaatagggcatcgacagcgaaatgggcagctttaatcgatgattacatccctgttctggggtggctgggggatcacaccgctctcaacgggaggctgcctgtgccgcttttgacaacagctggagaatacaagtatgaagatgacgatgcggtgtatatgctttatgaatacattgccggtgaaaccattggagatcagccgctcggcaaagggtgcgtggagaagctcgccggaatcatagcggagctgcaccgatatgatgagacgatcccggtgaagacagaaggaattaaagaaaaatatgatatttcgtttttagatgagatgacacaatggcttgatcacctgccttgtgagctggcgacactcattcaaccctacagcggagcaatccgcgatatgatggagtcagccttatccctggcggatgatttgaaatgcagcggcagaagattggctttgtgccatacagatgttcatggctggaatttgatgaaaacgggcggggaattgattctgatcgattgggagggcttgaaactggcccctgttgaagcggatctgatgttctttgctaaccagccgtatgctcaagagtttttgcgcgtttactgcgagactcataaaggatttgaaatcgatcagaacgctttgcggttttatcagatcaggcgaagactggaggacatatgggagtttacagagcagctggcgtttgacattcagacagagaaagaaaaggcagagacgatgagcttgctgaaaaacgagcttgaagccataaaagacagcaagaccggctactaa

SEQ ID NO: 303 - DNA, 720 bp, Bacillus licheniformis
gtgaaaaattatcgtactttattttttgatgtggatgatacactattagacttcggtgcggcagaaaagtcagcattgcgaatgctttttgaggagcagcaaattcgtttgacagctgaaatagaagcgaattataaacgaatcaatcaaggtttatggagggtgttcgaaaaaggggagatggaccgcgaccaagtggtgaacacacgcttttcccttttattcaaagaatatggtcttgaggctgacggcgttttgcttgagaagaagtatcgcagcttccttgaagaagggcatcagctgatagacggcgcttttgaattaatcaaaagcctgcgggatcaatatgatttatatatcgtgacgaacggtgtttcaaaaacgcagtataagcgcctgcaagcttcaggattgtacccgatgtttaaagggatttttgtttcagaagacaccggttttcaaaagccgatgaaagaatactttgattacgtttttgaacggattcctcatttttctgtcgatcaggggctgatcatcggggattcattgacagcggacatagaaggggggcggctggccggattggatacatgctggatgaatccgggcatgatagcaaatgacactggtattgtaccaacctatcaaatacaaaaacttgatgagttgtattatattttaaacattgaaaaagaatcggccgccggccattgtttataa

SEQ ID NO: 304 - DNA, 1371 bp, Bacillus licheniformis
gtggcgaacaaagaattgaagagaggcctgggcgcgcgccacatccaaatgattgcgcttggcggcactatcggcgtcggtttatttatgggatcttccagcacgataaagtggacaggaccttccgtcctgcttgcttatgccatttgcggaatttttatcttttttattatgcgtgcaatgggggaaatgctatatgtagagccaagcaccggttcatttgcgacattcggccatcaatatatacacccgttggccggatatatgaccgcgtggagcaactgggttcagtgggtgattgtcgggatgtccgagatcatcgccgtcggggagtacatgaagtactggtttccggatcttcccgcttggataccgggcattatcgcaatggcgattctcggaggagcaaaccttgtctctgttaaatcatttggtgagtttgaattttggtttgcgatgattaaaatcgttacgattgtattaatgattgcagcggggttcgggattattttcttcggattcggcaacggcggacaagcgatcgggttttcaaacctttggtcgcacggcggtttctttacaggcggattctcaggattcttctttgcgctgtcgctggtcatcgccgcttatcaaggggtcgaactgataggaattacggcgggggaggcaaaagatccgcaaaacacgctgagacacgcgatccaaagtattatttggcgtattttaattttctatattggcgccatcttcgtgattgtcacagtctatccttgggatgagctgaatgcaatcggtagtccgtttgtatccacttttgcgaaagtcggaattacggcggcagccggcattattaacttcgtcgtcatgacggcggcaatgtccggctgcaacagcggaattttcagtgcgggccgcatgctttatacattgggagtaaacggccaagcgccaaaattctttacgaagatttccagaaatggcgtgccgttatacgggacgattgccgtcttgatcggtttggcaatcggcgtcgttttaaattatattgcgccgcctaatatttttgtgtatgtatacagtgcgagcgtgctcccggggatgattccgtggtttgtcattctgctcagccatatcggattcagaaaagcaaaaggagctgaaattgacaaacatccgttcaaaatgcctttcgccccagtgacgaactatttgacgattggtttccttcttatggtattggtgggcatgtggttcaacaatgacacacgcgtgtctctgattgtcggggttattttccttgcggttgttgccgccagctattatgtgtttggaattggcaagcgtgcctcagctgatgggaataaataa

SEQ ID NO: 305 - DNA, 153 bp, Bacillus licheniformis
gtgcctcagctgatgggaataaataatgaaatttttaaggcgcttggggctgtcgagatgttattggcagccctctcaggcgctatgatcaagaaccagctcctggttcttttttttataagcttggctgtgtttcaatacgggcgccaatga

SEQ ID NO: 306 - DNA, 120 bp, Bacillus licheniformis
atgggcggaaacccgcccgctccggagagcctctggggtccatttcaaacaacgggtccgaaagatgttgtgtttcaagtgaagccaagccacacagtaaaggcttatgaaaaggtataa

SEQ ID NO: 307 - DNA, 1299 bp, Bacillus licheniformis
gtgttagcaattttaggttttttcatgatgcttgtgtttatggtattgatcatgacaaaacggctttctgttctgacggcattagtcttgacaccgatagtgtttgcgctgatcgccggattcggattcagcgatgtcggcgacatgatgatttcggggattcagcaagtcgcgccaaccgccgttatgattatgtttgcaattttatatttcgggattatgattgatactggcctgtttgacccaatggtcacaaaaatattaaaaatggtcaaaggcgatccgttaaaaatcgtcgtcggcactgcggtgctcacgatgctggtcgcattggacggagacggatcaacaacatatatgattacaacgagcgcgatgctcccgctctatttgctgcttggcatccgcccgattatattagcgggaatcgcaggagtcggcatggggattatgaatacgattccatggggaggcgcaacaccgcgggcagcgagtgcgctcggggttgacccggctgaattgaccggcccgatgatacctgtcatcgtaagcggcatgctttgtatgatcggagttgcgtatatgctcggaaaagcggagcgaaaacgcctcggcgtgattgaactcaaacatccggctggtgccaatgaaacggccgccgctgcggaggatgagtggaagcgtccgaagctttggtggttcaacttattgttgacgctttcattgatagggcttctcatatcaggaaaagtaagcttgaccgttctgtttattatcgcgttctgcatcgcattgattgtcaattatccaaacctcgatcatcagagacagcgaatttcggcgcattcgagcaatgtaatggctatcggttcaatgatatttgccgcaggggtctttaccggaatactaacaggcacaaaaatggtagatgaaatggcgatttcgcttgcgtctatgattcctgaacaaatgggcggctttattccgatgatagtagccttaacaagcggcattttcacttttctgatgccgaatgacgcttatttttacggagtgctcccgattttatcagaaaccgctgtcgcatacggtgttaataaggtcgaaattgcaagagcctccatcatcggccagccgattcacatgctgagcccgcttgtgccttcaacacatttgcttgttgggcttgtcggggtttccatcgacgatcatcaaaaatttgcgataatgtgggcggtgctcgctgtcatcgtgatgacaggatgcgcgcttctcatcggatccatatcaatttattga

SEQ ID NO: 308 - DNA, 120 bp, Bacillus licheniformis
atgtatttaaaaatggtcaaaaagaaacaaaatgattttaaaaaattaaaaatacataaaaaccaaattatttacttcagaaagttcttctcatatgatgacaaaaaaggcaaggcttag

SEQ ID NO: 309 - DNA, 960 bp, Bacillus licheniformis
atgaagaactttgcgattataatgatttgtctattgatcttaatgtcgggggatgaaagacaatcgtccgccccgcgtcccccgggagggccggttgaaatcgtcgtacccgctgagccttcgggcggctgggatttaacggctcaggcgatacaatccgtccttaaacaaaaacaagtgataaaaagcgaagtgaagatcgtctataaacccggaagcggcggtgacaaaggctggaagtatataaatagcagcgatacgtacaccatcggcatgacatccagcttaatgctgagcaattacattctcggacagagcaaactgaaaacagacgatttcaccccgctggcgattcttgcaaaagaatggcagacgatcgctcttccaaaaggatcggaaataaagagcggaaaggatttgctgaatgagatcaaaaagaaccccggcaaggtaaaaatcggtttttcccccggacttggcaatgatgaccagctgtcattcgtcagggcggccgatatgtacggagttgacccttttaacattcaatatttacagtatgaaagcagcgaagagctcattcaggcgcttatcagacatgaaattgacgccgcatcgatgactctatcagaagctaaaacatatgaaagaagcggcagcatcacacttggggctgttacttcagacaaaaggcttcccgcatatccgcatgtaccgacgtggagagagcagggcatcccgtttgtattttcccattggagaggtgtattaggcccgaaaaatatgaccaaagaagaaatttcctactgggatcaagtgtttaaaaagatcacatcctcaccggaatggaagcagaaaataaatgaacaggaatgggaaagctattatttaaacagcaaggagacgcaacgattccttgaggagcaatcagcattttatcaaaacatcatggctggggattaa

SEQ ID NO: 310 - DNA, 681 bp, Bacillus licheniformis
ttgattgatatcgtgatcgcggaggatgatttccgtgtagcgcaaattcatgaaagattgatcgaacagcttgatggattcaacattatcggtaaagcggccaatgccaaagaaacaatggaaattctcgaggtccgaaaggccgacttgctgctgttggatatttacatgccggatgagatgggcacaacattgattcctgtcattcgaaaccgggttccggaagtggatatcatgatcatcacagcagcaaccgaaacatgtcatttacaggaatcgctccgggcgggaattgtgcactatttgattaagcctgtgactgccgaaaaattcaaacaggtgctgcttcaatataagaaaaaaaggcaaacactgctttctcagccacaggtcagccaatcaatgattgaccaaatcttcggagacttctccagcggatcccgtcaggctgaggatttgccgacaggtatcaattcgattacactgcaaaaaatcagggatgttctgcgagacgcagctaaaggaatgacagccgaagaactcggtgaaaaaatgggggcttcacgtacaacagcccgccgctatgccgaatatctcgtgtcaaaagaagaagcgcgcgctgagctggaatacggaattatcggcagaccggagagaaaatactatttggcggatgaataa

SEQ ID NO: 311 - DNA, 1611 bp, Bacillus licheniformis
gtggtcaaaaaacgggtcaatttttctctgcaaacaaaaattatgggcttgattgcagcactgcttatcttagtaatcggcttgctgacagtcacgtttgccgttcagcaaacaaaagaaggaagaaaacagtccgaacagcttgccgttcagactgcaaaaaccatttcttatatgcctccggtaaaagagctctttcaaaagaagcgcgggcataagggagaggcgcaagaggtcattgaacaaatgaaagaacagaccggtgcctatactatttatgtcctcaacgaaaagggagagatcaaaatcgcctcggaaaagagaggtcaaacgaagctgacaagaagcagaaaaatcttgttcggcggctctcacatctctgaaacaaaaaacgatggccgcatggtgatcagaggaagtgcgccgattatccaggaacaaagtggttacagcaaggtcatcggcagtgtgtctgttgattttctgttaaacgagacagaacaacgtattaaagagaatgtgagaaaattgagcttcatggctgttctcgttttgctcataggatttgcgggtgccgccgctcttgccaaaagcattagaaaagatacgcttggccttgaaccccaagagattgcatctctttaccgtgaacgaaatgcgatgctgcgtgcgattaaagaagggatcattgccaccaaccgtgaaggagtcgtcacaatgatgaacgtatcggcagcggaaatgcttaggcttcccgaacctgtggtcaaccggccaattgatgacatcctgcccggagccggaataatgtctgtccttcagcagcggcagatgttgctgaatcaggaggtctgcgtcaacgatcaagtgtttattttaaatacaaaaatgatgctccaaaacggtcaaacttacggaattgtcgtaagtttccgtcaaaaaaccgagttaaaaaggctcattgacacgctgacagaggtgcaaaaatactctgaagatctccgcgcgcaaacacatgaattctcaaataagctttatgtgatcctaggcctgcttgagctaggtgagtatgaagcagcgatcgacctgattaaagaggaatacgccattcaaaatgaacagcacgacattttattcaaaaacattcattctcagcaagtgcaggctatcctgttgggcaaaatgggaaaggcttcggagaaaaaagttaagttgtccattgatgaaaacagcacgcttgagccgcttcctgagcatatcgggatgtctcatctcattacgatcatcgggaatttaattgataacgctttcgaagccgtagctgagcaaaatgtgcggcttgtttcatttttcatcactgacatcggccgcgatattgtcatagaagtggctgacacaggatgcggcgtagcgcctgataagatgaaagccatctttgaacgaggatattcttcaaaggggatgaagagaggctacgggctggccaacgtaaaggaatctgtacgtgaacttggcggttggattgaagtggccaatcaaaaaggcggcggagcggtatttaccgtttttataccgaaggagaagcaaacacgagagggggaatccatttga

SEQ ID NO: 312 - DNA, 897 bp, Bacillus licheniformis
atgaatctccatgcactgcgattgttctattcggtcgctgaaacaggcagtgtcactcaagccgccaaacagttaagtatcagccagcccgccgtcacctcgcaaattaagaaattagaacgcgagatcgactgcaccttattcgttcctaaaggcagagggatcctgctgacacagtctggcgcagagcttgcaaaacaggccaagcggctgttttcacttgaaaaagaaattgaatcgtacgtggagcagttaagggaagggtcaattggaaaactgcgtattgcctccaccttcctccccgccaattatttgctgccaagatggctcagccgatttaaacagcaatttccgaaaacggaagttgaaatcacgacaacgaattttcaaaaagcttgtgaacagctgatcaactacgaagcggacattggcctgatcggcgggacaacggaattcggccccttcttaaaaggaacgctgcttttggaagatgacatgttattcgtagtcaatcaaaaacataaattcgcctcaaaacacgtggcattagaggagattgtaaaagaacctttcgtctttcgcgaggaaggaagtttttcgcgggaaaaattgatttcgctgtgcaacctgcataacgcgggaaaaccaaatatgggtgtacaaataaacggattaaacgaaacaatcagaacggttatggaaggatacggtgcaacattcgtatccgctcttgaagtaaacgaatatatcgcccgcggagacatcgcaaaggttcatgttgataaagccgtaataaagaacccgatttcgctatgtgtaaggacggaagaccatctatctccatctgcccttaactttattcaaatgatcgattcgaccgatgaatatcctctataa

SEQ ID NO: 313 - DNA, 1173 bp, Bacillus licheniformis
atgagtacgcttatcttaaataaaacagcttatagcaagtctccgtatgatgtatggctgaagggactggatgaaccggtggcgatgctgacctcaaccgatcgtgcggatgaatgcaggaattatgatgtgatcgaagcatttgacgattatccggttaatggatgcatcgaaatgcgcgctttggagctgaatgaaacgtatcactttaaaacgattattgcatcctcggaatttgatatgctgagggcggggaagctgaggtcgcttttggggataaaagggcagtcttacaaaagtgctctgctgttccgcaacaaaatattaataaaagagcaagtaagaaaagccggtgtgaaggttccagattttaagaaaatcgactcggcggccgacttatatacgtttgttcaaactttcggttttcctgtggtcgttaagcctatttacggatcggggtctgttgatacaaccgttttaaggaatcggcaggacgtgtggaatgttcttgcgaaaggtcttcccgatcatctggaagttgagtcgtttatcgaaggggatatgtatcatatagacggcctcatccttgatgaagaaattgtcctcagctggccgtcgcgttatatcaacgggtgtctagcgtttcaagatcatcagtttttaggcagcctccagcttgaattgaaaaatccgcttacctggcggttgactgattttgttcaaaaagcgcttgctgcccttcctgttccgaataccacaacattccatgctgaagtgtttcatacaccagatgatgaactggtgttttgtgaagtggccagtagaaccggcggcgctatggtccgtgaagcaactgtgcagactttcggttttgatatcaatgaagtgtgtgttaaagcgcaatgcggcctggaatttcatataccggaggtggacaacaatccggaccgcctaagcggctggctgttgattccgccgaaagacggcgtgctgaaagaaatcaagcctgcgccagccgcagactggatagcgaaacaaaatatacgctcaagccggagacaggttccacggctcgtcttccagtgtagacgcaattgcaagctgtttaattatcggacgcacagaagccgaattgagaggccgtatcaaccggcttgcaacgttgttccatga

SEQ ID NO: 314 - DNA, 1227 bp, Bacillus licheniformis
atgtttgcgcaatttaaagcattcagccgccttcatccgttgatccgatttttgctgataggcacgcttgtcacgaaggcggctaagtcgatgacaaccccgtttttggcgctctatctccatatgaaaacgggagccgattttggaaccatcgggcttgtcatcggtttaggctatttttcaagcactgtaggaggggtagtcggaggagcgctttcagataaaatcggcagaaaaaaagtgatgctttcatccattttcatctggagctttgtattcattctttttggacttgttcatgatttcatgtggtttttattgctgaatattttaagcgggctttgccattcgtgttttgaacctgtgtcaaaggctttgatggctgagttatcagaacgggagatgaggttccgcattttctctttgcggtatttggccatcaatgttggagccgctgtcggccctttactgggcgcttattttggtcttgccaaaaccggaacgccgtttatcatcacagggctggtctattttggctatgccatacttttgagcttgatgatgattcggctgaccacggtgaaagagacaaaaatcgctcctgaaaaagtccaggcaggttcagttttgaagacgttaaagcaagacaaggctcttcgattatacatagccggcggcatcctttttttgttcagctattcgcaaatggaaagcactttgctgcagtatttaaataacgactttgcaaacggagttaaaatattttcgactttaatcacgttaaacgcggtgacggtcatccttttacaagtgccgctcacccgtttatttgagaggtataaatccttaacaacaatatcaattggaaccgttttttgcattttggggaatatcggtttttctatcgcaaatggctggattgtttttatgctttcgatgtttgttctgacaatcggcgaaattttatgttttccttcaatgaatgtccttttggacgagctggctccggatcatatgaagggcgcgtattacggcatgcaaaacttatacaacatcggtgagtttttagggccttggctggggggaatgatgcttgccttgtacgggggaaaagccgtctttcttattgctgcgtgttcagtctttttggctttaggcgcttaccatgtgggaaggagaaagtttttatctgcacagcattatggtgtatcgcctttttcttattga

SEQ ID NO: 315 - DNA, 249 bp, Bacillus licheniformis
atggacacaacattgggctacctccgtgagtcactgtcgaatcaccttgaacacggcataggacaaaacatttacagaaaaatcgtttccgggcgatatgccaatgaggaagagtttgtcgagcacttggaggagcgggaaatggaatttctgaatcaagtgcttgaacatgagatgaaatatgcgctgaatgaacaggaccataaacggacaagagaattaaacgaagtgtatgaactgctgttttga

SEQ ID NO: 316 - DNA, 192 bp, Bacillus licheniformis
atgggtgcaatagagcggaacggatacacgtttgaaccggaatacagcgtgaccagacaaaacggtgcgatccatgtataccggcgcggccggtttgtcgaggagattccctttgagtttcacggggagtttccagagcatgatttaattgaagagcttgtcaatcattattgttatgaaaataaaatataa

SEQ ID NO: 317 - DNA, 150 bp, Bacillus licheniformis
atgcatgagctgtcatatttatggccgcttttctgctgccgttctaaaaaactgcaagcggattatagatataaaaatccaaaaataaaagccgcccggtcggcagcctcttcaagccttatattttattttcataacaataatgattga

SEQ ID NO: 318 - DNA, 267 bp, Bacillus licheniformis
atgaagcaaaagaatctgatctcaggtctcgccgttgtcgccggagtcactgcatatatgctcaaagacgaaacaaacagacaaaaactgaaatcgtacttgcaaaacgtcaaagaaaagatcccttacttttcggaaaaacacaacgtagattcattcccggttgaaaaagcaggacacccgtctccgcatgatatcgaagataacaaaatggtatcggaaggatccatgtaccctgttcaatactacgacgaaaagaaaaaatag

SEQ ID NO: 319 - DNA, 2046 bp, Bacillus licheniformis
atgccaacgaacagattaatcaacgagaagtcgccatacctactccagcacgcacacaaccccgtcgactggtacccgtggggcgaagaagcctttgaaaaagcaaagcgcgaaaacaagccggtacttgtcagcatcggctattcgacttgtcattggtgccatgtcatggctcatgaaagcttcgaagatgaagaagttgcgaagcttctgaatgagaaattcgtctccattaaagtggaccgcgaggagcggcctgatgtggattcgatttatatgacgatctgccagatgatgacggggcagggcggctggccgctgaatgtgtttttaacccctgatcagaagccgttttatgcgggtacatattttccgaagacgagccgttttaaccgtccggggtttgttgaggtggtgaagcagctttccgataccttcgcgaaaaaccgggagcatgttgaagatattgctgaaaaagcggccaacaacctgagaatcaaagcgaaaagcgatgccggcgattcgctcggcgaagacatattgaggcggacgtatcagcagctgatcaacagctttgatgcggcgtacggcggtttcggcagcgcgccgaaatttccaatcccccatatgctgacatttctgcttcgctatcatcaatacagcggcgaggagaacgcgctgtacagcgtgatgaaaacgttggacagcatggcgaacggcggcatttacgaccatgtcggctacgggtttgcccgctattcgacagatgacgaatggcttgttccccactttgaaaaaatgctttacgataatgctttattgctgatcgcatatactgaagcctatcaaatcacgaaaaacgaacggtataaacagatttccgagcagatcatcacatttgtccgccgcgaaatgaccgatgagaaaggcgctttttattcagcgcttgatgccgacacggaaggcgtagagggcaaatattatgtgtggtcaaaagaagaagtccttgaaacgcttggagatgaacttggcgaattgtattgcgcggtctacaacatcacgcaagaagggaattttgaaggccataatattccaaacttgatctacaccaggctggaagacatcaaggatgaattcgcgctgacagatgaagagcttcagaacaagcttgaagaagcgagaacaaagctttttgaaaaacgtcaggaaagaacgtatcctcatgtcgacgataaagtgctgacttcttggaacgctctgatgatcgcgggtcttgccaaagcggcgaaagtctacaatgcgcccgaatacctggagatggcgcgagctgcagccgagtttatcgagaataaattgattcaagacggtcgcatcatggtccgctaccgtgacggcgaggtgaaaaataaaggatttatcgatgactacgccttcctgctgtgggcctacatcgaattgtatgaagcatcacttgatttaaccgatttgcgaaaagccaaaaagctcgaagcagacatgaaggggctgttctgggatgaagagcacggcggtttttattttacgggaagcgatgccgaggctttgatcgtgcgggataaagaagtatacgacggcgccctcccgtccggaaacggcgtcctggccgtgcagctgtcccggctgggcaggctgactggcgacttgtcgctccatgatcaagcggcaaaaatgtttgctgccttccatggagacgtctctgcttatccgagcggccatacaaactttctccaaggtttgctgagccaagtcatgccgcaaaaggaaatcgttgtgctcggaaaacggaatgatccggacagacagaagatcgtaagcgctttgcagcaggccttccagccgaattatgccgtcctcgccgcagaatcgcctgacgatttcaaagggattgccgactttgcggccgaatacaaagcagtcgataacaaaacgactgtctatatttgtgaaaatttcgcctgcaggcagccgacgacgaatatagacgaagcgctcgatcagctggtttaa

SEQ ID NO: 320 - DNA, 1284 bp, Bacillus licheniformis
gtggcggggtattctgaacgaacggttgagagttacatagattctccggatcgattaaagagattgtacaaaagagtattattcatcgtgagtctgtcgcagattttcggcggtgcggggctggctgccgggattacggtaggcgccctgttagcaaagcaaatgcttgggacggatgcgttttcaggagtcccttctgccttatttactttaggatcggcaggagccgctttcggcgtcgggagactttctcagcgttacgggcgccgcacgggcttaaccgccggctttatggtcggcgggatcggcgcaatcggggtcgttgctgcggccgtgatcaacagcatcatattgttgttcgtttccctgcttatttacggagcgggcacagcgacaaacttgcaggcgcggtatgccggcactgacttggctgataaaaagcagcgggctaaagcgatcagcgtcacaatggtgatgacaacatttggagcggttgcgggccccaatttggtggatgtcatggggaaatttgcttcgatcatcggcgttccgccacttgcgggaccgtttattttatcggcggcagcttttattctggcagggcttgtgctttatattttgcttcggccggatccgttggagatcgccaaaaaaatcgaaacctatagacaagaaaataaattagcagacgaatcgaagtctgccggtgcttcggacaatcaaaaggggattacaattggtgccgctgttatggtgcttacccaaattgtgatggttgcgattatgaccatgacgcccgttcatatgcagcaccacggacacagcttgggagatgtcgggatcgtgataggttttcatatcggttcaatgtatcttccgtcacttgtcacagggattcttgttgataaaattggccggacagccataagcatcgcctcaggggtgaccttgctgctcgctggtgcagtggcggcgctggctcccagcgattcgctcgttttattgatcgttgccctttcgctgcttggattgggatggaactttggattaatcagcggaactgcacaaattatcgattcgaccgagccttcaacacgtgcgaaagtgcagggaacgcttgatgttttgatcgcattggcgggggcttccggcggggctctttccggaatggttgtcgctcattcaagctatgccttgttatccttggcgggcgggctgttatccttggctctgattccagccgtcatttggccgcgaagaaaaacaaatactcaaaaagggtag

SEQ ID NO: 321 - DNA, 774 bp, Bacillus licheniformis
atgagaaaaaacgctgccactgaagaagccattcaaagatggaaccggtttgcagatagctatgctgcaaaccatactgaacaaggcgatatacataaagaagtctttttgaaccccgtcatcttttctctcattgaaacggtgaaaaatcaaaaagtgctggatgccgggtgcggagaaggatatttaagcagaacgctggccgcccgcgaagcagttgtaacggcggttgactattcgacaagaatgcttgagatcgccaaggaaagaacgccggacggattgcacattcattatcggcacggcaattgtgaggacttgcattttttagatgagcaaagctttgatatcatcatatcgaatatggtcatccaagacctcgcaaatgatgaaaaagcgtttcaggaaatgcacaggttattaaaagatggaggatgctttattttttcaatattacacccttgtttcgtcaccccggaaagcggatgggaaagaaccaaagacggccaaaagctccattggaacgttgatcggtatttttacgaaggcgcatatgagcagccgctgggcggcgaggagaaaatgtttctttttcacagaacactgacaagctatatcaatacgatcatcaaagccggctttcaattagaagcggtcgaggaaccgagaccgtcaaaagagatgctgaaaaaatacccttcatttgaagaagatctcaggtgccccgatttcatcgtttttaaattaagaaagcccggcggcgatgtccgatag

SEQ ID NO: 322 - DNA, 873 bp, Bacillus licheniformis
atgaaaatgctagtaacgggggcaaccggaaaattaggatcgaaaattgtggaaaagctgctggaaactgtaccggcggatcagctggcggtcagcgtgcgcaatccggaaaaagcggaagcgctgcgggcgcgcggggtcgatgtgcgccacggggattttgaccgcccggaaacattggaatccgcatttcgaggcattgaccgtctgctgattatctctgccgatggagacaatgagacgagaatccgtcagcacggcaatgcggtagctgccgcagagcgcgccggagttcggtttatcgcttatacgagcattgcgaatgcccgcgaaagcaaaaacttccttgcgccgactcacaaagcaactgaagaagcgattttgcaaacggggattccatactccttcttgcgcaataactggtacttggaaaatgaaatgtcgagtattcaaggcgttttggcgggagccccttgggtgacatcagcagagaatggcaaagttggctgggcgctgcagcaggattacgcggatgcagcggcagcggttctgtccggcgaaggccacgaaaacaccgtttacgaactttcaggcaaactattaactcaggaagaaatcgcttcagcccttggggaagtattgggcaaagaagttcccgttcagcatgttgacgatgctgcctatcgcgatatcatgaaaaatgcgggtgtgccggattttctgattccgatggttgtcgatatccaaaaaggcattcgtgaaggcacacttgaagtcgaaagcgatgattttgaaaaagtgctcggccgtccgctcacgccaattaaagaaggattggctcaaatcgttgcaagaatctcagaagcgaaataa

SEQ ID NO: 323 - DNA, 141 bp, Bacillus licheniformis
atgagccgcaatccaaacagaggctactatcgaggctctttacaagttaatacacactgcaaattcatgcgctgccatcagctttcagtttttcttctcaagcagccgcacatgcctgtctttttattccttcatcattag

SEQ ID NO: 324 - DNA, 507 bp, Bacillus licheniformis
atgcagaacagagccgacggttctaagatcaacattcaaaagacaaaaggggaacgggtttggaacgcatttggctatttcttttacctgggatcgatcattctattggccgctgtctggggatcgctccccgaaaaggtgcctgcacattacaacgcactcggtgaagtggatcgctgggggtcaaaatgggagcttttcatattgccggaaatcggattaattatccttctgttcatgcagttcctagaaaagcaccctgagattcacaatcatccaaagcgcctgaatgaaacaaacgctgaacacttctacctgctcagccgaaagttgatcaaccgcttaaaaaatgcatgcttaatcattttttctctcatattaattgaatccgtgtcaatcgctttagactggggaagcggatttggcgggtggtttcttccgattgtcttactcggcactgtcatgcttgtggccataggtttaatacagcaaaggaaaatcaaataa

SEQ ID NO: 325 - DNA, 1635 bp, Bacillus licheniformis
ttggaaatagatgtgcagaaattgctttttgaattcattggaggtctcgggatctttcttctcggtattaagtttatgggagaaggacttcaaaaatcagccggagataagctgagagacatattagatcgttttacaagcaaccctctgatgggtgttttggcaggtatgattgtcacggttttaattcaaagcagttccggcacgaccgttatcactgtcggtcttgtcagcgccggctttatgaccctccgccaggcgatcggcgtcattatgggtgcgaacatcggaacgacggccacagcctttattatcggctttgacgttggggcatatgcgcttccgatcatcgccattggttcatttttgctgtttttcttaaagagcaaaaaatttcagaacatcggacaaattctgtttggatttggtgcgcttttctacgggttggaattaatgagcagcgggatgaagccgctccggacggttgaagcttttcatgatttaacagtcagcatgagtgcgaatcctattctcggcgtgctcgtcggcacccttttcaccgttctcgtccaaagctcaagtgcaacgatcgggatcctgcaagggctgtttgccgattcattaatagatctaaacggcgctctgcctgtattattcggagacaatatcggtacgacgattaccgctgtactggcatctcttggcgcctcagtggcagccaaacgggccgcggccgttcacgtattgttcaacctgattggaacagcgattttcctgatcttgctgaagccgttcacagctttgattttaatgcttcaatcctctttagggctggaccctaagatggtgattgcgtttgcccacgggatctttaatacgtcgaatacgctgattcagcttccgtttgtcggcatattggctttgatcgttacgaagctgattccaggcaaagattcggttgtggactataaagcaacacatcttgatccgctgttcattcagcagtctccttcaattgcgctgggacaggcgaaagaagaagtattgcgcatgggtgaatttgcggtaaagggacttgaggaaacaaaagagttttttaatacaaaacaggcaaaacatgcgcaaagcgcttttcaaatagaagatgcgatcaacaatttggacaggaagataaccgattacttgatcgaattgtccgccactacgctttctgaacaagaatctgaagaacatcatatgttaatggatactgtcagagacattgaaagaatcggcgatcactttgaaaacttggttgagcttggtgagtaccagcaatccaacagggtgaaaatttccgaagcggcaatggctgatttaacggaaatgcttgacctgaccatttccactgttaaggagtccatcaccgctcttggggaaaataacgaagatgccgcaagacgcgtagtcgaaaaagaaaatcagattgataaaatggaacgcaagcttcgcaaaaagcacattcttcgcttaaacgacggattatgcagcggacaagccggcgtgatcttcgtcgatatcaccagcaacctggaaaggatcggcgaccatgccgtcaatattgctgaagctgttttaggcgaagaaaagcattaa

SEQ ID NO: 326 - DNA, 261 bp, Bacillus licheniformis
atgcataaatacagaagaagaaacacaacggcctttacggttatgtcatatttcacatttttcgcgggagtctttttatttggtatcgggctatacaatgcggacaatctgcagctcaatgaaaaaggctattacatagccgtgatgattttagtggcggtcggcgcgattttgacccagaaagtgacgagagacaatgccgaggacaatgaaatcattgcggagcaggagagaagacagaatttgtctagcggcgagtaa

SEQ ID NO: 327 - DNA, 456 bp, Bacillus licheniformis
atgcaaacagacaaacaactattcgaagaaacaaaacaaaccgctgaaactctattgttatcgaaagctgaaaacgatgaagagctgatggcatacctcgaaaaacaagatttatccacgttaaaccggctgaaagtttatttttcaggtcctacgctaaaaatcagccacgtgatcaaagcttcgctcgccagttccatattcgcctccattgtaactactgtatgttcgggtcaagccaattccattttacccgacgtttcaaaaggttattttccggctttgttatcgatattacttatcatgagctccatctgggtgttcggcacgatcactaaatctcaaagaaacaaagaacaaaactttttacactttagaaaaaaaacgaaccatacaaaaattattggaatgattgatttcgttttggaaaataaatataaaagtatttcaaattaa

SEQ ID NO: 328 - DNA, 447 bp, Bacillus licheniformis
atgagaaacgaaaaacaattatttcaaaaagctgaacatacagccaaacttcttgagtctcacaaaagtgacgaagagctgcttacataccttgcaaatcaagaatctgttacattaaatcagctaaaaatctatttttcaaatccaagttttacattaacgtatttgattaaagggattttttttagcagtatgactgctgtcattatggcggcctttttatctggtcagatctcctccctcaaccatggtctttcaaggctattttcattcttcttcatgttctatctgatcttctcttttctttggatcgtcaagatgctgatctcctcgcgaaaaggaccgatgcaaacaatcctgcacttccaaaaaagagcggaatattccagaatcacgggtatgattgatttcattttagatgaacgctttaaaaaggaattcaattag

SEQ ID NO: 329 - DNA, 468 bp, Bacillus licheniformis
ttgaacacagacaaacaagtattcattgaaacgcagaaaacagccaaaacccttaaaacttaccgcgataagagcgacgaagagctattagcctttctcgctaaacaagattcactgaccttaaatcagctgaaagtctattactcagatccttcatttgcgcttcattatttcatcagtgcagcatttttcagtataatattggcttcgttcataactgcaattctttctggtcaagcagattcgatattccctttcatttccggcatctccattataatattagctgtcatatttacggggtgtttattctgggtgcttagacagcttgtcatcctgaaaaaaaagccgattcaattcattacacacttttccaagaaagccgagtttgcacgtatcgtaaaaatgattgattatgttttacaacaaaaatacaaaaaggcattaaaaaatataccgaaccaataa

SEQ ID NO: 330 - DNA, 420 bp, Bacillus licheniformis
ttgagggaagagacaaaatgcgcactgatcatcgatgaaagcctgccgctcgggctaatcgccaatacagctgccatcctgggggcggccctcggcaaaaacaaacccgatctgattggagaaactgtaacagacggctcgggaatcgaccatttaggtatcgtcaaaatcccaatccccattttaaaaggcaatgccgagctgcttcatcaattaagtcaaaagctgctgaccgacgaattcaacgatattctgacggttgatttcaccgatgtagcgcaaagcattcatacatatgaagcatatattgaggcatttcaaagcaccgcagcttccgattaccgctattttggaatcggcatttgcggggataagaaaaaagttgcgcggctgacaggaagcttggggctgttgagataa

SEQ ID NO: 331 - DNA, 909 bp, Bacillus licheniformis
atgaagacaagacgcgaaaccgccggacacctcgcagctgtgatcacgatcatcatctggggtactacttttgtctcaacaaaggtgctgctcgaggatttcccgcccgtagatatattgttttaccgttttctcatcgggttgattgtgctgatcatggtgcatccgcatgtgctgactttccggagctggaggcaagaagcgctgtttgcgggagcaggtttatgcggagtgacgctttactttctgttggaaaacatcgcgcttactcttacctacgcctcaaacgccggcatgatcgtcgcggttattccgatgatcaccgcggtattggcgcattttctcctttcgggcgaaaagctggagccccgctttttcattgggttcgccgccgctttcactggacttgcgctcattttctttaatggacaaatgatgcttaaattgaatccgctcggcgacattctcgctgctgcctccgcattcgtctgggcggcatatgcgattttgatgaaaaaaatcagcacattcggttaccatacaatccaatgcacacagcggatctttctgtacggtttgctattcatggttcccgctctgttcctgtttgatttccgcttcgacgcaagccctttttactcccccgtcaattggttgaacatcctattcttaggcgcgggcgcatctgcgctttgctttgtgacatggaactggtcggtcggtgtgcttggagcggtaaaaacgagcgcttatatctatatggtgcccgtcatcactattgcggcatccgttatcattctgcaagaaaaactgacatgggttgctttttgcggaggagcgctcacattggccggcgtttatatttctgaaacaaaaccaaaaccgcagctgaaggaggaacaaatttga

SEQ ID NO: 332 - DNA, 837 bp, Bacillus licheniformis
atgcgaaatgaaacccgcacgcttttcctcggccctgatctaaatgttgaagcctaccgctttaaaggcattatccagaagtttccgaatcacttccacgagtattttgtgattggttttattgagaaggggcagcgctatttgctttgcaagggagaagaatacatcattaatcaaggcgatctcgtgcttttcaatccttatgacacgcacagttgcgagcagattgacggaaaggcgctcgattaccgctgcattaacgtgatgcctgatgttatgagaggatttgtgaaggagatcactggggccgacagcctcccatatttcacggagaatgtcttgttccgccatgagctgaacgccagcttgaaggagctacacattcaaatattgcaaaaagaaaaagccttgaaaaaagaggagctttttctcaaccttctcgaagagctgattcgtacgtattctgatgtcacgtttcttgaaaatgcacctgaaccgtccgacgaagtcaaagcggtgtgcagttatttggaatcccattaccaggaaaacattacgcttgaacatttaagcaggctgacaggctggagcaagtatcacctcctgcggtcgtttacgaagcagaaaggaatttccccctacagctacttggaaaccgttcgtatcaatcatgcgaagaagctgttggaagaaggcgtaaaaccaatcgatgcggctttccaaacaggcttcagtgatcagagccatatgacaaaatttttcaagcggcaggtcgggctgacgccgaaacaatatatgaaaatttttgaatatgacaggcaggagatcaaaggatga

SEQ ID NO: 333 - DNA, 414 bp, Bacillus licheniformis
gtgaaaaagaaatggattgcatcaattgccttcacgatgatgctgggcatcggaatcacgatttactgtctgttttttgaacatagcaaactgagcgaactgacttcagacggggaatgggagctctcgtattctaaagaaaggggagatcaatattggaatggctatgtttcgaagaaaacgagtgaagatgcggagttaaagagagtcgtgttttttgtgaatggaaaagagacggttgattacgaaaaggatgagcaagaggaaggcggaacacattctgatatagtcaatgttgtctggttaggtgatgccccagaaaaaagtgagcaatttgaagctgtcgtggaaaggaaccagaatggtgaatatcataaggagaggattaaactgacagcaaaaaacgggttataa

SEQ ID NO: 334 - DNA, 468 bp, Bacillus licheniformis
atggataaagaatacataaccgaactgatctcatccaaattaagattaatccgggcggaaagcggctatacgcaggagaaaatggcgaacgtgctcgggatgtcgaagaaaacgctcgtgcaaatcgaaaagggcaggtcggctgcgggctgggcgcatgttgtcgcggtatgcgcgctttttcggaacagtgaagtgctgcaggccgtcctcggggatgagccccttgaggtggtggagactgttgctcaccgaagcatcgacagaccaaaagggaagacgcttggcggaaaggtgtggtggcgggacattgagaaaaaaggagagtttcgccttcagcaaaacttgatttctcaccattaccgcatcttggattcgtatgacgacctatggttcagcacgtttgaaaagcaggatgcagttgcgcgtttggacgagctgttaaatgagcaggacggggtggaatga

SEQ ID NO: 335 - DNA, 498 bp, Bacillus licheniformis
atgaaacatgtcggaggcattctgattttgtcggaagacctgcagctcttgtcatgcaatcgagcggccctccattggctgaacatcttgcgcggctgggaaagcatcggcagcgaagccgtgccgagacccgtccgagccgtctgcacgcgcgcagcggctgaaactacagctccggcaaaaacggtcatctcgattccaggccattcctgcctatccattaaagcgagccgtttagacggatttggaccgtcaggccagatcgccgtttcatttgagcctgcttcacccgcagaaaccattccgctgatagcggaagcctacagcctgtccgaccgggaaaaagacatcgcttaccgggtcatccgcggactatcaacaaaagccatcggagacgaattgcatatatcggcttacactgttcaagaccacttgaaatcgtttttttttgaagacgggcgcaggaaaccggagggagctgatgtggaagctgcttga

SEQ ID NO: 336 - DNA, 1056 bp, Bacillus licheniformis
atgcagcctgaagatattgtcagaagcggtccaaaccaatacgtttgcagagaggggatcgtgaaagaactgccgtcatttgcgaatgcattcgaacgtcctgtcatcatttcaggggttaaatcgtttaaagcttttacacgttatacgacgcctccagccgattggaaagtcgttcagcatacgggctgcagttccctaaataagattaaaaaagcagcagaggaagcagaatcagcagacgtcatcataggaataggcgggggaaccgtcttagatacagcgaaggcagccgccgatttgctgaacattgaagtcatgacgattccgacgatcccgggaacatgtgcggcaagcacgccgttaagcgtcatctatgacgatgaaggtaacttttcgggcgtccaatatcataagcgctccagctatttgacactggtcgatccgctgctgcttctctcttcaccggtcgcttatgtgaaaagcggaatcggcgatacgcttgcgaaatggtatgaggcagaagcgatcatcagaaatacggccgattcgctttctatcatggttcagacagggctgaggcagtctgtctatattcgggatattttgttgacagaaagcctgaaagccatagagagccttgaaaaaggcgaatcctccccagctttcacaaatgtcctcgaagcggtcattgcgctggcaggcacagtaggcggatatgcgggccgctacggcagaatggccggggcccatgccattcacaacggcttgacgttcatccccgaaacccatcgtgtgctgcacggccaaaaggtagcctacgggatactggtgcagcttgctttagaagggcggacagatgaaatagccgaactgattcccttttatgaagggctcggttttccgagaagacttagcgatttgggcattttagaaaatattgaagcggccaaacggatcatcgccgcccatgccgtgcgtccggatgaatctttatgtttgatgggatcttttcatgaagcggatgtgattgcggcgatagagtcgcttgaataa

SEQ ID NO: 337 - DNA, 1707 bp, Bacillus licheniformis
gtgaaaagcccaagatggaacaatatcacaatcggcggcaaatacggcattattttctttgtgatgttaacagcgtttttaacatccgttttgattacatatggtctgttaaaagatacgagacagacggttcaggatacgaaatcgaaaaatgaaacggccgttcagtcggcaaagctgatgtccctatatcaaaataaatatttgcacattccggagtacatcataaacgcccaggatgaaaagctgaccgattatatgaagtacagccaggaatttgccgatacggccaaaaagctgaaaaaagagctgcattcggatgagcagcttgacatgttcgatcaaatcattgaaaacaatcattcactggatgagtactttttcagcgaaattgttcccaacgtgcagcaaatcaacaccgagaaatttttaacccttcagaaaaaagcgaacaagctcaaagaggagacgatgacgttaggcgaaagcttgaaagaaaacgctgtcaaaaccaatgttgagtcaattggacaagcccaatccaatatgacgaaaaccatttatattttaggcgtctcaattctgatttcggcgattgtgtcggcaggactcctgatcattgtcagccggcagatcaagaaaagtctgaagcgtgttgtggcagcaagcgaagaaattgcaaagggtcatttgaactttgaagcccttgattacaaaggaaaagatgaaatcggccagctttcgcaagcggtgaatcatatgggcggaagcctgcgtgagatgatcgtcgaagtatcagggatcgcagccgaagtcgacaagcaatgtcttacgtttacgagcgtctcggctgatgtcagagaaggaagcgaacagatcgctgtcaccgttgaagaattggcaaacggggccacgaatcaggcaaatgaagcagctaatatttccgagcagacacaggagctcaccgggcaaattcagcacgctcatgaaagcggcgaaacgctggcccggttttcaaaagaagtgcttcacgtgtctgtcgacggcgacaaacagatggctcaatcattggagcaaatgaatgtcatcaatcatgtaatggaagcatccgtagaaaaagtcagtgtgctggaggaacagacacagtcaatccacaagcttgtcgaaatgataacaggtatggccgaacaaacgaatttgctcgcattaaacgcgtccatagaagcggcaagggccggcgacgccggaaaagggtttgccgttgtagccggcgaggtgaaaagactggctgaagaagtgaaaagctctgtcggcagcatcaccgaaatcgtcacggcgattcaaaccgaaacatcttccatggccggtgatttaaaaaccggtttttcagaagttcataaaggaaaaaaccagattgagacttccggccgatacttttcagagattaaaaataaagtgacggatatggctggccgtgtatcggacatttcggaggcattatcgcatttcagacgttcaagcgaggagattaacggctcggtcgagcatatcgcggcgatttccgaagaaagcgcggccggttctgaagaaatttcagcgtccgtacatgagcaaagcggctcgattgaaaagatggacgaaagcgcaaggcttctgggagagatggttgaacggatgaatgtgatgatcaaacggtttaagctctga

SEQ ID NO: 338 - DNA, 1062 bp, Bacillus licheniformis
ttgtcgatatatgtgaaaagagggctgttggcacttgcgctgttcagtctcctcacagctgttgccgggtgctcattcaattctgctgaaaaaagcgccaaccgtgaagaaaaagtaaagctgattgccgactccgacaaattgtacgtcggttttgccatcgatacgctgaaggaagaacgctggtacaaagataaagaagcgttcgagaaagaagttaaaaacctcggcggggaagtcaagacgcttgccgctaacggaaataaagaagttcagattcagcaggccgagctcttgatcagcgaaggcgtcgacgtgcttgttgttgtaccggcagatgcggatgccgcggcggagatcgtgaaaaaggcgcacagcgccggtgtaaaagtgatttcgtatgaccggctgattcgaaacgcggatgttgattattacgtttcatttgataacgaaaaggtcggggaactgcaggcggaagcgattgtaaaaaaagcgaagaaaggaaacttcgtatatatcggcggatcgtctcttgacaacaatgcggtcttattccggaacggcgccatgaaagtgctcgaaccgttgaagcggcagggtaaagtcaagctcgtgcttgacgaatatacgaaagactggctgccagaagaagcgaaaaagaacatgaaaaaagcattgaacaagacgagagatatcgacgccgtgatcgccgccaatgacggtacggctggcggggtgatcgaggcgcttcaggaggcgggcctggccgggaaaattccggtgtccggacaggacgctgaaattcaaggcgtccgacgaattgtgaacggtacgcagacgatgaccgtttacaaaccgattcccgcgcttgccaaaaaaagcgctgaaatggctgttcaagcggcgaaaggcgaagcgattcaaaccgatacaaccgtcgaaaacggcaaagccaaagtaccggcgattttacttgagccgtatgccgttacgaaaggcaatatcaatgagactgtgatcaaagacggccatctgtccaaaaaagatattaataaataa

SEQ ID NO: 339 - DNA, 768 bp, Bacillus licheniformis
atgaaaaaaagcatatcatctctcatgatcggattattggctgtcgtgttgggcgcctgctcttcaaatcatgatgatcagcaatcccaggccagcgatcaagcgaaaaccgcacaaagcgggcagcaggatcaggaaaagcaaataaaagcaatgcagaaaaagcttgatcagcaaaaggttgatgacacaaaaacagtggctgtcgtaaacgatgaaaagatcacaggcaaggactataacagcgtattatcaaccgctcaaatgcaatatcagcaaacaggacaggacccgacttctaaagatgcggcgcagcaaatcaaaaagcaggcgatcgacagcctgatcggacaggctttaattacgcaggaagcggacaaaaaaggctacaaagcatctgagaaagaaattgaaaaacagctggacgaaagcaaaaagcagtataaaaacgagcaagattttgaggaagcggtcaaaaaagcaggcttaaacatgaacacgctgaaaagcgacattgccgacagcatcaaaacagagaaatatattgacaaagaactgccgacagatcaggttacagacaaagaaatcaaagactattatgatcaatttgccgcacagcaaaaagacagcggacagaaaaacacacctgcgtttgacgatgtcaaacagcaaatccaagatatgctcaaacagcaaaaaagacaggaaaaactcggacagcaggtcgaaaagcttaagaaaagcgccgatgtgaaagtggaaatttaa

SEQ ID NO: 340 - DNA, 765 bp, Bacillus licheniformis
atgtttgaagatgagagactgaatcgcttgatttacctttatacccctctttatgctgaggattttccgatcattctgttctggattccaaaaagcggctgcacgacgctgaatcgctggttctttttccaaaacggtctgcttgaagatgtcaatcgaagatgcgccggagaagttcaccactacagaaatgcgatctatacgcagaagccgaattatgtgaaggatcttctgacggatttaagagagggtaaaaaggacacttacaaggttgtacgcaacccttttcggagagcagtcagttcctttctggcagcgatttgctccccgaattttatttgtctgttcaacagtgatataaacacagggctttctttcacgcaatttttgcatcatctaaaagatctcgggacggatatcaatgccattgaccgacaccttggtccccagtatatcgaaggagaagaagagtttgtcaccaattatatttacctcgagcaattcagcgcacaaatcagagagattgaaaacaaatacaaattattgaaatctccgttatcacagctgtcacaatcaccgcaccatctgtcagacattatgattaaaaaagggaagtttgctgacactgttttgactatgtcaaccttcgactgggcgtttccgacttttgagagcttttacaatgacgaaacaaaagaattggtgcacgacatttttgcgaaggactttgaagtgtacggctttgattcgaagcatatcaagtaa

SEQ ID NO: 341 - DNA, 888 bp, Bacillus licheniformis
atgcagattcgcatgactgaatatcaggttcccgaccccgaatcggggccgtacggtatcacagtatgtgcaaacgggcgcatttggtttactgaacaaaaggggaaccggattggtatgctcacagagtccggggatatcaccgaatatacgattccgacggagagcgcaggcgcctcgattattacgtccgggattgacggcgagctttggtttacagagtataaagcggggaaaatcggcaaaatcacgcctcaagggaaaataaccgagtatgctcttccaccgggtgctgccccgtttggaatcgctgcaggctgtgacgacgccatgtggtatacagatatggccggacatcaaatcggcaggctgtcctcttcaggcgaaataacagaatacaaactgcccaaaccaggagccttcccgtcatttattacaaggggagcagacggcgcgctctggtttacacaaaaccaaagcggctccatcgggcgaataacggcagatggagacatcagcgagtatccgctgccccaagaacaatccggcccggtcgggatcactgccggcccggacggggctttatggtttacagaaataaacgcaaatcaaattgggagaataacggtctcaggaaagatcagcgaataccagcttccgacagcgcatgcacgcccgcacgcgattgccgcaggcggtgacggagcactgtggtttacggaatggggcgcgggtcaaatcggccgcattacagtcgacggggatattacggaatatccaatcccgacggcagattctgaaccgcacgggatagcggccggatcagcccattcgatctggtttgcagaagagtgcggccgtattgggaaaatctctatccaaaattaa

SEQ ID NO: 342 - DNA, 381 bp, Bacillus licheniformis
atggaacatgtgaaagcccttgccatcaaaggcatcatgacgattgtgattctgtaccttgttctagggctcgggtttagttttagttttgaaaacaccctattcatcacgattgttcttggcgcagtatcctatttgctgggtgatttgtttattctgccgaaaaccaacaacatcacggccactttagccgatttaggcgtcgcttttcttgtcgtttggctgatggctcttgcgatgggaacggctgccaacaccgctgcattggccgcgttttttgcagctgtcgctatggcgatcggtgaatacattttccatttttacttgatgaataaaggccttggctcgcccaaccgcagaatggaaacgagaacggaataa

SEQ ID NO: 343 - DNA, 1455 bp, Bacillus licheniformis
atggaacagtcaaacaccaatcgccagaactttcaaagaaaaatgcaaacgagacaccttatcatgctttccttaggaggcgttatcggcacgggccttttcttaagttccggttatacgatctcacaggctggtcctgccggaacgattctagcctacttggccggggctctgatcgtctaccttgtcatgctctgcctcggcgaattatcggtcgccatgcctgtcaccggatcgtttcatatgtacgcctccagattcatcgggccgggcaccggattcaccgtcgcctggctatactggctgacctgggctgtcgcgctcggttcggaatttaccgctgccgggttattaatgcagcgctggttccccgatacttcagtctggatgtggagcgcggtattcgctgcactgattttcgcgctcaatgctgtctcagtgagatttttcgccgaatccgaattttggttttcaagcattaaagtgcttgccattatattgtttattatattaggaggagcggcgatattcggcatcatcccgatacaaaatgcagacgctgcaccgcttctttcaaactttgcaggagaaggcggtctctttccaaacggcttccttccaatttttatggcgatgctctccgtgaattttgcgttttcgggtacggagctgatcggaattgccgccggagaaagcgccgaaccggaaaagaacattccaaaagcgatcaagacaacactctggagactggtgcttttcttcatcggaacgattttcgtgctttcgtgcctcattccggttaaagaagccggtgtgatcaaaagcccatttgtcgtcgtctttgaccgcatcggtgttccatatgcggccgacatcatgaactttgtaattctgacggctctgctttccgcggccaactcaggcttgtatgcatgctcccggatgctctggtcactgtcaaaagaaaaaactttgcaccccgtatttcaaaagctgacttcacggggaatcccgttgaacgcgctgatcttcagcatgctcggcggcattctgtcgctgctctccagcgtgtttgcgcctgattccgtctacatcgttcttgtgtcgatttcagggtttgccgttgttgctgtctggatgagcattgcggcttcgcagttcatgttccgcagacgctttttggctgagggaaacaccgcagacgacttaaaataccggacaccgctttatccggccgtaccgattgccgcttttctgctatgcctggcatcctgcattggcattgcctttgatccgaaccaaaggatcgcccttttttgcggtgtgccgtttatggcgttatgctataccatctattatgcaacaaaccgaaaaaatagctggaatccgtctgagcccgttaagaatgcaagtttgcatgtttcattttctgaatacgaggaaaagaaaaactaa

SEQ ID NO: 344 - DNA, 948 bp, Bacillus licheniformis
atgacaaatccgatccgaacttctttacaacaattttctgtcattatacttgacggcgcgatggccaccgagcttgaacggtacggctgtgatttgaacgatagcctgtggtctgcgaaaattctcatcgaaaaccccgagcttatcaaacaagtccatctggattatttccgtgcgggcgccgattgcgcgattacagccagctatcagtcgacggttgagggtttcacaaaacgcggccttagcgaacaagaagcgctccacctcatccgggagtctgtccgtcttgctgcagaagcacgcgatgaattctgggcggctccggaaaaccgcgaaggccggcctaaaccgtttgtagcagcttcagtaggcccttacggcgcctttttagcggatggttccgaatatcagggaaattatggcgtcacagaagatgaattggccgattttcacaggcggagaatgggcgctttaatcgaagcaggcgccgatattttggcatgtgagacaataccgtgcctttcagaagcaaaagctatcgttcatttattaaaagagttcccggatacacatgcgtggatcagtttcagcgctaaagacggacgccatatcagcgacggtacgaaagccggcgaatgcgcgaagtggctcgatcagcatgaccaggttgcggcagtaggagtaaactgtacgcggctggagcatgtctcttcgctcatcggcggcatcaaaaagcatacagctaaaccgattatcgtctatccaaattccggtgaacagtatgacccggaaacgaaaacatggcatggcgcggcatgtaaaacttctttcggagaaagcgcccgcagctggtataaccaaggggcacagctgatcggcggctgctgcagaacaacgcctgaggacatcaaagccgtcgccgcctgggcgagaaagctagaggtataa

SEQ ID NO: 345 - DNA, 741 bp, Bacillus licheniformis
atgaaaaaactgattatcaatgctgatgattttggatattcaagaggtgtgaactacggaattattgatgcctataagctcggaattttaacatcagcgacctttatgacgaatatgccgggcgctcgtcacgcggcccggctggctcgcgaatcgcccggacttgggatcggcgtacatttggtgctgacctgcggaaggccgcttttgtctgaccaccggacgattgtcgattcaaagggaagttttcgcaatctcgcattttatcaaggtgcttttacaatagatgccgatgaagtataccgcgagtggaaaacgcagattgaaacatgcatcaacatgggcttggaacccgatcatttggacagccaccatcacatcaatgcttatccgggcatttctgacgtatttttgtcgctcgccaaggagtatcgcctgcctgtcagacgtaatatggagagcgccataataacggaaaaaggagtgaaaacgacagactctttctcacctgtccttgaagcggccttaaagggtgaagaagccgtcactgaactgtttgaaaaacataataccgtggaggtcatgacccacccggcatacctcgataaggagcttttgacgaactcttcatatacttatccaagagtcgatgaacttgagtttttaaccgatccggacgttgtcatccgcttgaacaagcttgcggatgtccagcttgtatcatttaggaatttgacataa

SEQ ID NO: 346 - DNA, 1374 bp, Bacillus licheniformis
atgaaacatatacttcagctgcttggaaagtctttgctgattccgattaccgttcttccgatcgccgggctgctgctgcggctttctgcggaggatatgctggatatacctctttttcaagcgtcaggcgtgattttgaacaatatggatgttctgatcgcgatcggcatcgccatgggctttgcccgttcaaaagataaagggattcctgcgctgacaggatatttggcgataaccgtgttaaaagaggggatcggcatcttgaatccggcccttgatatgagcgtcttcggcggggtgctcgccggcctgatggcggctttcatttataatcaatttcaacatgcaagactgcctagcatgttttcattttttggcggagagaagtttccgattacaatgatcgtattggtgacgattccggtggcaggttttttttcggtcgtctggccttacgcagaggcggcgatcgacgcttttagccagtcgcttgttggtcttggcgctttcggtgtttttgtgttcggatttctgaaccggtttttgcttccgttcggacttcaccatgtcatgaatacgtatatatattttgggcttgggcgctatgagacggcatccggagaagcggtgacaggggaaattacacggtttttgaatggagacccgacagccggctactttctcggcggtttttttatcacgatgatgttcggcattccggcgatcgctttggcaatagcgcatgcagccagaacgagaaaaaaagaaacgaaagcactcatgtcttccggagcagccacatcgctgatcaccgggattacggaaccggttgaattcacgtttttatttacttcgcctttattgtattttcttcactcggtctatacgggacttgccggagcggtgctctgtttgctggggattcgtcacggcttctcatggggagcgggcgccatcgattatttgctgaatcttaatttgtcagacggcggattattgatcataccggtgggcgttgcttttttcgcgctctattatgttacgttttactttgtgattataaagcgaaacgttccggtgatcggaagggagcaggaaacacctgaaggagaccggctgcagcagtctatggcggcaggtattctcaagtatatcggcggccgtgagaatgtcgtcacttgtgaaaactgtattacccgtttgcgactgaaattaaaagacacgtcattggcggatgaagcccaattaaagcgattgggggcgcacggtgtgatcataattgaccggcatcatattcaaattgtgattggaacggatgcggggactgtaaaaaaagacttgcagaacttgatcgacgaatctgctccggattaa

SEQ ID NO: 347 - DNA, 777 bp, Bacillus licheniformis
atgaaaaaagatgagtattattcaatcggtgttttctcagaaatgacagggacatccattcggacgctccattattacgatgaaatcggcctgttgaaacctgaaaaagagacgggaaccggccgccgtctctacacagacagagatgcgaaagatttgcagaagatcatatgttttaagtttctggggtacagccttgaacaaattcgcgctttcatgaaggatgcatgcttcgatgctggtctgattgaggcgctgcaggagcagaaaagggtgctggaggagaggaaggagcatattgaaacagggctgaaagcgatcgacaggacgatcggtcttctggaagaggaagaggaaatcgacagttctgttttcatgagcctgctgaacagcatccagacggagaaggagcagcgcgaatggcttgaacagcaggtgtctaaaagttttgccgatgatgtattcggcaaatcagaggaagagatggccaaattggatcaagagtatgttcgtttatctaaggaagccaagcggctcatgggaaaaccggttgatgaccccgaggtgcaggacatggcagaccggtatatgaagacgagtttggagtttgtcggagagggcgtgctgtcggctttaggacagatggagacaatagaatcgcggcagctggcagagaaatttccttcaccatttacaaaagaagaagaagagtggctgcagcgggtgttcgaatattatatgattcacaacgatttctgtcccgaaagcggcggatga

SEQ ID NO: 348 - DNA, 723 bp, Bacillus licheniformis
atggaaactgtgaaagaaattttggttgtctacgggcgaatcattaccatccttccgcttttattggttgtcacattgttcatgggaaaacgctctatcggagaaatgcctgtgtttgattttttaatcattattacattgggtgccgttgtcggagcggacatagccgatccgaagattgaacatttgcataccgccgctgcggtggctgcgattgccctattgcaaagactcgcttcaaatctcatgatcaaataccgaacgctgggacgtctaattacatttgaaccgaccatcgtcatcaaaaacggaacgtttatcgtcggcaatctgaaacgaatcaaatattcagtggataatattctgcaaatgcttcgggaaaaagacgttttcaatgtcagcgacgtagaaatggcgtttgtagaggcgaacggaaatttaacggtatacaaaaagccaaataaaatggaaatcacagctgaagatatgggaattcaaaaaagcagcggcgaattttcatatccggtcatcgttgacggaaaagtgtacacgtctgtccttcagcaattgaatgtaacagaaagctggctcaaaaaccagctgaagaagaaagggcttgaacgaatggatgaaatctttttcgcttcggttaatcaaaaccatgaactgcatgtttcgctcgataatcaaacgacgaaaattgagccggagcttttgcattaa

SEQ ID NO: 349 - DNA, 711 bp, Bacillus licheniformis
atgaaattaagcagcaaactcatccttggattaacggtttcatcactcgccggcaagtttcttgaaaagttgctgattcaagataatgtcagccccaatatcacggcgtcatttaatcaagaagcagatattccggacattgatgcgtcctcttacatccatcatttcgcctcggtcatcggcagtgtggtcatcgggcgcaacgttttcatcgggcctttctcttcgatcagaggagacgtgggattaaaaatcttcatcagccatgactgcaatatccaggacggagttgtcttgcacggattgaaaaactatgaatacaacagccctgttactgaacattccgtttttaaggatcgtgaatcgtattccatttacataggcgagaaagtatcactcgccccgcaatgtcaaatttacggccccgttcgaattgacaaaaatgtttttgtcgggatgcaaagccttgtttttgatgcctatatccaggaggatacggtgatcgaaccgggagcaaaaataatcggtgttacaatccccccaaaacgatttgtctcggcgggtcgtgtgatttcaaaccaggaagatgccaaccggctgccagaaataaccgattcctatccatatcatgatctcaactccaaaatgacatccgtcaaccttgaattggcaaaaggctacaaaaaggaagaaagacaatggaaactgtga

SEQ ID NO: 350 - DNA, 237 bp, Bacillus licheniformis
atgacctgcctcctttattcaggtagtctgcctaaaaaacgggaatattatttaataaaagcgcggcggcggtctgaaaccaaaaaagaggatatggaggagacaacggctaataaagcaatggagtatgtttcactaatcaattggtgcgggaattttgggaaaaccgatgaaaacgggatcgcccgttttaacaaacacacggaaacgattgccctgaggatctattttaaatga

SEQ ID NO: 351 - DNA, 399 bp, Bacillus licheniformis
atgaatatgaaaagaagcctgataggccggcttgcgctgacattcgcagcaatggcggcggggcttgcttcaagaaagacggccgatatgctgccggacatcgtgaatgtatatttaggggatgcgctgtgggcgctgatgattttcttcggcgcaggctttctgttcaaaaacgcgaagacggcttccgcggcgctgatcgcgctggtgttttgttttttgatcgaatgcagccagctgtatcacgctccatggattgacaatatcagagccgctccgctcggagggctcattctcggttatggatttctgtggagcgatttattggcttatgtgctcggcgtttccgcaggcgccgcgggcgaaatgctgttccgcaaacgaaaaagacaaccgtaa

SEQ ID NO: 352 - DNA, 1431 bp, Bacillus licheniformis
atgcagcaattccttcaagaagtcattggtgtcacaaatgattttctttggtcaaaactattgattattatgcttcttgcttcgggactgttttttacttttaaatctaagttctttcaagttcgcttgctgaaagacatgttccgtgttttaaaggaaggaacgcccgacaaaaacggaatttcgccttttcaggctttttgcatcagcatggccgcgagagtaggaacaggaaatattacggggattgcgatcgccattgccttgggcggacccggcgctatcttttggatgtggatcatcgccatcatcggttcggcgtcaagctttgtcgaaagcacgctggcgcaaatttataaaataaaggataaagacggcttccgcggcggccctgcttactatatggaaaagggcttgaaaaaacgctggatgggcgcggtttttgccgtcttgatcacattgtccttcgggatcgtgtttaacgcggtccagtccaatacaataacggtcgcttttgaaaactcgttcgggacagaccgtctcacactgggaattatcatcacgattgttttcggcatcattacattcgggggaatcaaacggatcgccaagctgtccgaatatatcgtcgtatgcctggccgtcttatatatcggcgtcgccgttttcgtcatgctgatgaatattacgaaactgccggacgtcatctctttgattatcggtcatgcgtttggccttgaacaagcggcgggcggagccatcggcgcggccctgatgaacgggatcaaacgcggcctcttctcgaatgaagccgggatgggcagcgcgccgaatgccgcagccgcagccactacgagccaccctgtcaaacagggccttgtccaggctttaggagtctttacgagcactttggtgatttgttcaagcacggcttttatcattttgttttccgatgcgtataaagagccggggcttagcggaatcgagttgacgcaagcgtcgctcagcacgcacatcggagcatgggcctcaggctttctcgccattatggtgttcctgttttctttcagcaccttgatcggaaactactactacggcgagacgaatatcgaattcctgcacacgaacaaagcatggctcttcatttaccggatctgtgtgcttgcgatggtcatcttcggatcggtatcaaaagtccagcttgtgtgggacctcgccgatttgttcatgggcctgatggtcatcgtcaacctgattgcgattttcctgctgtcaaaagtggcatttgccgccttgaaagactatgtgaaacagcgcaaagcgggcaaagacccggtcttttataaagatgtcattaaaaaccatgaaggcatcgaatgctgggagcactccggcaccgaacaaaaatccgaaagaaaaaatgcgatataa

SEQ ID NO: 353 - DNA, 984 bp, Bacillus licheniformis
atgaatgaagtattggaagaacgctatgacgcccgcttctggcaatcccgccttgaagatttggtcgaacattaccgtcctttttcctcaagcggacgcaacgccgaatacattcccgctttaggaaaaatcgactctaaccagctcggcatctgtgtgatcggctctgatcaaacgatgatcaaagcaggaaattcggacgtatcattcacactccagagcatctcgaaggtgatcagctttatcgcagcgtgtttgacgaaagggatttcttacgtattagaccgtgttgatgtagaaccgacgggagacgcgttcaattcaatcatccgccttgaaatgcacaagccgggaaagccgtttaacccgatgatcaacgccggagcgctgaccgtttcgtcgatccttcccggtgaatcggcactgggaaaaatggagtcgcttcatgacgtcattgaaaaaatgattggaaaacggcttgagatcaatgaggaagtctttcggtcagagtggcagaccgcccatcggaacagagcattggcccattatttaaaggaaaccggcttcctcgaagcagacgttgaagaaacgcttgaagtctatctgaaacaatgctctatggaaggaagcactgaagacatcgccttgatcggcatgattcttgcaaatgacggataccatcctttccgccgtgaacatgtcattccgaaggatgtcgcgcggctgacaaaagctttaatgctgacgtgcggaatgtataatgcatcaggaaaattcgcggcctttgtcggcattccggcaaaaagcggcgtctccggcggaatcatgtgcgcggtgcccgccagcgtgaaaagagaacagccttttcagcacggatgcggcatcggcatctatggtccggcgattgacgattacggaaacagcatgacgggcggaatgcttttaaaacatatagcccgtgaatgggatctcagtattttttaa

SEQ ID NO: 354 - DNA, 117 bp, Bacillus licheniformis
atggcggcagaaggcaaaggggtaaaagcctgtgccgcacaagttgttttaaagcctgttctttcctgggaaaaaggggtttggattgcacaagggagtgagttgcggaaaatataa

SEQ ID NO: 355 - DNA, 1329 bp, Bacillus licheniformis
atgatgggtggaaatcggggaagcgtgatgacaaaagcggcccggcttgttaaaaaagacggctatatcttaatggtgatgatgttaactgtgccgctggcaggagagctgaagttttatccgctgaacgagaccttcagggtcagcttcggggttccgactttcttctttcttttgctgctgctgcggaatgtgccggctgtgctgtccggctttttaacgggggcggcagtcgtcggatttcgtgtgctgcttgatggatttgggccggggcagatcgattggctgtcatccttttactaccattatccgacttttttcttttatttcacatatgcgtttctattctacttggcaaaagtgaaacgatttcaatttcgcccgctctacatcgggtttctcggcttcggaatcgaactgattgccgatggagccgaactggccgttcaatatatgatgttcgagtctaccgtcaccccgggaaaaatccgcgacatgatggcgattgctttttcccacagctttattgtgctgagcttttttaatgtcatgaagctgtatgaaacgcaatcgcgggaaaagcagatccgcgaacaaaatgagcacatgctgatgatcgtttcaaacttatatgaagaaaccgttcatttgaaaaagacgttgaagaatactgaagagattacaaacgagtcctatcagctgtacaggctcttaaatagacagagcgataacaattcctccgtccggcagatcagccagaaagtgctgcgcctcgccggtgaaatccatgaggtcaaaaaagacaatcagcgcattttcgccggactttcaaaattaatttccaaagaaagcttcagagactacatggctgcagaggatctggtccggcttgtgaccggcataaatcgaaagtatgctgaatcgctcgaaaaagacattgactttcattattcgatagacggagaacatccgaaataccatgtgtataccgtattatccgtaattaataatattatggcgaacgcggtggaagcgattcaaaagcagggctccatcagactcagcctctataggcgcggcgatgacatgctggaatgccgcgtggaagatgacggaccgggcattcccgagaaagtcggagatgtggtgtttgagccgggatacacgtcaaaatatgatgaattcggaactccttcaaccggaatcggtctgtcttatgtgaaggaaactgtcgaggagcttggagggagcattcgattccggaatgatgcaagcggtgttgtgtttacgatcagacttccggttcaacaattgattcagaaagggtga

SEQ ID NO: 356 - DNA, 936 bp, Bacillus licheniformis
gtgcgtttttttattgcagatgatgaccgtgctgtgcgatcgattttaaaacaaatcattgaagacgaagatttgggtgaagtggccggagaagcggaagacggctgcgatttggaaggacacgtcctgaatttgcagcaaattgatattttatttgtcgatcttttaatgccgctccgcgacggaattgaaacggttcgtcatttgcacggcgttttctcagggaagatcatcatgatctcccaggtggaatcaaaggaaatgatcggtgaagcctattccctggggatcgaatattatatacataaaccgattaaccgcattgaaatcttgaatgtcattcaaaaagtcaaggagcgcatcgagctggaacggtcgatccatgacatacaatcttcgctgaaccggcttgtgagcctcggcggcggggggaaaaacggctttagggaaaaaagcattcaggaaacgggcgaatttctcctgtctgaactcggaatcgtcggggagagcggatcccaggatttaatcgccatccttcagtatttgtttgatgatgaacagacctcattatatgaaaaggactttccgccgctcaaacagatttttcatcagattgccgtgcaaaagctcggaccggctgcttcacccgcagagatcaacagggaggttaaagcgtctgagcagcggatacggcgggcggtcagccattcgctaaaccattttgcatcactcggtttaacagacttttcaaatccgcggtttgaaagctatgcgtcccggttttttgactttaccgtcatcagcaaaaaaatgaaagaactgcagaaagactctgccgccgtcttgccctccgcccgcgtcaacacgaaaaaattcattcaggttttctttttggaagccaagcggttgagtgaaagcgctggaaaaagaggttaa

SEQ ID NO: 357 - DNA, 537 bp, Bacillus licheniformis
atggaaaccctttatacagaaagattgactttgagaaagatggaattggaggatgcagatgtcctctgtcaatactggtcagacccggaagtcacaaaatatatgaatatcgcgccttttacagacgtctcacaagcgcgggacatgatccaaatgatcaatgatttaagccttgaagggcaggcaaaccgcttttcgattattgcaaaggaaacgggtgaagtcatcgggacatgcggctttaatatgatcgaccaggaaaacggcagagctgaaatcggctatgacttaggaagaaatcattggggaaaaggctttgcttccgaagctgtcaaaaaactgatcgactacggctttacaagcttgaacctcaaccgaatcgaagcgaaggtagagcccgaaaacacgccttcaatcaaacttctcaacccgttatcctttcaaaaggaaggactgttaagagaatacgagaaagcaaaaggaagactgattgacgtatacatgttttcactgctgaaaagagaatacgctgggtaa

SEQ ID NO: 358 - DNA, 1800 bp, Bacillus licheniformis
atgagcagttctttctttattccctttttggttagtcaaattctattgtctctgtttttttctctcatcatactcataaaaaaactgctgaaggctcaaatcactgtaggcacccactatcatcttagcgtgatttctcttttggcattgatcgctccttttctcccctttcattatctaaaaagcaatcattttgactggattctgaatttaggaggagctagctcaacgctatctcacacccgttccacagataagacggcggaagcaattggccaacatgcaaactgggtgcaggatttttcgatgtcgattgaacaatcgtccttcaaaatgatagattcagcctttttcgcagtctggatattgggcattgctgttatgcttatcgctactctttatagcaatcgaaaaatcggcaaaataaaaaagagcctgcaaatggttaacaacaaagagctattaaccctttttcgtacatgtaaagaggaaatacgctttcatcaaaaagtgattttaggctgttccccattgataaaatcccccataacatttggggttgtccgtccatatattatcttgccaaaggatatttcaatgttttctgccgacgagatgaaatgtcttttgcttcatgaactgtaccattgtaaacgaaaagatatgctcatcaactattttctttgcctgtccaaaatcgtctattggtttaatcctctcgtgtggtatttatcaaaggaagcaaaaacagagatggagatttcttgcgactttgccgtattaaaaacgcttgataaaaaattgcatctcaaatatggcgaggtgattttaaaattcacttcacttaagcaaagaacgtcatctttggtagccgcttctgaattcagcagctcatacaaacatatcaaaaggcggattgtcacagttgtcaacttcaaggcggcatcacctttgctaaaggtgaaaagcgccttagtgttcgcccttgttcttggaatcattctagccggcactccttctgtatctatattggctatgcaaagagatacgcactttttatctggtgcaaatgtagaatacgaagatgacagcaccttttttgatggcttctcaggaggttttgtcctgtttgattctaacaggaaaaagtatacaatatacaataggaaagaaagcaccgccagattcgcacctgcttctacatacaaggtgttcagcgcattgctcgcactggaatccgggatcatcacgaagaacaattctcaaatgacgtgggacggtactcaatatccgtataaagaatggaatcaagaccaggatttattctctgcgatgagcagctccgcaacatggtattttcaaaaactggaccggcaaattggagaggatcatttgcgtcgctatctcaaatctatccattatggaaatgaggatttctcaggtccggcgaattattggctggatggctctcttcaaatttcccctcttgaacaggttaatatgttaaaaaagttttatgataacgaatttgattttaaacagtctaatattcaaactgtgaaagattcgatacgtttagaagaatcaaatggcagaattctatccggtaaaaccgggacttcagttatcaacggagaacttcatgccggctggtttgtcggatatgtagaaactgccgaaaatacttttttctttgctgttcatattcaaggtgaaaaacgggctgccggaagcactgctgccgagattgcactttccatcttggataaaaaagggatttatccatccgcttcccgataa

SEQ ID NO: 359 - DNA, 387 bp, Bacillus licheniformis
atgaaaaaaatacctcaaatctctgatgcggaattagaagtgatgaaagtcatctggaagcattcttcgatcaatacccatgaggtgattaaagagttgtccaaaaccagtacatggagccctaaaaccatccaaaccatgctgctgcgcctcattaaaaaaggagcattaaaccaccataaagaaggccgggttttcgtttatacgccaaatatagacgaaaatgattatatagaagtgaaaagtcacagttttttaaaccggttttacaatggcactcttaattcgatggtattaaactttttggagaatgatcagctgtcaggtgaagaaattaatgagttgtatcaaatactagaagaacataagaacataaagaaggaatga

SEQ ID NO: 360 - DNA, 123 bp, Bacillus licheniformis
atgaatgccgacagaatgatgacctcgtttaaaccggtgacaaatgaatggctgggggcatcatcttcgagtgatggaataaaaaaaggaaaaaaacattttatgtcactccagttaaattga

SEQ ID NO: 361 - DNA, 120 bp, Bacillus licheniformis
ttgctgccgcatcctgcaagtgcgacgcaagagaaaagcaacacagctgcaacttttttcagttttaaagtactgaaccataatttcatcaaaatcgtctccctccgtatgaatatttga

SEQ ID NO: 362 - DNA, 924 bp, Bacillus licheniformis
atgaaattatggttcagtactttaaaactgaaaaaagttgcagctgtgttgcttttctcttgcgtcgcacttgcaggatgcggcagcaatcactcgaatgcctcacattctgccgagaaagatgaaaagacggagatgaaagatgattttgcaaaactcgaggagcaatttgatgcaaaactcgggatctttgcattagatactggtacaaaccgaacggtaacgtatcggccggatgagcgcttcgcttttgcatcgacgattaaggctttaaccgtaggcgtgcttttacaacagaaatcaatagaagatctgaaccagagaataacatatacacgtgatgatcttgtaaactacaacccgattacggaaaagcatgttgatacgggaatgacgcttaaagagcttgcggatgcttcgcttcgatatagtgacaatacggcacagaacctcattcttaaacaaattggcggacctgaaagtttgaaaaaggaactgaggaagattggtgatgaggttacaaatcctgaacgattcgaaccggagttaaatgaagtgaatccgggagaaactcaggataccagtacagcaagagcacttgcgacaagccttcaagcttttgctcttgaagataaacttccaagtgaaaaacgcgagcttttaatcgattggatgaaacgaaataccaccggggacgccttaatccgcgccggtgtgccggaaggctgggaagtggctgataaaactggagcgggatcatatggaacccggaacgacattgccatcatttggccgccaaaaggagatcctgtagttctcgcagtattatccagccgggataaaaaggatgccaagtatgatgataagcttattgcagaggcaacaaaagtggtagtgaaagccttaaacatggaaagcaaataa

SEQ ID NO: 363 - DNA, 135 bp, Bacillus licheniformis
ttgtcgcaaatcaatccaatcgcctatgatttcgacaaaaacccggtcgtttcccgcagaccgattctcccgtttttcttcacattatctttaaagagagaaaacaaaaaagcccacaccattgccagacaatga

SEQ ID NO: 364 - DNA, 1752 bp, Bacillus licheniformis
atgacacatgaaggaccgctggaggaatggatgaaaaaactgagcgaggaaagcctcaaggacaatacgtttgaccgccgccgctttattcaaggggccggcaaaatagccgggctttcgctcggacttgcgatcgcgcaatcgatgggggcaatggaagtcaatgcagcaccgaggttctccgaatatccgtttacacttggcgttgcatcgggagatccgctttctgacagcgtcgtattgtggacaaggctggcgcccgatccgctaaacgggggcgggatgccaaatgaagctgtatccgtgaaatgggagctcgcagaagacgaacgcttccgccgtgtcgtcaaacggggaaccgaaaaagcaacacctcaccttgcacattcggtacatgccgaggtatccgggctgaaaccgaatcatgtatactattaccgctttaaatgcggcaaccagctgagtcctgtcggcaagacaaagacgcttccggcgcccggggcagatgttgctaaattcacattcgcttttgcttcatgccagcagtacgaacacggctattataccgcctatcagcatatggcaaaggaaaagctcgatcttgtttttcatctcggcgactatatttatgagtacggtccgaatgaatatgtttcgaaaacaggaaatgtcagaacacacagcggtcctgaaatcatgtcactgctcgattaccgaaaccgtcatgcccaataccgttcagatgcaaacctgaaagctgcgcatgccgccttcccgtgggttgtcacatgggacgaccatgaagtggagaacaactatgcgaatgtcatcccggaaaaaggccagtcagttgaagcgtttattaaacggcgcgccgccgcataccaagcttattacgagcatatgccgctccgccgccaatccttgccgaacggtcctgatatgcaattgtaccggaatttttcctacggcaatttagctgacattagcgtgctggatacccgtcagtatcgcgatgaccaggctaacggcgatggcaataagccgccttctgatgaatcgaatgatccgaagcggacgctgcttggagcggagcaggaggcttggctgtttgacaatctgagtcgctccgaggcgcactggaacattatcgcacagcagattttctttgcgcagtggaactttgggacaagcgcggcgccgatttacagcatggattcgtgggacggatatcccgctcagcgcaagcgggtgatcgacttcatcaaatctcaaaaactgaacaacatcgtcgtccttaccggtgatgtgcatgccagctgggcaaataatctgctcgttgattttgacaatccgaaatcggacatctttggcgtggagttcgtcgggacgtcgattacatcgggaggaaacggcgctgataaaagagcggatacggataagattttatcgaacaatcctcatataaagtttttcaatgattaccgcggctatgtgcgctgtacggtcaccccggaagaatggcggacagattaccgcgtcgtcccgtatgtgacagagccgggtgcggcggtttcgacaagagcttcctatgtttatcataaagactacacagggctgaaacggaccgcttccaacattgtgcctggaggcgtgaagaagtcaaacgaagtagaagaagaccgtttcctcgcacatacaagggcccatcagaagcaagtgaagcaaaaggagaaaaaagtaacccagtaa

SEQ ID NO: 365 - DNA, 213 bp, Bacillus licheniformis
atgctttcaaatatcggtattcctggtctcatcttggttctggtaattgcgctgatcattttcgggccttcaaagctcccggaaatcggccgggcttttggaaaaacgctgaccgaattcaaaagcgcgacaaagtctttagtctctgccgatgacaatgagatcggacaggggtctgatgcgaagaagcaaagcgatccatcggcacgatga

SEQ ID NO: 366 - DNA, 735 bp, Bacillus licheniformis
gtgaaaaaaagggaaacacatttgattgcccatcttgaagagctgcgccagcgaatcattaaaacgcttcttacgtttattctgtttctcatcaacggcttcttgtttgttcaggacatctatgactggctgatcagagaccttgatgaaaagcttgctgtactggggccgggggatattctttgggtttatatgatgattgcgggggtgctggcgatcgcagccaccataccggtggctgcttttcagacatggcggtttgtggcgcctgcgctgaccgaccacgaacggaggacggcattattttatattccggggctgttcattttttttattttggggattgtattcggttattttgtactctttccgctcgttcttcagtttttgatcggcctgtccgccggccattttcaaacgatgtttacggcggagcattattttcgctttatgatgaacctcacactgccattcgggtttttgtttgaaatgcccctcatcgtgatgtttttaacgagcctcgggattttaaatccggccaagctcagtaaaatgagaaaaatttcttattttgcgctgattgtcgtatcggttgtgatcacgccgcccgatttcatctcggatgtgctggtgatcgtcccgctccttgtattatacgaattgagcatctctttatcggcatttatctaccggaaaaaaaccgccgcacaacaaggggctgaggcccaaggctga

SEQ ID NO: 367 - DNA, 123 bp, Bacillus licheniformis
ttgcctgaaatgaaaaaatcagaaaataatgatattgacaatttgtttatttgtcttacaattaaacaaaaagatgaatggagggatttactaaaacagagacatcgtatttcaacagaatga

SEQ ID NO: 368 - DNA, 927 bp, Bacillus licheniformis
atgagtcaattacggaaggcgccggaaggcatattgggttttccggtggcgcccttcaacagggaaggaaaactggaggaagaagcactttacgaaaacatccgctttttattggatgaagggcttgaggcggtttttatcgcttgcggctcaggagagtttcaatctctcagcacaaaggaatatgagcaaatggtcgaaatcgccgtttcggctgcggacgggaaggtgcctgtttacacaggagtgggcggcaacttaagcaccgctttggaatgggcgcggatttccgaggaaaaaggggccgacggctatctgattctcccgccgtacttgatacacggagagcaggaaggcctctatcaatacacgaaaacaatcattgaaagcacggatttaaacgcaatcatttatcagcgagacaatgcggttttgacgcttgaacagattcagcggctgaccgatctcgagcagcttgtcggacttaaagacggcataggggatatggcgttgaatatcagtttgtcatatacgataggtgacaggctgggctggctcaacggaatgccgatggctgaagtcacgatgccggcctatgctccgattggctttacatcatattcttcggcgatatccaattatattccccatatttccagaatgttttacgaggcattattaaacggcaatgaccggcttgtcaaagagatttatgagcaagtcatcataccgatcaacgagatccgcaaacttcggaaaggctatgccgtgtccttgatcaaagccggcatggaaatcatggggcttcatgtgaaaaacacggcgagaccgccgatcgttccggtggaaaaagaacattgccggcagctcgaaaacattctgaaaaacgcgatggcgcgttatccgaaaacgaccgctgccctataa

SEQ ID NO: 369 - DNA, 1467 bp, Bacillus licheniformis
atgtctgttgcagctgaaagtaaaacgtatttcaactttatcaacggccgctgggtgaaggctgaatcgggcgggatggaacagagcttgaatccggcagatacacgggatatcgtcgggcttgtgcaaaaatcttcgattgaggatgtagaccgggcagttgaagcggccaagcaggccaaaaaggcgtggagaaagctgtcgggcgcggagcgcggtcaattcctttacaaggccgctgacatcatggaacagcgcctcgatgaaattgccgaatgtgcgacgcgtgaaatgggcaaaacactgcctgaagcaaaaggcgaaacagcgcggggaatcgcgattctcagatactatgccggagaggggctgcggaaaacaggtgatgtgattccgtcgaccgattcatccgcttttatgtacacagacagggtgccgctcggcgtcgtcggcgtcatctcaccgtggaatttccctgttgccatcccgatttggaaaatggcgcctgctcttatttatggaaatacggttgtcattaagccggctacggaaaccgcagtcacctgccttaaggttatatcgtgctttgaagaagcagggattccctcaggcgtggtcaatgcggtgacaggaccgggatcatcggccggccaaaggcttgccgagcacccggatgtgaacggaattacgttcacaggatcgaatcaaacaggaaaaatcatcggccggacggcgtttgaaagaggggcgaagtaccagcttgagatgggcggcaaaaacccggtgatcgtagcggatgacgccgaccttgatattgcggttgaagcggtcatcagcggagcgttcaggtcgacaggccaaaagtgtacagcgacaagccgcgtcatcgtcttaaatggtgtttatgaccgttttaaagaaaagctgcttcaacagacaaaagagattacaatcggcgacagcttaaaagaagatgtctggatggggccgattgcgaacaaacagcagcttgacaactgcctgtcctatattgcaaaaggaaagcaagaaggcgcggacctcattttcggcggtgagaggctggcagatggaaaatacgaaaacggctattatatcaggccggccatttttgacaacgtcacttccggcatgacgattgcccaagaagaaattttcggcccggtcatcgctttaatcaaggcggatacacttgaggaagcgttggagacggcaaatgacgtcaaatttggcctgagcgcctccatttttacgcaaaacattaggcggatgctgtcattcacagatgaaatcgaagcggggctcattcgcgtcaacgccgaaagcgccggtgtcgaactgcaggcgccattcggaggcgttaaacaatcgagctcgcattcacgggaacagggggaggcagccaaagaattttttacagccgtgaaaaccgtatttgtcaaaccgtaa

SEQ ID NO: 370 - DNA, 1377 bp, Bacillus licheniformis
atgaaaaaaaatcgtgcagcctcccccgataccgcggggaaaagaagttctgtccgctggtttgtcgtgtctatgctgtttctcgtcacatccattaattatgccgaccgtgcgacactttcgatcgtcggcgattctgtgcagcatgagcttgggctgagttcggtggcgatggggtatgtcttttccgcatttggctgggcgtatgttgtcggccaaatccccggaggctggctgctcgaccgttttgggtcgaaaatcgtcatcgccgccagcatcttcttttggtcattgtttacccttttgcagggtgcgcttggctttttcgccgcgggaacggccgtaatccttttatttgcgctcagatttctcgtcggtctgtcagaagccccgtccttccccggcaacggccgggtggtggcttcctggtttccaagttctgaacgcggaacagcttcggcgatcttcaactcggcgcagtacttcgcactcgtcattttttcaccgctgatggggtggctcgcccactctttcagctggcatacggtttttgtcattatgggtgcactggggatcgcgatgtcgttcatttggctgaaaacgatttacgaaccgaaaaaacacccgagaataaacgccgccgaactggcgtacatcgaagaaggcggcgcgcttgtctcgatggatgagggaaagaacgcggaaaaaaaagaaaaggagtcgcaatggccttatattaagcagcttttaagaagccggatgctgctcggggtgtatatcgcccaatactgcatcacaacgctgacctatttctttctgacatggtttccggtctatcttgttcaggcgcgcggcatgtcgatccttgaagcgggttttgtcgcatcgcttcctgcaatctgcggatttttaggaggattgctgggcgggttcgtgtcagacttccttttgaaaaagggctgctccataacggttgccagaaaaacgccgatcatcctcggcatgctgatgtcctgctcaatgatcatatgcaactatgcagattcgtcctggctggtcgtttccatcatgtcgcttgcctttttcggaaaaggattcggcgcgctgggctgggcggttgtgtcagatacctcgccaaaggagtgtgccggcttgagcggcggcatcttcaacacctttggaaacattgcgtccatcacgacgcccatcatcatcggatatatcgtgaatgcgacaggctcatttaacggagcgcttgtgtttgtcggagccaacgcgattgccgcggtattaagctatttgtttctcgtcgggccgatcaagcgcatcgaactgcagaaagagaaagaccctgcggacaccactttatccatgtga

SEQ ID NO: 371 - DNA, 1368 bp, Bacillus licheniformis
atgaatacaaacatccatcagcatgtaaaagaggagaaagcatcgcaaacaccgtctattgccgacatgcgggttatacccgtggcagggcgggacagcatgcttttgaatttgagcggagctcacggcccctttttcacacggaatatcgtgattttaaaggattcatcaggcgctctcggcgtcggcgaagtgccgggcggcgagcggatccgccagacgctggagcaggcgaagccgctcgtcatcgatcagccgctcggcgctgttcaatcgattttgcagtccgtcaggcgccggtttaaagacagggatgccggaggacgcggggtgcagacctttgaccagcggacgacgatacacgctgtgaccgcattggaagcagctttgctcgatttgctcggaaaatttctcggcgtccctgtggcggcgctcttgggggaaggccagcagcgggataaagtgaagatgctcggctatttgttttacatcggggaccgaaagcgcacgacgcttccctatatcagtgaacaagaggcaaatgacgactggttccatctccgccgtgaagaagcgttgactcccgaggcgatcgtccgtcttgcggaggcagcccgagaacgatacggatttcacgattttaaattaaaaggcggcgtcctttccggagaagaagaaatcgaggcggcatccgctttagcgaagcggtttcctaaggcgagaatcacccttgacccgaatggggcgtggtcattggaggaagcgattgcgctttgtaagggaaagcgggatgtacttgcctacgcggaagacccttgcggagcggaagccggatactcaggccgggaaatcatggccgaattccgccgtgcgacaggcattccgacagcgacgaatatgattgcgacagactggcggcaaatggggcatgcgatacagctgcacgccgttgatataccgctggcagatccgcatttttggacgatgcagggatccgtccgcgttgctcaaatgtgccatgaatgggggctgatatggggctctcactccaataaccattttgacgtctcactggccatgttcacccacgttgccgcagcagctccgggcgatatcacggcgattgatacgcattggatatggcaggatggacagcgtctcacaaaacagcctttttcaattgctgacggatatgtccaagttcctgatcagcctgggctcggcattgaaatcgacatggaacgggtggaaaaagcaaatgaactatatgagaaaatgacagcaggcgagcgcaatgatgccgctgccatgcagtttttgattgaaaattggcgtttcgaccctaaacgtccttgtcttgttcgataa

SEQ ID NO: 372 - DNA, 714 bp, Bacillus licheniformis
gtggaagaagatatggaaacattgcaggtcgaatcagtcaatcgcaagactttggcaaaacaggttgttgaacgaatcgtccatttattatcaagcggccagttgaaaccgggggacaaactgccgacggagattgagctcatggaaaagctgaatgtcagcagacccgttctccgcgaagctttaatatcgctcgaaacgctcggaattatcaaaagaaaaacccgggacggcacatattttaatgataaaatcggcattcagccgttttctgtcatgctggctttggcagtcgataatttgccggccattattgaagcgaggatggcgctggagctcgggcttgtcacgatcgccgcagaaaagatcaatgacagtcagctcgaaaggcttcaggaaacgatcgatattatagcaaacagcacggataatcattatggagaagcggataaggaatttcaccggattatcgctttgagcgcgaacaacccggtgcttgaagggatgattcaatcgctcttgatcacacacgccaaaatcgacagccagattccatatagggaaagggaccggactgtcgaatatcatacgaatattttgaaagcccttcaacaaagggacccatatcaagcctatcaccatatgtatgagcatttaaaatttgtacgtgacaaaatactgaatggtcttcgtgatgaaaaaaacaatcattaa

SEQ ID NO: 373 - DNA, 1527 bp, Bacillus licheniformis
atgcttgtcaatcaaactgaaaccccgttgtacattaaggtgaacgaaaaagacaatgccgcaatcatcgccaatgccggcggactgccgcaagggacggtgtttccttgcgggcttaagctgcaagagcggattcctcaagggcataaagtggctttaacagacatcacacagggcggtgccgttattcgctacggcgaaattatcggctatgccgtcaaaccgatcgaaaaaggcgggtggatttccgagtcgcatatcatgcttccggaagctccgccgctcgatgaactgcccatcgccaacaaagttccaaaacccgctccccttcttgaggggtatacatttgaaggataccggaatgaagacgggagcgtcggcacgagaaacgtgcttggcattatgacaagcgttcaatgcgtcgcaggcgttctcgattacgcagtgaaacgaattaaagaggaactgctcccaaaatatccgaacgttgacggtgtcgctgcattaaatcatcagtacggctgcggcgtggcgattaatgcgccggaagccaaaatcccgatccgaacgattcaaaatatcgccaggcaccctaatttcggcggtgaagcgatggtgatcggactcggctgcgagaagctccttccgacgaagatagagccggaaggagacgctgaaaacattctttcactgcaggaacggcaagggtttcagcaaatgatacaatcgattatggaaatggccgaagagcgcttaaaaaggctgaatgaacggaagcggatgacatgtcccgcttcagacctggtgatcggcctacagtgcggaggcagcgacgccttttcaggagtgaccgcaaaccctgcgtccggatatgcggccgacttacttgtccgggcaggggccacggttttattttcggaagtcaccgaagtccgcgatgccgttcatctcctaacaccgcgcgctgtcaatgaagaagtcggccgcgccctgattcgggaaatggcttggtatgaccgctatctggaaagaggcgaatcagaccgaagcgccaatccgtcgccgggaaacaaaaaaggcggactggcaaacgtggtcgagaaatcgctcgggtcgatcgcgaagtcgggaagcagcccgatcagtgccgtacttgcgcccggtgaaagggctgtacagaaaggactcatttttgcggcgacacctgcaagcgattttgtatgcggcaccctgcaattggcttctggcatgcatttgcaggtatttacaaccggaaggggaacgccgtacggccttgaaatggctccggttttgaaagtggcgacccggcagtcattatcagaagattggcacgacttgatcgacgtcaatgccggaaggatcgctacaggcgaagcttcaatagaggaagtcggctgggaaatcttccggacgatacttgacgtcgcaagcggaaggaaaacatgggcggaacattggggactctccaatgacttgtgtttattcaacccagcgcctgtgacttga

SEQ ID NO: 374 - DNA, 682 bp, Bacillus licheniformis
ttgcttattgaagatgatcattcgatcagtgaaatggtcgatcattatttaacaaaagaaggatttgaggtcgtgcttggcttttgacggagaagagggcgttcgcttgtttcagcaaggcaattatgatgcgattctgctcgacatcatgcttcctaagctgaatggaatggattttctgaaaatgatccgtgaacagagcaaagttccggttttaatgatttccgcaaaagacggggatgtcgataaagcgctggggctgggctttggtgcggatgattatattgccaagccgttttcgatgatcgaactgaccgcaagaataaaagccgccattcggcgggcaacgcaatattccgtcagtgaaccggcaaatcaaaaaatattacgtgttcacgagcttacggttgatatagaaaatgtatccgtacaaaaaaatggtgaaccgcttcagctgacatcgacggaatggaaaatgctgactttgtttgtgacaaaccctaaaaaagtgtttacaaaagaacaaatctatcgttcggtttggaatgatgattattttggcgatcaaaatattattaacgttcatatgaggcgcttgagagaaaagatagaggatgatccttcctccccgcaatatattaaaacgctttggggcatcggctataaattaggagagttttag

SEQ ID NO: 375 - DNA, 936 bp, Bacillus licheniformis
atgacaatgttatggattggcattctgataattttggcgtctctcaatatcgttcaatataaaatgaaaagacaacgggatcgaaacttgaagtacatcacggaaaagctcagtgtgatgctaaatgagcatgaggctgatcaaattttattaggaacggctgataaagtactgcgggctctgctcgtgcaaattaacctgtttgttgaggagcatcagcacataacagcccgttttgcaaaaacggagcagtcaatgaaacgaatgctgaccaatatgtcccatgatctgaaaactccgctgaccgtcgtgctcgggtatatcgaggcgatccaaaatgattcagacatggcggaagaggagcgtgaaagactgctggagaagctttatcaaaaaacaggcgaaatcattcagctgatgaattctttctttgacttggccaagctggaatcggaagataagcaaatactgctcactaaaatacatatcaacgaaatatgcagaaaaaacattctccaacactatgatgccgttcaggcaaaaggttttaaagctgtcatcgacatcccggataccccggtttatgcacatggaaatgaagaagcgcttgaccggattttgcaaaaccttttatcaaatgcgattcaatatggtgcagacggaaagctgatcggattgtcccttacatatgatgagacgtggattgtcattacggtatgggaccgtgggaaaggaattagtgagtacgatcagcagcgggtgtttgaaagactgtatacccttgaggaatcgagaaataaagcgttccagggaagcgggctcggtttaacaattacaaaaaggctcattgagaaaatgggagggaacatctctctccaaagcaagccgcatgaacggacagtgttttccattacgttaaaacgaatgacctattag

SEQ ID NO: 376 - DNA, 924 bp, Bacillus licheniformis
ttgacttacatcgtacaaacaagcgggcttaccaagacattcaaaggtcaagaagttgtttcaaatgtaagcatgcatatacgaaagggagaaatatacggttttctcggcccgaacggagccggaaaaacgaccatcatgaagatgctgacgagcctcgtgaaaccgacaagcggcgaaatcaatatccttgggcataagctgacaaatcgatcatacgagattctcgggaaaataggcagcatgatcgaatacccgattttttatgaaaatctgacagccaaagaaaatttaaatctgcattgtgagtatatgggatatcacaataaagccaagattcaggaagtgctggacatggtgaatttaaaaaatatcgacagcaaacctgtcaaaacattttccctcggtatgaagcagcgtcttggaatcgcgcgggccattctcaccaaaccctacttgctcatcttggatgagccgattaatggccttgatcccatcggaattaaagaaatcagaaacttatttcaagtattgagcaaagagtatggcatgacattgctcatctcaagccacatcttgaacgaagtagagcaaattgcagatacaatcggagtgattcgggacggcaggcttgttgaagaagtatcgatggaaagcgtaaggggacggaacacagagtacattgaactcgtgacgccgaaccaattgcatgcttgctttgtgcttgaacatgagctgcagattgctaattttaaaatactaaatgataaaacgatccgaatttatgatgccgaagcttctcaaacagccatttctaaagctctgattttgaatgatgtagaaattgaatccatgaataaaaagcatacttcgcttgaggactacttcctcagcttaatcaacggcaatgcggtcaacgcataa

SEQ ID NO: 377 - DNA, 684 bp, Bacillus licheniformis
ttgctgaatttgatgagaattgaaatgaaaaagctgaagctgggatggtatatacgcggagccgtctttgccaatttcatcatttttggttttctgtggatggtgacctgcacagaaggcaaggagacgttccaaacgattgatgaaacttttctattgatcggcacttttgttagagccgtttttatcgtattcggcgctgtgctgatctcaaaattagtgatttcagagtttaaaaacaagacaatactggtgatgttcacgtatccgatcaatcgaaagaaactgctggctgctaaactgctgatcgcaggcgggctgaccttcgttacgatattgatatcaaacgcatgcgttgcagttggtttttttctgctgaactcaatctatgggatcatccccggcgaattaacagcttctatcgcgtctcagcaggctctgaaaatgatcgtttttgcttttggcgccgcaggaacgagtttagtacccatcttttttggaatgagaaagtactccactgcggcaacgatcatctcatctgttgtaatcatcatgccgatcagttccacaggccctggcttttctatttcttcaattgtgtatatacctttatctcttgccgcagtcggtctgtttttttcctttttggctgtaaggcgtattgaaaaaatagatgttttttaa

SEQ ID NO: 378 - DNA, 674 bp, Bacillus licheniformis
atgctgaatttaattaaattggagtttaaaaaaacaaaattagggtggtattacaaaggtgcagtaattgcaaatctatgtattctcggtttattgtgcctgatcggatcagaggaaaaaacctccctcaagcaaaaatgtcgatggctgatgccgcatccatgctgctatttataggaattttcgtgaggtctgtgtttattgtctttgccggcgtgctgattgccaaactggtcatcggagagtataaaaacagaaccatcacggtcatgtttacatatccagtcagcagaaaaaaactaatggcagcaaaactgctgcttactggcggattgacctttttgacaatgatcgtgtccgaactgattcttgcatttattttctcgcagctcaatgatgtctatcaattcagcccggaaaaattgacgatgcatgacgtagggaatgagattggcagtatgctcatttatgctgcttcctctacaggactgagttttattccattatactttgggatgcgcaaacaatcagttcctgccaccattgtgacatcctgtatcttgaccacgttgatcggtcagcaaagcgatgaattttcacttgcttccatcatttacattccgatttcattggctctagtcggaattgccaatttggtcgatacgaaaaattga

SEQ ID NO: 379 - DNA, 1080 bp, Bacillus licheniformis
atggaatttgaaattcgctacatctccttttacgtcatccaggtcgacggcaaggatgagcaggccaacaagcaatataaacattttcagacgctggatacagaggaatttgaaaacagcgagctgaaggatttcttagacggggaattgaaaaaaatcgtcaagcggaaagccgaacgccatccgaaatcggagcaggtgccgacgaaaatcggccgcttcatcacagagccggggcatgagcttgattctaatccgaactacaatctgtttcacaaaacaaaactggcggagacaaaggaagaattcaatgaactgagcgaacagttcgtccgcacatacctcgacacgagcgccgtcaggggaggcgtgtttttagtggcgacagccgtaccgcgcaaatacttcgatgatacatttgtctttgtcatgaagtgcgactttgaaccgaaggtcgctacgatcgccgatgaatcgtcgctgattcgcaaggtcgaaatggcgattacgacgaaaaacatgaaatcgattcagtacccgcacatgcctgaagagggcatgacagaggaaagcgaagtgaaaatccaccaggcctcgcacgcccgctactttgaagacttcttaaaattcgtcgagtacggcgagtcgatgccggaaatcatgaagtcacaagtgatgaacatggtgcaggagcacgtgtacgaagcatttgaagacaaaagcgaagaactccagcagtttgaacacgacctcgaaatctgggaagcgagcgaaaagcgggagattcaggaacgtcttgatacccaccaagtcatcgaagcctcagctcaaatcgttgagcacatgcctgaggcagagctgaaaatgaagctgggagaaaccgagattaaaggattgctggccgagttcggagactcgatccacctcgccaaagtaaacggccgctatgtggcgctcattgaagccgaaacgatttcgtttgaaaaggggagctctccggtcgagttttataaacctgagggtctgcatgaggtgattgagcggatacggaataaaattgacagggaagatgagaaataa

SEQ ID NO: 380 - DNA, 1185 bp, Bacillus licheniformis
atgcgtctcaatagtcaatacatccgtacacagctgatggtccagaatatattgaaaagaaatgcggctgatacaactttaaaaaatgtctcttccgatatcactgccgttgcgaagaaggccagcagtcaagcaggaagagcatcgaaagaaagtttgagtaagctgaactactcaaaggacagtattgtgaatcatgccggagctttcaggcgggcatacgaagcagcaaatgatcgaactgtcacagatacagggaaagaaacgaagattaatgcccaaaacccctatgtgtcagaaagtgacatcaggaaaaaaatcttagatgaaaaatacagcaaaataaatgcaatgaacaaaacgaaacccgaccctttaggctacattaaggataaatacaaaaaccccaattccccttatttcagaaatgacttgtcggcagcagaaagacaggctgcatatgacaatgaaactgagtggctgttcaaaggaaaggcgcaaagctataatatgcaggatgccgcctttcgaaatgtgacttttaatggggaagtagagacggagaatgagaaagtatatcagcgcagccaagtcaacaaacagcttcaagcgctgctggatcaatatcatattgccattccagcggatgcggcgctcacctttacgattacaccgattgattatcaagtaaaggtaagcggaacagatgatgagcaactcatccatcaaattgaacaaatattgcaatcaggagaaaacagcaaacagttatttctgcatatcatgaaaagcttgagcagcgattcggcacaatattccaaagaagcgcaccaaaaatatcagacggttcgcgagatatatgaggtgacagggtatcacctgaaagatttggaagtggttgatggccgatatgtaacaccttccggccgtgatttattagaagtgtataaagaagagctggagaaggatcccgtcctcaagaaaacggctcatctcgcaatcgctcattatggagcagagctggacaggcttgcggaagccgaatatgattctgttccggatttcatcttgtctattgactacagcaacgggtcattgcgggatacagggcaaaagaagagctatggaaccggggatacggcttggctaagagaattaaagcgccgaacgggtgtgaatgattag

SEQ ID NO: 381 - DNA, 105 bp, Bacillus licheniformis
atggctaataaactgaaggcaagcttcagaaatgctatttttaaaggcaaaaagaggcgctggaatccgcgcctctccctctattactgcataagggctccctaa

SEQ ID NO: 382 - DNA, 912 bp, Bacillus licheniformis
atgacaactgtaaatgagcaaattgaacatacattaaaacttgcggaaaaacacggccttcggctgaaacgaaagcatgcggaaatcaacgagtccggcatggattttcaagtcgtttttgcagaagatgaagcaggtaagagttgggtgttgagaaaaccgcggcgcgacgatgtgattgaaagggcagtgtatgaagggaaagtgctgaagctgctgcaaaaccgtcttcccgcggctgtgccggattggcgcattcatactcccgaactgattgcatatccggagcttccgggtgtgcctgccgcagtcattgacatggacatcaagaattacgtatggaacatggagcatgagcctccggctgaagcgtttaccaggtcattggcgaaaacgctcgcgctattgcacggcatcgatcataaggacgcagaagaagcgggcatgcatgtgatgaatccggatgacgtcaggcagacaaaagcagagcatatggagcggatcaaaagtgagctcggggttagcgccgagctctgggaaagatggcaaaagtggctgtctgacgactcgtattggcctgaacatacggtgtttatccacggcgacttgcaccctccgcatattttgattgaccagcatcagagcataactgggctgttggattggacagaagcaaaaatcgccgacccggctaaagactttctgttataccagacgattttaggagaagccgaaaccgcacggctcatctcttattacgaagaagaaggaggacgcgtctggccgcggatgaaagagcatattaaagaaatgcaggccgcctacggcatcgaaatcggcatgtttgcccttcaaacgaaacaagaagagcacttgaaaatggcgctggacgcgcttggcgtcacacaataa

SEQ ID NO: 383 - DNA, 420 bp, Bacillus licheniformis
atgaatcaccatcggattgaagcgaatctattggaccatgctttcacgaaatatttgcggtcttcaaagaaattagacgaagaaacgattccgaaaagtatcacgagcggcaaagggtttattttgcgtatcatttacagacacggaacatgtacgataaaggaaattttacaggaggtcgcgctgtctccatcagcaacgacaacagctctgaaccatttggagaaagagggtcttgtgatcagatcgagaaataacgatgaccggcgcaccgtctggatcgaactgtcgcaagaaggaacgaggatcgccgcacaaatggtggaaaaccgccaggccttgatcgacaagctcttcggcaaattgtcagaggaagaaaaaaaggctttttttgctgtgattgaaaaagtgatgatgtaa

SEQ ID NO: 384 - DNA, 1512 bp, Bacillus licheniformis
ttgagtacacttcagcaattaatcaatcatcatatggaaacgtcagatgggttggaagcattgtccggaggagatcgaacgtttacgttcaaagcgtatcaccaacgggtgaaccagctggctcattatctgctggaggagggtgttcaaaaaggagaccacatcgcggttttatgtaaaaataatcatcattttcccgtcattttgctggcgtctcttaaaatcggagcgacagtcgtgccgttaagctggcagctgacatcgtatgaattaaaaggaatcttgaacaactgccggccgaaggtgatgttttatgacttggaatttgccgatatactaacgccgctccgcgaacagcttcagttctgcctgatgattgaagcgggtgcgggaatgaacacgactgaacagtttgagagcttatttaaaaacaggccgctgaaggtggaagctgagcaggtgacagagcatgatttggctttaatgctgttcacctcgggcacgacgggaaacccgaaaggctgcatggtcaaccacggcagtctggccgcatacttgacagaggtgaacgtgaaatcgaagcagctgaaaggcacgcgctttttagcgagccacccgctctatcatatgagctcgctcaaccatgtttttcaggcggcttttgaaggaattgccctttatttcttatgggatcccgaaccgtttgaaatcctgcaggagatcgagaagaaacgcattcatatgatgatggcgtttccttccgtctacacctacatgctggaggaaatgaaaagacatccattcgacctgtcatctgtgaaaatgcttgtttccggcggcaccaaggtgccggcgcggctgattaaggagtacaatgaccatggaatcatgatggtgcaggggtacggcagcacagaagcatggacggtcagcgtatggcggcctgacatgggctgggataaagtcacttcagccggcaagccgattccgcaagtcagcataaaaatcgaagaccctgatacacatgaagagctgccgacgggagaagtcggagaagtcgtcgtcaaaagcccgtatgtttttgaagggtattaccaaaatccttccgccacgcaaaaggtgctgaaagacggctggttctatatgggggactccggcaaactcgatgaagacggatttttatatattaccggccggtataaagacgtcattgtctacggaggcgacaacatttatccggaccaagtggaagaaatcatcgatcaagtgcccggagtagttgaatctgccgtcatcggcgtcccggatgaaatgtacggcgaggttccgagggcgtatgtggtgaaaaatgaaagcgccggcctcaagaaggaggacattatcgcgtattgcaaagagcgcctgtccgactataaaattcctgaaatcgtctttatcgacagccttccgaaaaacaggctcggcaaaatcgtcaaaaaagatctgcgtgaactggcagtcaaagggcagtga

SEQ ID NO: 385 - DNA, 1215 bp, Bacillus licheniformis
ttgaaatcgaaatggagtgcaatggtggttattgccggtcttttattgctggccggatgcggtgcactgaaggaggctgatcccccgcgcggcagatcagcgcaaaaaacggaagcctcgttttctgaagctgaacagcgatttgcgctcgccttgtttcaagacatgataaaagaagaagggagccggaaaaacatcttcctctcgccttacagtattcagcaggcacttttgatgacggcaaacggtgccgcgggagacagcagaaaggaactgctcagcactttacatctcagccaggcggatatggcatcgatcaacgggatatcaaaatctgttaatcgttctcttgaaacgctgcctcacggtgaattttcatcagctaattcgatatggaccaaaagggagctgaaagaaagctttcaagacgcgatcaaaggccttggcgacgcctatcagcttcaaattgatcctaatcgggcaacagaggaaatcaacagctgggtcaaaaagaaaacgaaagaccgcatcgatcagatcgttgataaagtctcgtcgaatacgattgcctacatcatcaatgccgtctattttaaagaaagctggaagcacccatttgatcctcacatgacagcggaacagccattttattcagcggacggctccgcaaaaaaacaccccatgatgacgcagacaaaccgctttccttatctggaaaacgaacattttcaagccgtcaagctgccatttcaagacgaaggcctgtcactagccgtttttctgccgaaaaaagcggcaaatctagaacagcttctgactggcatgacgcatgatcaatggcgcgccttgcaaaagggctggacgatgaaacaggtggagctcaagctgccgcgcttctcatttcaaacagactacatgttaaatgaaccgcttaaacgctttggaatgaaaaccgtgtttagcagcgcgaatttttcaaatatgtttaccgggcatggcgccgctcaaattaataaagtcagacataaaacatttatcaaagtggatgaagcgggcactgaagcatccgcggcaacggcggttgaaatcatcgaatcagcccccgtccctgaagtgaccatgactgcagaccacccgttttattttgcgatcgttgatgaagcatccggaatgattctctttttgggcagtgtggcagagccgaaagatgattaa

SEQ ID NO: 386 - DNA, 828 bp, Bacillus licheniformis
atgaaaaaaagtttgtttctgttcgtgttcagtttgtttttgatggcgattccagcattttcggcttcggcgaatgtttacgaagatgagtatgaacccaacaattctttcgctgaggcttacgatgtagggttgtggaaatacaagacgatttcggcgacgattcacagcgaaagcgataaagattattacaaattttacgcgacaaagggagaacagcttgccattcacctaaagaacatcccggcaaatacagattatgatctatatttatttaaagatgcttacggctatcccgcagtaggatcttctgaaagaatgggaaaccaaaatgaaatcatccgcttggatgttcccgagacaggccgatacattgcggtcgtcatgtctaaagacggttcatatgacggctggggattttacagacttgaatttatcgacagaatgaagagcggtgcttatacggcgaatttgtctccgtcatccatctcaagcccgggacagggagtcgtttctccggttgccgccgtcaatcttgccaatgcctcggccattcccgaaggagcgactgtgaaaagcgtttctgccgagggaacgatatatccaagtctcggacacacctacagagaagtcctgaacaaggaagaaggcgtttggcacacatcggtttcaggcggcacactgtttccggatctaaagcctgaacttgcgcttcccgtcaaaacgacatggaatgtgagatactattcgctcgcttggagcagttcaacttggagatcgccgcagctgaagatcaattatcaatacgattcaacatacggctggtaa

SEQ ID NO: 387 - DNA, 828 bp, Bacillus licheniformis
atgaatattagagacagggtaaaactttcgctttattccgagcagctgatgaagccggccgccgcgaatgtgccggcaaagactaaaggctccaaaaggatgcccgccagccaaacagacactctctccatcagcaaacaggctgaatcagcccaaaaaaatgcaccgtcattacggtcacaaatgaacggcgttcaatttgagatctataatctttatgtggacaggcagcgtttgaacagccatatcgaacgggcgctgcgggagagcggaatttccctttccgaaagcgaacatctgacattgcatgttgacggacataaccggattacagttgaaggcatcgaagacgaacaaaaaagaacccgtatcgaagctgttttaaacgacagcgataaacggttcggtgcgcgtctgttgggccacgcagaactgatcggtgaacaaaacggaacgccgctggataaacaggcttacgaaaaatggcatgtgaatgagtttttgaaaacggtcgccgggctgtctttggctgatgtcagtttggatgaaagaggagagcttgaaggcggaaatgagaagctcaccagagtgattgaatcagccaaagacccgaaaagcgacttggagaagagttttcaaaacattctgaagaagctgaagaatgtcctggcgaaagggccggacaccattccggacaggtcggcttctttcggctatgccggcggaacgcttatcgatctcaatgtatcaaaaggattctccgcgggccagctgaacgagtggctggatgatccgtttcttagagaagtcctgctgaacaatttttaa

SEQ ID NO: 388 - DNA, 753 bp, Bacillus licheniformis
atgaaaatgaaagtaaaggaagtggccgatttagtcggcatcagtgtgcgcacactgcatcattatgatgaaatcgggttattagctccgtcggagacaaccgaagccggatatcggctgtattcagatgacgatctggaaaagctgcagcaaatcttatttttcagagagcttgacttccctttaaaaaagattaaaagcattcttgagaacccttcatttgacaagaatgaggcgcttcagctccaccgcaaagcgctgctggagaaaaggagccggcttgaccaaatgattgcgacaatcgataaaacgatccaatttgcgaaaggagaaatcaacatgacaaacgaggaaaaattcgcgggttttgatttcagtcaaaacccgtatgaggaagaagcgcgggaacgctggggagatgaagccgtcgacagatcgaaggcctatatcgaatcgatgtccgaaggtgaacgaaaaaaaatggaacagcaatatgacgccatttacagaaaaatcgccgctctcagagaaggcgcccccgactcagaggaagcacaggcggctataaaggaatggtacgactttctgaacaataacaccggccacagctattcgctggaagctttcaaaggtctaggacaaatgtatgtggctgacaagcgctttacgaaaaacatcgatcaatacggcgccggcttggcgaagttcatgtgcgacgccatgacggtgtttgctgacagaaatcaggaataa

SEQ ID NO: 389 - DNA, 180 bp, Bacillus licheniformis
ttgaatacataccttaccgggattttatttgttttgagcggaattcttttattaaatctagcggttttatcagggataaacggtgtattgtgggggctggttcttgggggcagcatcattttcaatctaataggtgttgtactgctcatgagatatataaatgaaaaacgccatacttaa

SEQ ID NO: 390 - DNA, 327 bp, Bacillus licheniformis
atgaaaaaaacggcggaaaactatctaccgcttacgcaggctacatattacatattattgtcattaactcaaccattacacggctacggcattatgcaaagggttgagagcatgagcgagggagaggtcaaactagggcctggcactctttatggtgcattaagcaaactcgaaaagcaggggttgattaaaaaggaaggcgaaaccggcgataatcggagaaagcagtatattttaacgaatgaaggatgggcggttgttgaactcgaatttaaacgtctgtctaaattggtggcgatcagtcaatctatttttcaaaaagagtga

SEQ ID NO: 391 - DNA, 516 bp, Bacillus licheniformis
atgagtaaaaaaagaaagcgtaaattccgtttttttcttgcctggcaagaccggaaggaagaggactggctgaatgaaatggccaaacaagggtggatgttaaagtcattctttttatttatctatacatttgaaaagacaaaaccaagcaatacagtatatcggctcgactataagacaacatcaaaccttgatcaagaagaatatattcatatttacgaagatgcaggctggaagcatgtgacacagtttttaaattggcattactttgcggctgatccgagtcaagttcaaacaaatgtgatttatacagaccgtgaatctgaagcggaaaaatataatggcttattaaaagtgttatatgctgcacttgccagtgtatttctcagctcgggacttccgattcttatcataggcatcccgggatatttttattggatagcagcattcaatctctttgttttgtgcctgttgatcgtgtgtatattaaaggttcgtaaaaaaacaagaatttga

SEQ ID NO: 392 - DNA, 162 bp, Bacillus licheniformis
atggtgattgcaacggacgatttggaaacgacatgtccaaattgcaatggaagcggaagagaagagccggagccttgtccaaaatgttcgggaaaaggcgtgattttgacggcgcagggcagcacattgctccattttataaaaaaacatctcaacgaataa

SEQ ID NO: 393 - DNA, 945 bp, Bacillus licheniformis
ttgagtcgagcagagaagagtacagctgagcagagcggccatattcaacacggtgttcgaaaagcggccggggtcgtttttatggtctttgggacgatgtgttttgcttcaaaatccatttttgtcaaatgggcttatgaacaaggtgcaaagccggaagcggtgctgttgtaccggcaattatttgcggcgccgctgttttggctgatttttattgtgtatcgctcaaagcttccggctaagcctgaaaaagcggagatttttaaagcttgtgcggccggattgctttgtttttttctatcgccattgcttgattttatcggccttcacggtgtttctgcaaccgttgaacggatgattgtgatgagctaccccatgttcgtattgatcataaccgcctttgtaaataaaaaaatggtctcgggtaaaacgtttgctgccatcttgcttgtgaatgccgggctgttcttggctgtcggcggatgggatgtgcaagcattggaagcgaacctgtcaggggcttttttgatcctattgtccgctgtcgcttatgcggcctatcttgttgtggcgggaggacttgtccgtcaaatcggagggattcgaatgaatgcctatggaatgtcggcagcaagtcttgcgatggccggttatgcgctgcttcgctcgctgagagaacaaccgggaatcgtgctttcttatcctcccgcaatgtatggtttttttatgatcattgcggcggtgacgacggtcattccttttttattcatgctggaaggcatgaagcggataggagcggaacgagtggccgtcatttccatgatcggccccgtcctcaccatcttcggaggtgttttgtttttaaacgaacgtttaactcccgttcagtggctggggtgcttgctagtgcacctgacggttagtctgctggaataccggaaatag

SEQ ID NO: 394 - DNA, 393 bp, Bacillus licheniformis
ttgcaatacgctcgtttttgggttagagcgggtgcatggttgatcgattgcgtattggcggtcgggttacacttttcatccgcatggatattcggcgacggatctcatgaagttgctgcagccgccctgctggtatacgttttgtatccgcttctgatgccgctgacaaagctccagggcacgattggaaaagcaatttttagaattcgtatcgtttctgatgatacgggccgacggattaagctttggcaggctttcgtgcgctacatcgtctcatgggtgcatatctttttcggtctgctgtatttaaccgtcgttttttcaggaacgaaacaagcggtccacgatttcgcggctagaacatatgtcatgaaaacgtccgacactgagtaa

SEQ ID NO: 395 - DNA, 1068 bp, Bacillus licheniformis
gtgggaaaagtaaaaagaaatatgccttgcccctgcggcagcgggctgaaatataaaaaatgctgcggcaaagcagagggagcgtttccggctgtcgcggtgcaagaattgaaacaaatccagaaagacgtcatggaattcgcttttacggaacataaagacacaatcgatcaatttctcaatcagtattcttttctgtcagacctggatcagtctgcgcaaaagatatgtgtttttaacctgggcgtgtggggagtatttgcccgcccgctggcagatggaggattgacgatttttgaagactttttacagaaaaaaggatcttcgattctcagatcgcagacaaaggaagccgttcaatcgtggaaagacctctcccctgcgttgctgcgtgtgaaacatataacagatggcggcattcgctttgaggatgctgtaacgaatgaagagctgaccgtgaggatgaatgtgaaacgggaagggccttttgtaggcgagtacgtgctcggctttccgatcaagatcggaagccataccgagttcttcttgcaattcaccatctatcctgcaaaaatggcggatgctctcaaagacaggctaagcgaggctttgaaccgttttacagaagaaggcgggacgaaagagcagctgatgagagaggatttccatcatgtgttaatgcatctttgccggcaggaagagagtacaccgtctgaacaagtgtccgaagacatcgaatgggccaatgagatggaaaaagaaacagcgctcgtttttgagaaaggtatgcttgacgaaggacattctgaaccatttgtgtcctgggcggtcggcctttggaaatcgtattgtgccaaaaaagcaccggtcatcaaaaaaacagaagcctttgcagctgctttggagtattttatcaatacgatctccaaatcggaaaaatcgatatcccaagcaaagcttgcaaaaaaatacggcgtcagcgcttcgaccgtatcgaatcgttttaaagatattgaagccgtcctgcaggatgaacttgaccatcatcttgagcttatgccatcttaa

SEQ ID NO: 396 - DNA, 717 bp, Bacillus licheniformis
atgagtacaattctactggaaacaaggcatcttcaaaaaaagttcggaagatcgcaagcggtctcagacgtctcattgtcagttgaaaagaacagtatttacggattgcttggaccgaatggagcaggaaaatcaacgactttaaaacttttaaccggaatcttaaacccaactgccggggatattttgtttgaggggcggcaatggaaaaggtccgtattaaaagacatcggttctttaatagaatccccgcctctgtatgataatttaacagcctacgagaatgccaaggtgcatgccgcattattgggccttccagatgcgagaataacagaggtgcttaaaactgttgatatgcatcataccggaaagaaaaaggcggggcagttttctatggggatgaggcagaggctggggatcgccatcgctcttttaaatcgccctaaactactcatacttgatgagcctactaacggtcttgatccgatcggtatacaagagttgagggaactcatcaggtcatttcccgaacaggggatgacggtcattttatcaagccacattttatcggaagtcgagcagatcgcagaccatatcgggattatcagcggagggtatctcggatatcaggggaaaatcaataagggagacgatcttgagcggctttttatggatgttgtcaaatcaacgcgggagaaagagggcggagaaaagtga

SEQ ID NO: 397 - DNA, 759 bp, Bacillus licheniformis
gtgatcggatattatgtaaaagcggaaaacctgaagtttaaaagaacattttcgagaaaaatgatcttcattgtgcctttgattaatatttgcttcgcctttttaatgaatccgggattttttgtagcaggtacgtataattggtggtctgtcatcttaatgccggtcatgatcgccttgctttgtgcacaatcacaccagaaagaaaagaaagcgtcgaattataacggcattttttcttctcctgtagatttgcatcagatttggtatgcaaaaataagcgtcattgcgctctattctttagcatctcaagctgtttttttaggattcatggttgggatgcagtttgtcattcctcaattttcgagcattcatttgacagtcattgccgcgaatctgctgctttggctcacgacactatgggagatccccgtctgtttatggatagcgcgaaagtacgggtttatatctgccgttttgttcaatatgctgggcactatcatattgggcatcatgtcggcatcaagccctttttggtggctgaatccttggagctggccgatcagggtcatgtgcccgacaattggcatccatccaaacggtgtgcctcttgagaatggcgatcctttaacgagctgggcagtcgttcctccggctgttgttctatctgttctgttatttgctattttggcgcgtctgactaggcggtctttttctcctgccgttgatcgcaaatcgataaaacgggaggcggtttaa

SEQ ID NO: 398 - DNA, 771 bp, Bacillus licheniformis
ttgttgttatttttcagatgcctggcggctgattttcaaaaaacaaagcgtacgtcttttatttggcttcacttgagtgttccggttatctgtgcgggtgtttttctgctttatttctataacagacagcccgatccatatcaattatatcgcacgtattttgaagccattgcgattgcattgccgcttctgattggaattgtgtgcggaatgacggcttccttagaggagcaggcaggccgttttcaagtgctgttgggcggcacggctcccaaattaacggcttatttaagcaaagtcacgctgcttctgatcatgaacatttttgcggtattcttggctattggactctacttattggggctcagagctctttttcatgtgccgaacctgccaagctccctttttttagaggctggggcatggctggcagccggaagtgtcacactttatttcatatactttttgatcagctgtacattcggaatgggggcttcgattttagcaggcggggcaggccttttgatgacagcgctgatgaacacgggattgggcgatgtcatttggaaatataatccctgggcatggggaatcaggctgacagggtataaggggattgaccgatttgtccaaattgatccgtctctccgctctgttctagatggggaaatcaagcagggggctttcatcatggtgtttgctataatagctgtattcgctctaagcatcatttggtttatccgctgggaaggaagaaaagcttttgaataa

SEQ ID NO: 399 - DNA, 663 bp, Bacillus licheniformis
gtggcgaaaattttggcagtagatgatgagaaagatattcttgtactcatacaaaatattttgcgccgcgatcagcatcaagttcatacgctaagtcaagttaacaccgaatctctcgacgtgttttcagggtatgatttaattttgcttgatgtgatgatgccggggatggacgggtttgaattatgcgagaaaatccggccgctggtagattgtccgatcctgtttctcaccgctaagacggaggaagaggccatcgttaaaggcctcctgactgggggagacgactatatttcaaaacccttcggcgttcttgagctcagtgcaagagtaaatgcacacctgagaagggaaagaagagagaaatacgagactaaacgggtgatttccggttttttatttcactttgacagcaaagaagtatttattcatgatcaaaagctgaatttaacaaaaaatgaatttaaaatatgtgagctattggctcagcataaaggacgaacctttacaagagaagaaatttatgatcatgtatacgggctggaaggcaatgctttatattcgacgataaccgaatttatccgcacgattcggaaaaaatgcaaagaacacaatagagatccgatcaaaacggtatggggcgtaggatacagatgggaataa

SEQ ID NO: 400 - DNA, 1371 bp, Bacillus licheniformis
atgggaataatccgcaaaaaaaagacactgcgcagagaactgatcaaatatatgctcactttgagcttcagcctgatcgcgatcacggctttatatgttttggtcaatatgataggaatgaatgcagggctgttttatcctgccaactacaatgaaatcgaagctgaaaagcttaagcccaggcttcaatcggctgaacagataacggaagacatgataccggatacaatgctgtacgccatactggacaaaaagtcgaaacaaaagacagcgggaaacatgaaagagacgaatctttcgattgtacggaaaaagatagagagcaggccttatgtcagctttagtcaaaaaggctatatgattatcgaacgcaaagacgagtattgtgtattggagtatcctttgcgcgctgagtttcggtctccactgctgagacggtttctcccgaactatgagctgacaagcatatgcatcatcgttcttcttttaattacggtcgtttttacggtgacaacccgatttgcaaacagattaaaagaacattttcaaactttaaacaccattgccgagcaaattaaaaaacagaatttaaattttactccggagttctcgaatattaaggaatttgatcatgtaatcagttccctgatggacatgaggaatgccctccaagcctccctacgggcgcagtggcatttagagaaaacgaaaaaagaacagatcggcgcattggctcatgatattaaaattccagtgaccatcatcaaaggaaatgcggagttgctgagcttatctccgcaaaatcaagagcagtcggaatatatcagatacatccttgacgcggggcaaaaaatcgaacagtacattgaccaattaatccatctctcaaaaactgaggaagcattacataccgagtacagagaaggcgctgtgaaaacgctagtcgaaagtgttctccatgagactgaagcatatatagggaacaaatcgattgacattgtgttgaaggagcagaaccttgaaggaaaaaaagcagtgtttgacaaacagctgcttcaccgagcgttgatgaacatcatgacgaacgccgcagatcacacaccagaaggcgggagaatcgattttgaagctgtgtgtacggctgatcaattgattttcacaatcactgacagcggaaaagggttttctcaagacggcctgcagaaagctgccgagcttttctatatggaagataaagcccggacatcgaatggtcattacgggatgggacttacctttgcacttcgtgttgttaagcttcatcaaggcgatttggcgattaaaaacagcgaagcaggaggcggacaggtacaagtgaccatccccctctga

SEQ ID NO: 401 - DNA, 885 bp, Bacillus licheniformis
atggatttcaaaacgttaaagacgtttcataaaatcgtggcttgcggaagctttaaccgcgcggctgaagaactgaattatgcgcagtccacggtcacaatgcaaatcaaaaagctcgaggaagacctcggcattcgtttgctcgagagggggaaaacattccgtctgactgaagccggcaggcttttttttgaagaaagcagacatattgtcaaggatatagatcaccttcaacatcatatggccgacttattgcttggcgaagcgggaaatatccgccttggagcggtcgaaccgatcgcgagctgtgaattgccccagattttggggagatttttagcggattatccgaagatccgggtttccgttgatatcgccaactcgtcggcattgggggaacggctggttcaaggaagcctggatcttgccgtctgttcgactccggcaatgggaacagatctttattttgaaccgctttatgctgaagaactcgtagtgctgctccctgagggacaccccgccggaaacaatgaacgcattcatctgaaagatattagggagcaccgcctgctgattacggccaacaattgcacctaccggaagaaagtcgaaatcgcgtttcaagagctgccggggagccaaatgaacacgatggagatcggaagcatgacagctttgaaaaactatgttgccgcaggactcggcgttgccctgattccgaaaagcatcgtttcccctcctcctcccggaacgattgtccggtttatcgacgatgacccgatcagcgtaaccttcggcatcctttgcaaaaccgcggcgtttccgctgaaacaggctgatgcaaagctgtaccaatatttgaaacaggaacttggagaaccgtaa

SEQ ID NO: 402 - DNA, 396 bp, Bacillus licheniformis
atgccatttgtcaggatggatcttttaaaaggaagatcaaaggaagagcttcgccggatcagcagatcagttcaccaggcgatgacggaggcgatcgatgttccggaagacgattattttcaggtcatcacccagcacgatgaggaagagttctttttcgatcctagctatatgaacatcaaacggacgaaggatttgatttatattcacatcacaatgaaagagagaccgatcgaaaaaaagctggctctgtaccaacgcattgcagagcgtttgcaaaaaaacgccggcatccgccaagaggacgtcatgatcattgcagccgaaaacgtgaaagagaactggtcgtttgggaatggaacagcacagcttgcatcagttgaaagggagcgttga

SEQ ID NO: 403 - DNA, 741 bp, Bacillus licheniformis
atggaaatgaaaaataaaacagcccttgtcacaggaggcggcacagggatcggcagagcggtatcgctcgctttggcaaaccgaggggcagcggttgttgtcaactattcgcgttccaaagcggaggctgaagagacggttggaatgattgaaagtcaaggcggccgcgcgctcgcggtgaaagccgatgtttctaagatcagtgaagttcaagacatgtttgatcgggcggtgggcgagttcggtaccgtcgatctgctcgtcaacaatgcaagcatcaccaggcatatcgagcttgatgacttggaaggggcttctgaagaagtctgggatgaactgtatgcggtaaatgtcaaagggatgtttaattgtgcgagagcggcggcaccttttatgaagcgaaataaacaaggcgccatcgtaaatgtcggcagcatcgccgggcttaccggttcaggctcttcgttaccctatgccgtatcaaaagcggcggtccacggtctgacgaaatcattggcgcatgcgcttgctcctgatattagagtcagctgtgtggcaccgggcgcggtatcaacgagatggtgggaggggaatgaagagaaaatgaagcggctcagccaaaagctcccgcttgagcggatagcggaaccggaagatatcgccttgctcatttgtgcgctgctcgaacaagaaacagttacaggccaaatcttaacggctgactgcggtcaaacattatag

SEQ ID NO: 404 - DNA, 2081 bp, Bacillus licheniformis
atgaggcgtttacaatcgttagaagccattgaaaaagtaaaaaacggggattatcatgttttgcgggatgccgaatggctgaagtatctcgttttaactgaagagcaaaatatcaacctggagcggatttcttcgctagagaacatgcctcagaatcccgtttttctttatgttgaacagacgctctccattttggagaaagctgacattcctgagctggaaaaagaaatcattgaagaggttctcatatggagtgaagcggctaagtgcggccagcctcataaaagaaaggaatggcgtgaaaaaggttttcagcttgcgatccataatatcgggtcggcgcagatttatgctgatcgaagacaggcgtacatgccggaacggcaggatattgaagaactcatccatattttgattgtgacgcatggactcgtcggacggtatatccgcggggaaacaaggtatcgccaattcactcctcttatcgattggattgaaacatctgaacttcagcacatcgatatcaggcgggttctatacgtgctgaacaaatgtatcattgaagcggtatcgccggcgctttgggattcgatagaacgagacgtgaaccgggtaatcggccaaatctgcacaggagaaataaagactggccgtttgcggaaaggatcagaaaactgcggggacaagcgctcgattccggtgaagacagcagccggtacgagcggtttttgagggagcattcggcggaagatacgctgagacgcttctttcagcggattgatttatggtatgtggaatccgccttgtcatcattcagttttgaagagtttgtcaaaatctttctgctcgtgcttcgttctgtcaaccctttatcagtcaagcacatcagctttgagccgctgatgaaggacatgtaccgtgattaccagggtgtgaggcatataaatgtttataaaaaacgaattatcgaagcgtgcttaaaagagatgtcgatcagcgatttgctttacggcgaggtgcctgtaaatgaacacgtttcgcttgctgttcagccgtttgatcaggcttctgagattgtcggcgtcacgttttcattttcgcaggcaggactgaagctgattgaattttgccaggaagcggagaaatcgcctttatatgaacgggcgatcgtgctgctttatgatttttttgagtttcgcaaggattcgtttgaccggctgcaaaatgaagcggcttatctgtctgatatgaacggtgctgaagattataaaaagaagattgccgattatgccgttggagaaagaatgctcgacatcggagccggaggcggcgtgatgcttgatttgctgacagaccagcatccagaagcagaggtcatcggaatcgacctttccgtcaatgtcattgaggagctccaaaaaagaaaagtgcgcgaacataagccctggcatgtgaaacaggctgatgcattggacctgcctgagtactttgagcaggaaagcgtcgacaccatcgtattctcatcgatattgcacgaattgttttcatacattccgtatgaagggaaaaaatttaatcatctcgtcattgcccaagcgttaaaaagctcctttgacattctgaagccgggaggcagaatcatcatcagggacggaatcatgaccgaaaacaaagaggaaacgcggcggatacggtttaaagacccggatggaatggatttcttgaagcggtatgtccatgattttaaagggagaaaggtgcaaatgcttgaggctgagaaggacgcggctgtactgtttgtgaatgatgcaatggaattcctctatacatatacatggggagaagaagcctatccgcatgaagtgcaggagcagttcggctattttacgccgtctgaattccgccgctgtatcgagaaagaattaggggaacgtgcgaacattctggtgttcgaacactatgtgcaggaaggatatgaagaacacctttaccctaaaatcgagctgacagaccggctcggccggcgtgtgccgctgccggacagcacttgttttattgtaattgaaaaaaagcacctctag

SEQ ID NO: 405 - DNA, 1077 bp, Bacillus licheniformis
atgcgaagtaaaaagttttttctgatgatgcttttgatgattgtagcagtcgtgtcaacagcctgcggaggcagcaaaagcgcgagcggagagaaagaagatacgaaaaaagcagataatgcagaagttaaaatcctaagctccgaatatacgcttcctgatgattcatcaacaaacctgcacgaaaatgaacttatactaaagatcaatgtttccgtgaaaaatacagggaaagaaccattaatggttgataaaagccaattcagcctttacgaaggcgactcaaaaatgtcggacgtcagcgtatatgatgaaagaaacaaaaggcttcgctcttcgacgctgaattctgacaaagaagtcgacggaaatatctattacatcgttgaaaaaggcaaaaagtttcagcttgaatacacacctgacatgtacggtgaaaataaagccgatcctgtcaaattcgagatcgacggcggcagcgacgatttgctgaaaacggccaaaaaacttgaagatccggcaaaagctttgctggcttacacagacgtaacgattttcggcaaagacaataataactttgataaactggtcgacgaaaacaagcgtgaagtcgttaccgattaccttgaaggcgctcaaaaatctatcgttcgctctttaggatattatgatgaagaagatgtggataaaaagaaattgaataaactgatcagcgccatccaaaacgcctatcaagaaaaatctcaagtcaaagcagttacaaaatcaatttcaggcgatgaagcaactgttgaggcaaccgttacgccaatcgataatacagatgtccaaaagaaagtgaagaaaagactggaagactatgtgaaagacagcggcaaagacttcatgtccagagatgaattgatcaatcctgcgattgacatcatgagtgaagaaatcaaaaaagcagaggcgacttcaagtgagaaaaccgttgaagtcaaacttgaaaaatcaaaaaatgacaaatggaaaattgatgctgataattacaagaccgaacaatacttctcaagcttccttaaaagcaacaactaa

SEQ ID NO: 406 - DNA, 1401 bp, Bacillus licheniformis
atgagcaatggcaccccacagaaaacaaaactgcacttcccacatacttatgctttgatttttttcattatcattttagctgcactggcttcatacttcattccatcaggagaatttaagcgggttgaagaagacggccaaacggttatcgtacaagggagctacaagcagactgacgcaggtccggtcggttttttcgagatgtttaaagccataccggagggcatgattcaatcggcggatattattttttatatctttttaataggcggagcttttggcatcatccatcagaccggtatgattcgcgccggtgtccatgtgctcgtgcagcgcttgaagaaacgcggcttcctcctgatccccgtcaccatgttcgtcttttccatcggaggcgcaacgatcggtttgtctgaagagacgattatttttattccgatcggaatcgctgttgcgagagcgcttggctatgattcaatgacagggctggcgatgatttctctaggcgcggctgcagggttcaccggcggcatgttgaatccgttcacagtcggaattgcacagacaattgcggaagtcccggtgtttagcgccttcggttatagactggccgtttatgccgccatgctcggtttctccattttttatgtcatgcgttatgctcaacaagtcaaagcgcacccgaataccggtttgatgtatggaagcgaaacagagataaatgaagagacagccgcaggacacgctgatctttccttcaccggaagacacggcctcgtcctgctgattacagcattgggcttcggcatcaatatgttcggtgtttttcaatggggatggtttttaagcgagctgtcggccggctttctcatcatcggctttgccgccggtcttgcgggaggacgcggcatcaacaacaccttccattcgtttgtcgacggcatgaaacaggttgtatacggagcgctgatcgtcggcttcgcccgcgccatcgtcatcgtattggaaaacggacatattatcgatacgatcatcaacagccttgcttcagcaatcagctcgcttccgaatgaaatcagcgccatcggcatgttcgccgtacaaatcgcgattaacacgtttattccatccggaagcggacaggcagccacaacgatgccgcttatggcgcctctggccgatttattgggattcgaacgtcagattgccgtattcgcttatcaatacggagatgggatcaccaactcaatcatcccgacctccggcgtattgatggcttcactgtcaatcgcaggcgtcccttatgaacgctgggtcaagtttgtctggaagctgatcgcaggctggattatcatcggcgccgctgcgattgttatcgctatgataattggtattaagtaa

SEQ ID NO: 407 - DNA, 1176 bp, Bacillus licheniformis
atgaaaaaacaaattgagaaagagatcgaaaatattcgtgaagagctgctgcatatcagccagtatataggcaatcatcctgaactggggcacgaagaattcaaagcttcaaagattctgtccgaggagctgaaaaaacacggttttcaggtggaattaggcacatgcggccttgcgacggcgtttacggccgagtttgacagcggccgtcccggtccttccattggatttatggctgaatatgatgcattgcctgaccttggccatgcctgcgggcacaatttgatcggcacgatggcggtcggcgccgcaatcggcgtcagcaaagtgattgcatcgtgcggaggaaaagtgtatgtttacggaactcctgcggaggagacgaaaggcggaaaagtaaccatggccgaacaaggggtttttgatcacttggacgccgctatgatggttcatccgtattgcaggcatgaaaaaagcgggacatcgctggcgatggatgcgatccaattcgaattcttcggaaaggcctcgcatgcggcgggagcacctcacgaaggaatcaatgcgctcgatgccgtcattcagacattcaacggcattaatgcgctcagacagcacattctccctgatgcccggattcacgggattattccggagggagggaaagcggcgaatgttgtgccggattacgcggttgcccagttttacgtcagaggaacggaacgcgcttatgtcaatgaactgctcgataaagtgaaaaattgtgcaaaagcggccgcacttgcgaccggagcccggcttgagagctctttttatgagctgtcttacgatgatttgaaaacaaatgaaacgctgtcagacgcttttacacaaaacatgatcgagttgggcgtcgatccggattcgattcatgaaaaagcggacggaggaggttcggttgatatggggaatgtcagccagatcgcgccttccattcatccttatgtgcaaatttgcgatgagccgtatgcgtgccacacacccgagtttcgtgaagcggccatgagcagccgggggttcgaaggcttgatgctcggcgcaaaatctatggcattcaccgcatatgatgtgctcatcaatgaagagctgctgaaaaaaataaaggaagaattcaaccttttaaaggcgctggcctaa

SEQ ID NO: 408 - DNA, 453 bp, Bacillus licheniformis
atgaacattcggagattgcatccagaacatgagccgccgcttgatttgctgttgacggcagacccttccgaaaaactggttaacgattacctcaaacggggacagtgctatacagccgaaatcgaccgccggattgccggtgtctatgtgctgctgccgacgaggcctgaaacggcagagctcgtcaatatcgccgtcaaagaagatctgcagggaaaaggaatcggcagacaattggttatgcatgcgattgaaacagcgaaagctcaaggatttaagacgattgaaatcggaaccgggaattcaagcatcggtcagctggcgctctatcaaaaatgcggatttagaatcaccggcatcgaccggaactttttcctgagacattacgagaagccgatatacgaaaacggcatgcgctgcatcgatatgatccgcttatcgctcgacctgtaa

SEQ ID NO: 409 - DNA, 1500 bp, Bacillus licheniformis
atgaatatatctgactatgtaaagcatgacgcggttgctttatctaagcttatcaaacatggggaagtaacggtcaacgaattaatcgacgctgctttttcccgtcttgaagaagtcaatccagaactgaatgcagtcattcggacaagaaaagagcaggtcaaaattgaatccaaacagcttgacatcagacaccagccgtttgccggggtgccgattcttttaaaggacatttcccaagcgttgaaaggggagcctctcacagccggcgccaagctgctttcatcttataaaccaaagcgcgattcgaatttcgtcgcgaaattgcgcggcgccggttttttatttctcggacagacgaatacacccgaatacggattaaaaaatatttctgagcctgaattgtatgggccgtcgcgaaatccttggaacactgattattcacccgggggttcaagcggcggttctgcggctgcggtggcggccggaatcgttccacttgcaggggcaagcgacgggggaggctccatccggataccggcttcctttaccggactattcggtctgaaaccgacccggggcagaacgcctgtaggacccggcgccggacggcagtggcagggggcatcgatcgattttgtgctgtcccgtacggtcagggacagcgcggcgctcctggatattctgcaaaccattcagcctgaagccgcttttcaaacgcctttatttccaggtcagtatgaagaggatatgaaaaaagggctggagcgccctttgaaaatcgcattctctgtagaatcacccgtcggaacgcctgtcagcgatgaagccaaacaagccgtccgccgcaccgttcgatggctggaagcgcagggacaccatgtcgaagagcagacgaacggcgttgacggaatccggttaatggagaactactacttaatgaacagcggtgaaatttccgcgatgattcttggaatggaaaaaacgcttggaagagcgatcactgttcaggacgttgaaattgtcacatgggtgctgaatgaagcaggcaaaaaagtgtcggcagccgaatttacagcaagccttgcttcctgggatcgagcagctgcacaaatggcggcgtttcatgagacctatgatctgtatgtgaccccggcaacggcttaccccgctccaaaggtcggcgagctcacccataccgaaaaagaagccgaagcgctcctgaaagtgagtgagctggaaaaaatcgagcagcagtcgctgatttatcaaatgtttttgaaaagcttgacatatacaccattcacacagcttgccaacttaaccggacagcctgcaatgagcgtcccggtccatctgacaaatgaaggtttgccgctgggtgttcaagtgacggctccgaaaggaaaggaacattggctgctgcgcaccgcccatttattagagcaatcagacttatggatcggaatgaaaggaaatccaatgctcggcagtctgtaa

SEQ ID NO: 410 - DNA, 1836 bp, Bacillus licheniformis
ttggaaaaagtggcagaaaaaagaccaaagcgctgtgaggtgccggaggaactgacttggaatcttactgatttattttcttcttatgaagcttgggaagacgcacttgtgaaaattgaggaagatctcgcatccatcggctcatttaaaggaaggctgcatgaaggagccggcgtattgctggattgtttatcgctgcgggagatactgctgaagcgcctagtccgggccgccgcctatactcacctcagaaagtccgaagatttgacaaaccccgtcaaccaagctgatgcttcaaggatggccgcgctgcaagcaaaaataaacgccgggctttcatttatccaatcggaaattcttgaattccccgaaaatcaagtggagacgtacataaaaaacgagaaaggactggagcctttcagcaaaatgctgacggagataatggaactcaagccgtataaacttgctcccgaaacagaggaagcgctagccgttttaggcgaaatacatgatgccccgtacaaaattttcgggatggcgaagcttgcggatatgcaattttccccgattcaggaccgaaacggcaatacactcgccaattcgttcgcgttatatgaaggaaaatacatgttctctcctgatacgcatattcgcagaaccgcattcgactcctttaccaataccctgcaaacatacaaaaacaccatcgccgccatctatgaaacagaggtcaaaaaacaggtcagcatgtcaaggctgcgcggatatgaatccgtcacccatatgcttcttcagccgcaaagcgtcacgctcgaaatgtaccgcaaccagcttgatgtgattaaaaacgaacttgcacctcatatgcgcaagtatgccgccttgaaaaaacgcgtattagacctcgacgaaatgcgcttctgcgatttgcaggctccgctcgatcacgacttcagtccaaagacgacttacgaacaggccggccggatgatcttggacgctttacaagtgatggggccggagtacacggaagtcatggaaaccgccttgactgagcggtgggttgatctcgctgacaatatcggcaaatctacgggcgcgttttgttcaagtccgtacggagcgcatcctttcattttgatgacatggacggatacgatgcgggatgcctttacccttgcccatgaactcggtcatgccggccatttttactttgccaaccgagagcagcgcatcatgaatgtcagaccgtctctatatttcattgaagcgccttctacaatgaacgaaatgcttctcgctcagcatttgttttccaaaacaaatgatccgaaaatgaagcgctgggtcatcaaccagctgatgggcacgtattaccacaatttcgtcacccatctgcttgagggggaatatcagcggagagtctatgagctcgccgaacaggggcacgcacttaccgcttccgtactgtctgagcaaactagcgccgtgctctccgaattctggggcagcggagttaaggttgatgaaggagcaagcttaacatggatgcgtcagccacactattacatggggttatacccttacacctattctgccgggctgacagcatcgacgatcgtctcgcaacagatcaaagaagaaggccgccctgccgtagacagatggctgaacgttttaaaagcaggcggtaccatgaagccgctggacttgttgaaacacgccggtgtcgacatgtcgacagaccagccgatccgccgggctgtgacgtatgtcggaacattggttgacgagcttgaaaaactgtacgataaaaaagaagaccggcctgattaa

SEQ ID NO: 411 - DNA, 270 bp, Bacillus licheniformis
atgtttggttttatttggtcattgatcattggcggaattttgggctggctggccggcctcattatcagacgtgatgtacccggaggaatcattggaaatattattgcgggatttatcggttcatggctcggctcgatgattttggggcgctggggtccggtggtcggcgggtttaatatcataccggccttgatcggggcgatcattttgatcttcatcgtcagcctcgtcatgagaagcatgggcggtcgaaatcgcaatgctcaataa

SEQ ID NO: 412 - DNA, 1716 bp, Bacillus licheniformis
atgaaacagtcattaaaggcattaaaaggctttcgggcattcgccgaagaaaaaatgaaagagtggaacgttcctggagccgcggttgcagtcattaaggaagacgagatcatcatggcggaagggtttggattcagggataaagaacggaaattaaaggtcaacccggaaacggtatttgcgatcggttccgcctccaaggcatttacaacggcggcgatggcggtattggctgatgaagggaaaatggagtgggataagccggtaagggaatatctccctgagtttaagatgcacgatccggtagcaactgaacggatgactccccgtgatctggcgtgccatcgttctggtctcccaagacacgaaatgatgtggtacaattcctccttttcaagggaggagcttttcagacggatccgctaccttgagccgaatcaggattttcgatcaaagtggcagtatcagaacctgatgtatatgacggctggttatcttgctggaagaatagcggggacgacatgggaggatcttgttcatgagcggcttttcaaacctttgcatatgacatccagcagcttttcggtcgaagatatgcaaaagctttccgattttgcctttccatatcaagagaacaacggaacggttgaaaaaataccttttcgtaatatcgatgcgatcgggccggctgggtcgattaattccaatgccgtggatatggcaaattggctgcttcttcagcttggcagcgagaaattcaacggggttttatcagatggaagccttcatgaactgcatacgccttgcatttcctgcgactccattattaaagcgaaggagcttccggtctgcagctatggactcggctggtttgtggaaccgtaccgcggtcgccatatgattcatcatggcggaaatatcgacggcttttcatcgcttgtcgctttcatgccttatgaaaagatcggcattgtcattttgacaaatatgaacggcagctttcttccaaatgttctggcgtacaacatttttgaccgcttgcttggattggaagagatcgattggagcggccggctgaaaggcgaagcggaaaaaataatgaaagccgctttaggagtggatcgaaccgcggatcttaacaaaattgaaggaacgaatccttctcatgccctgaaggactacacaggtgtatatgagcatcccggctacggcgaactcaaaatagagcttaaagactgcgtgttacaggcgctcttcaattcgtttgtgatgcctttgaagcattatcattacaatatattcgagatgaaaatgccgctcacggagatggcgatgctcgcatcattcgacaccgatatacacggacatatcagccgcctttccataccgtttgaaatggcggaaggcgctagagaaatcgaatttgtcaggaagccggatcagcaattgtacgaccctgaatttcttgcttctttaacagggaagtatgcattggaagacggaacagatgtcgttgtgtctctcagaaacaaccggacgctctgggtttcattgcccggtcagcctgattacgaacttgaaccttaccgtgagttgacatttcaaataaaaaatctgccgggattcagcgtccgatttgaagccggcgattccggacaggtaacaggtttgcgcttcatccagccgaatggagaatttcctgctgtccggaaatag

SEQ ID NO: 413 - DNA, 1323 bp, Bacillus licheniformis
atgacgacagctgacgaaagaaaggtcattgaacagcagtttaaacaaagaatggatgaggaagagctgctgaattgcatgcgctgcggcttctgtctgccgtcatgccccacctacatcgaatccggttttcaagaaagccattctccgcgcggacgcatcgcgctcatgaaagcggtcgtcgatgggacgatcgagcctgatgaggatgtcgaacggtcactcgagctttgcctcggctgccgcgcgtgtgaacctgtttgtccgtcaggcgtaaactacggacgcttgcttgaagaagcgagagatattattcagcagaacaaaaagcacgcctttccggttaaagtgcttcgccgcgcagtattcaaagggcttttcccccatccaaacagaatcagggcgctgaccggaatgctcggcttgtatcagcgttccggcatgcaaaacgtgattcgcaaatccggcttgctccggcttttgccggaccacctcgcgaagatggaggcggttttgccgaaggttcctaatatgaaacagctgaaaaaacggccgcacctgctccctgcgatcggggagagaaaaaaacgggctgcctttttctcaggctgtctcatggatacgctgtttttggatacgaatatggcaaccattgagctgctgcggctggctggctgcgagatcataattcccgaacagcagacctgctgcggcgccctccacggacacagcagcgaaaagtctgaggccatcctgctcgcaaaacgaaatattcaggcattcgaggattcaaacgcggactttatcataacaaatgcaggcggatgcggagcttttttaaaggaatatgatcatctcctgaaagatgactccgaatggcgggaacgggcagcatctttcacaggaaaattgaaagacttttcttccgtcttgttggaactgaacttcgatcagcaatcccttgaactgccggagcaaatcgtcacataccaagattcgtgccatttgcgaaatgtcatgaaaacgtccgctgagccgagacgccttattcgcagcatcaagggcattgaattcaaggaaatgaaaaatgccgaaagctgctgtggatcagccggcatttataacattgtcgaatccgaaatgtcgatgaaaattctcgatactaaaatggaagcagcagcagcgacccgggccgctacgatcgttacggctaatcccggatgtctgctgcaaatgaagctcggcattgaacgagcaggacttacagaccgagtgagagccgttcatctggcggatttattactggaagccgtccagaagtga

SEQ ID NO: 414 - DNA, 1413 bp, Bacillus licheniformis
atgatttcctcacaagtgagatccaagctgattgagattgtcggctctgccaattatgacgattcgaacgccggacggctcgtctattcctatgatgcgacaccacagtttcaatcgatgcctgacgcggtcattgccccgcgcagcaaggaagaagtatcgcgaatcgtgaaaatctgcaacacgcaccgcattccgattgtgccgagaggttcaggtacaaacctatgtgccggcacatgcccgactgaaggggggattgtcctcctgtttaagcatatgaatcaaattttagaaatcgatgaagaaaatttaacgataaccgtccagcccggtgtgatcacacttgacttaattcacgccgctgaagaaaaaggattattttatccgcccgatccgagctcaatgaagatctcgacaatcggcgggaatattaacgaaaactcaggcggcctccgcggcttgaaatacggagtgacccgcgattatgtcatggcgctggaaatcgttcttgcaaacggggacatcatccgcaccggcggcaagctggccaaagatgttgccggctatgatttgacgcgtctgttcgtcggttctgaaggaacgctcggcgtcatcactgaagcaacattaaaactcatcccggcacccgaaacaaaaaaaaccgtcctcgctctctatcaagatatcgactctgcagcacaaactgtttcaaatatcattgcacataaaatcattccgacgacactcgaatttctcgaccaacctacgattcaggtgatcgaagacttcgcgaaaatcggccttcccgtccatgccaaagcggttctcctgatcgaacaggacggcaccgaagatgcagttcgccgtgatatcgccgtgattgaagagatttgcaaaaaaggaaatgctgtgtccgttcaaactgcgcaaacagaagctgaagcggaaaatcttcgggaggcccgccgcaccgccctttcggctttagcgcggttaaagccgacgaccattctggaggatgctacggtaccgcgttctgaaattgctgaaatggtaaaagcgattaattcgatcgccgaaaagcaccaaatatcgatttgtacattcgggcacgcaggcgacggcaaccttcatccgacctgtacgacagatgtcagaaacagtgaagaaatgaaacgggtcgaacaggcttttgaagacatctttaaaaaagcggttgaactgggaggaacaattaccggagaacatggggtcggcgaaatgaaagccccctatttggaactgaagctgggcaatgcgggaatcgccgccatgaaggcggtaaaacaggcattggatccaaacaacatcatgaatcccgggaagatatttgcgaaagactcccgcaagcgagtggtggtgacaagatga

SEQ ID NO: 415 - DNA, 150 bp, Bacillus licheniformis
atgtatgatcacatcctttaccaattattatacaaaatcaaacgctttcaaaaaatcattcttttaaacttcaaatataaaaaagaacccgttttcaaaggaaacgaggttctttgcggaaagcatcaggttgcaaggctgattgcttga

SEQ ID NO: 416 - DNA, 303 bp, Bacillus licheniformis
atgaagatcgcacttgtatgttcagccggaatgtctacgagtatattggtaaaaaaaatgcgggaagaagcggaaaaccgttcattgaaggcggaaattaatgcgtatgctgaggcagatttgccaagcgatctggatgaaattgatgtgatactgattggtccgcaggtccggtatttaaaagggcaaatgacagagcgtgccaagccgtatcatacacccgtggccgtcattgaccaaatggcttatggaatgatggacggggcaaaagtgcttaatcaagcaatcagccttgcaacctga

SEQ ID NO: 417 - DNA, 333 bp, Bacillus licheniformis
atggcagatacacttcaattggaacaggtctcatttgaaatcatccttcacgccggaaatgcgcgttcttctgcaatggaagcgttgcagcttgtgaaacatcacgaatgcgaaaccggttatcaaaagatacaagaagcagaatcggagctgaaccaagcgcatcaggcacaaacccgcctcctgcaaaaagaagcacagggcgcaggcctttcacccaatctattattaatccatgctcaggaccatttaatgacagccataactgtaaaagatttggcgaaagaaatgattgatttatatcaagagcttgggaaaggaagagaaaaatga

SEQ ID NO: 418 - DNA, 1287 bp, Bacillus licheniformis
atgaaacaaaataaaatgatggcattcatcgaatcaaacatcatgccgatcgccggaaggatcggttcccaaaggcacctgattgcaatacgcgacggattcatcgccattatgcctcttatcatcatcggttccctcgccatcctggtcaataattttccaataccggcgtttcaaaactttatgaccggtcttttcggcgagggatggacggctgtcggcggagcgatatggaatggctcttttgctctgttgagccttttagccgttgcggctgtcagcttcaagctggccgagtcatatcacacagatggtctgtctgccgcattaatcggggttggcgcattcgccgtgcttacaccgaccactgaagactttggcttctcaatgacttggctgggagcccaaggtctgttcgtcggcttaatcgtggctttgctgtcgacagaagtcttccggctgttttccaaaaatgagaaattgaaaatcaaaatgcctgaaggagtgcctgacggcgtcacaaaatccttgaatgctctattgccggctgccgtcatcttatccactgccgggctatgtaacgctctgatcgttcacttttcggggcaaagcatccatgagcttgttttcagcacgattcaagagccgcttcaaggcctttccaacacggttgggtcagccttgatttttactttcttgaatcatttgctctggttctttggattgcatggaacaaacatcctcgggccgatcatggaatccgtctacctcccgctcattcaggaaaatcagcacttattctcgcaaggaatgagcgcttttgaagtgccgtatattgtgacaaagcctttcttcgattcttacgtatttatggggggatcgggaacaacattggctctgcttgccgccattttaattgccgtgaaatcgaagcactacaaaacgataggaaaggtgtctctcgcacccggcctttttaacatcaatgaacccgttctgttcggccttcctattgtattaaacccgatcatgttcattccgtttatcttgattccattaattttgacgattacatcatatatcgctttggcttccggtctcgtcccgaaaactgtggcgatccttccgtggacgacgcctccgattgtcagcggatatcttgtcaccggaggatcagtccgaggggtctttttgcaaatcttcaacctggtgctggccaccctgctctacctcccgtttataaaagcggctcaacgttccgccttgcaccagacagaaaatgaataa

SEQ ID NO: 419 - DNA, 1335 bp, Bacillus licheniformis
atggcgctgaaagtagttgttataggcggaggttccagctacacaccagaaatcattgaaggcatcatcaaacggcatcatcaatttccagtgaatgagattgtactggttgatatcgaggagggcaaagaaaagcttcgcatcgtctcagaactcgcgaagcgaatgatcagacatgcgggggttcccatcgaactgagccatacaatagatcgggcaaaagcattgaaaggcgccgatttcgtaacggttcaaatcagagtcggcggactgaaggcgagagctttagacgaaaaaattccgctcagccacggcctgatcggccaggaaacaaacggggcgggcggcatgtttaaagctttgcgcacaattccctttatgctggatatcgcccgcgatattcatgagatttgtcccgaagcatggctgattaactttaccaatccggcgggcatcgtgacggaagctttgctgaagcacggacctcatcaaaaggtcgtcggggtatgcaatattccttacaacatgaaaaatagcatcgcagaaattttcggcgtggatgtaaacctcgtcatgattgaattcgcgggcatcaatcattttgttttcggaaaaagagtttggatcgacgggatcgaccggacagaagagacgattgagcttctgttgaatgatcacttcggctactcgccttccaatattgcggcgctgccgtggaatctccaatttttgcggtctttgcgaatgcttccgagcccttatcatcagtactattatcaacatgaagatgcgctcgcaaaagatatcgaagcgtacaataacaaagggacgcgcgcagaaaccgtcatggaagtggagcggcagctgtttgagagatacaaagacgccaagatccatgaaaagcctaaagaactggaaagccgcggcggagcttactatagtgaatcagcctgctcattaatgaactcgctttatcatcattcaatggatattcagaccgtgaacacactgaataaaggaagcataccagaccttccagatgatgcggtgatcgaagtcaacagtgtcattacaaaaagcggaccgattcccctgaccgtcggaaaactgcccgatgccatcagcgggccgatcatcttgatgaaaaaatttgaacaattagtgattgaagctgcggtcaccggcgactacgatacggcatacttagccatgatcaccaatccattggtctcttctgatcacaaagctcaaaaggtgctcgatgaaatgctcgaggctcataaacgttatctcccgcaattttttgaggaggtccgtgcacatgaaacaaaataa

SEQ ID NO: 420 - DNA, 729 bp, Bacillus licheniformis
atggcgaaacaaccacagctccacagtcaaattaaacaagatattgtagataagattgaaagcggttattatccgccgggcagcctgttgccgacggagtccgagttttgcaaaatttatgatgtcagccggacgacgctgcggaccgcgctgaatcatttgcttatggaaggggctatttaccgaaagcagggaaaagggacatttgtcgccaaaggaaaagtaaagcagatcttaagctccagcagcctccgctatgcagaacaattgaaggctcaaggctttaaaccgaaaatcaaggttgttgatttgcaaaaaataaagccgtccgaaaaactccaaacccgtctcggaatcgacgctgaacaaatggtctatcaagtaaaaagaatccgctatgcagacgatgaagaaatccagtttgaaacagcctatatcagaacggatctcgtacccgaagtaacggaagaaatggcgaatatctcactttaccagtgcatcagcaggcagggaaacaacattaaaagaacagaggagcaaatcaagattgtgatttctgatgaggagattgcacaccatttaaatattacacaaggcacgccttgcttccagatatcgacgcaaacatttttggcgtctgaagaggttgtcgagtattctatggcctattttcgcggtgaccgcgttgagttcttcattgaacgcgattatggacaaagggggaaatga

SEQ ID NO: 421 - DNA, 735 bp, Bacillus licheniformis
gtgaaatctctaatcataaatgcagatgattttggattttcaaggggagtcaaccttggcattattgaagctttccagcacggggtcctcacatcgactaccctcatggtcaatatgcaagaagcggatcatgccgtcgaactcgcacggcaaaatccagaactcggagtcgggatccacttgacattgacggccgggcgtccgattcttggcggactgcatacgataacagatgaagaagggaattttcgcaagcttttgtattaccaaggttttttcgacattgatcttgaggaagtatatcgagagtggaaagcgcaaatagagaaggctttgtcctgcggtttaaatccgacacatatcgacagccatcatcatattcatacatacggaaatctccctgaggtgtttgtagaggttgcgaaagagtatgatctgccttgcagaaaggtcaatcatgaccatccttcactgtggaagggtgtaaggtcgaacgatgcttttgagctgaaagtcgaccgattgaaggatctatcgagcttctttaatgattatcaagacgcagctgtgattgaagtgatgtgccatccggcttatgtcgataaatgtctgcttgaaaaatcgtccttccattatcctcgggcatatgaactttcactgctgacggaaccttctctcaaagccgctttacaacactgtccggatattcgcctcacgtcttacgccggtctatga

SEQ ID NO: 422 - DNA, 150 bp, Bacillus licheniformis
atgaaagaaaaaacgaaaaactttttgcttttgttgatcaacacgattttcatctcctttacaagcaattttttggcaagctatgaaactagaactctctttttcctcaccgccttttttgctggttttatatttttccttgtcatctaa

SEQ ID NO: 423 - DNA, 1797 bp, Bacillus licheniformis
atgaaaatcgtgttgatcaacaaaagcaaaaagtttttcgttttttctttcatttttgttatgatgctgagcctctcatttgtgaatggggaagttgcaaaagccgattccggaaaaaactataaaatcatcggctactatccatcatggggtgcttatggaagggattttcaagtttgggatatggacgtttcgaaagtcagcaacattaattatgcctttgctgatatttgctgggagggaaggcatgggaaccctgatccgacaggccccaatcctcaaacgtggtcatgccaggatgaaaacggagtgatcgacgcgccaaatggaacaatcgtgatgggcgatccctggattgacgcacaaaaggcaaatcccggggatgtctgggatgaaccgatccgcggcaactttaaacaattgttgaagctgaaaaagagccaccctcatttgaaaacgttcatatcggtcggggggtggacttggtctaaccgcttttcagatgtcgcggcagatcctgcggcaagggagaatttcgccgcttcggccgttgagtttttaaggaaatacgggtttgacggggtcgatcttgactgggaatatccggtcagcggaggattgccggggaacagcacacgtccggaagataaaagaaactacacgctgctcctgcaagaggtgcgcaaaaaacttgacgctgcagaagcaaaagacggcaaggaatacttgctgacgatcgcatccggcgcaagtcccgattatgtaagcaacactgagctcgataaaatcgctcaaaccgtggattggattaacattatgacctatgactttaatggcggatggcaaagcataagcgcccataatgcaccgctgttctatgatccaaaagcgaaagaagcaggcgttccaaacgctgagacctacaatattgaaaacactgtgaaacgctacaaggaagccggtgtcaagggtgacaaattagtgcttggaacaccgttctacggaaggggctggagcggttgtgaaccaggggggcacggagaatatcagaaatgcggaccggctaaagaagggacatgggaaaagggcgtattcgatttttcagatcttgaaaggaactatgtgaatcaaaacggctataaaaggtattggaacgatcaagcaaaagtgccgtttttgtataatccggaaaatggcaatttcatcacttatgatgatgaacaatcattcggccacaaaacggattttattaaagcaaacggattaagcggagcaatgttctgggatttcagcggcgattccaatcggacgcttctcaataaattggcagccgatttagattttgcaccggacggaggcaatccggagccgccttcatcggcacctgtgaatgtgcgtgtaaccggaaaaactgctacaagtgtcagcctggcgtgggatgcgccgagcagcggagcaaacattgcggaatatgtcgtgtcatttgaaaaccggtcgatatctgtaaaagaaacatcagcggaaataggcggcttgaagccgggtacggcctactcatttactgtttcagcaaaggatgcggatggaaagctccatgccggaccaacggtagaggtcacgacgaattctgaccaagcctgttcatatgacgaatggaaagagacgagcgcatacacaggcggagagcgggttgcatttaacggaaaagtgtatgaagcgaaatggtggacgaaaggcgaccggcctgatcaatccggtgaatggggcgtatggcggctgatcggaggctgcgaataa

SEQ ID NO: 424 - DNA, 2082 bp, Bacillus licheniformis
atgaagaaagccgcttcatcttttttatcttgtatgctgctcctcgcgctttttatcccgaaccggcagatttccgcagagacttcaagcgaaagaccggactgccgtccggaagggctatgggactcgggcgttgaacatgtgccgtattgcgatgtatacgacaaggacggccgtgaaaagctggccaatcagttagaccggagaatcatcggttactttacgagctggcgtacgggaaaaggaaatcaagatcgttatttagtaagcgatatcccctggaagtacttgagccacattaattatgcgtttgcccacatcggggaagatcatcggatttcagtcggagaagaggcagatgagaacaacccgtccatcgggatgacttggccggagcatcccgatgtaaaaatggatcaaaccttgccgtataaggggcattttaaccttatccatcaatataaagatagatacccggatgtgaaggttttggccgctgtcggcggttgggccgaaaccggcggctatgtcgacaaggacggaaagcgaattccaagcggcggcttttactcgatgacaacgaatggagatggatctgtaaaccacaagggtattcacacctttgcggaatcggtcgttgcgtttctcagaaaatatgagatcgatggaatcgatattgactatgagtaccctacatcgatgcaggatgcagggaatccggcagattggaacatcgccaatccgcggcgcaagggattaaataaaagcttcgaggcattgatgaaaacattaagagaaaagcttgatcaagcgtccgctgaagatggaaagtactacatgctgaccattgcagcaccatcctcggcatatttactgagggggatggaaacgtttaagccgcttcgatatgtcgattatgtcaatatcatgtcctacgatcttcatggagcctggaatgagtttgtcggaccgaacgcttctttattcgataacggcgaagatgccgaactcaagcagtccaacatttatactacgccggaatacgaagggatcggatatttaaatacggactgggcttaccattattttagaggggcagtagaatcgggacgaatcaatatcggtgtgccttattatacgagaggctggaaaaatgtgaccggcggagcaaatgggctgtggggaagagccaaaagcgcagattgccctcagggactcaggcaatgcggtgacggagcaaccggaatcgataatatttggcacgataaagatgagcaggggaatgaaattggagcaggggcaaacccgatgtggcacgccaaaaaccttgaaaagggcattgctggttcttatctggaaaggtatggattgagcaaggctgatttgacaggcgtttataaaaggcattatgacgcagggctggcagcgccttggctttggaatccagaaaagaaagtatttctatcgacagaggatgaggaatcgatcaaaacgaaggcggattatgtcattgataaaggaatcgggggtgtcatgttttgggatttgagcggtgattatgactggtatcccgaacgaaacggcagtaaaggagaatacggtatcggcaataccttaacgagaacgatgtatcataaattctcggatacaacaccatacgataatcgactcagcacatcacctttgcctgatgaatcactagatgcagaagtagagttgacgaactttccgttaggagatcaaaattacccgatccacccggtgatgaagctgatcaacaacagcgatgtcacgattacgggaggttcttttatcgaatttgatgcgccgacatccacttcccctcggtttagaagctggagcggcgatcatgttgaagtgatttctaaagggcatacgggaccgaacattggcggactgacaggagatttccaccgcatcagagtgactctatcaagctggaaaaccattaaacctggtgaggaagcggagtttcagcttgtctattatttgccgatcagcggtccttcaaatttcacgatatcaatagatggcaaaaagtacaggcttaaaggaaattaa

SEQ ID NO: 425 - DNA, 951 bp, Bacillus licheniformis
ttggttagtaaaaagagtgttaaacgaggtttgatcacaggtctcattggtatttctatttattctttaggtatgcacccggcccaagccgcgccatcgcctcatactcctgtttcaagcgatccttcatacaaagcggaaacatcggttacttatgacccacacattaagagcgatcaatacggcttgtattcaaaagcgtttacaggcaccggcaaagtgaatgaaacaaaggaaaaagcggaaaaaaagtcacccgccaaagctccttacagcattaaatcggtgattggttctgatgatcggacaagggtcaccaacacaaccgcatatccgtacagagcgatcgttcatatttcaagcagcatcggttcatgcaccggatggatgatcggtccgaaaaccgtcgcaacagccggacactgcatctatgacacatcaagcggttcatttgccggtacagccactgtttcgccgggacggaacgggacaagctatccttacggctcagttaaatcgacgcgctactttattccgtcaggatggagaagcggaaacaccaattacgattacggagcaatcgaactaagcgaaccgatcggcaatactgtcggatacttcggatactcgtacactacttcatcacttgttgggacaactgttaccatcagcggctacccaggcgataaaacagcaggcacacaatggcagcattcaggaccgattgccatctccgaaacgtataaattgcagtacgcaatggacacgtacggaggacaaagcggttcaccggtattcgaacaaagcagctccagaacgaactgcagcggtccgtgctcgcttgccgtacacacaaatggagtatacggcggctcctcgtacaacagaggcacccggattacaaaagaggtgttcgacaatttgaccaactggaaaaacagcgcacaataa

SEQ ID NO: 426 - DNA, 774 bp, Bacillus licheniformis
ttgtatagtgatttaaaaggaaaaacagcaattgtgaccggctcttcaaaaggtataggcaaggcggttgcagaacggtttggaaaagaaaagatgaatgtggttgtcaattatcacagcgatcccggaggcgcacgggaagccgtcgacaatattcaagcagcgggcggaaacgcccttgcgatagaagctgacgtgtcttccgaagaggacgtgaaaaagctgattaattcagcagttgaacactttggttcacttgatgttatggtcaataattcaggatttaacggcgcgggcgcctttccgcacgaacttgagcttgatgagtggcagaaagtgatcgacgttaatttaaccggtgcgtttctctgcgcacgcgaagccttaaaatatatggcggaccgccgcatgaaaggaagcatactcaatatatccagcgttcatcagcaaattccgagaccgaaaaatgttcactactccgcttcaaaaggcggaatgaagctgttaacagaaacgcttgccctagactatgcggacaaaggaatccgcgtcaatgcgattgcgccgggaacgattgcgaccgaaagcaatgaagacttggagggaagccgcaagtcggaacagctgaaaaagatacccatgaacgaatttggcgagcctgaacaagtggcttccgcagcggcatggcttgtgtcgcaagaagccgcctatgtaacgggcgcgactttattcgttgacggcggcatgacgctgtatccatcacagctggaatag

SEQ ID NO: 427 - DNA, 819 bp, Bacillus licheniformis
atgcaaaacaatatcgttcacattgccttcggcgagtctgccggcggcagtataaacatgatgctcaaacagtcgggaggaacccatgaaaagagtctgatcgttctgcctgaattattttccatcggaccgcttcaaaagctggaagccaaagaaggcagggtcaatcgttatgaatggttgaaaacatatctgaatgaccgatttcacgagtctggaaagagatacagccgttttgaagtggcggtttctgcattgtccggcattcctgagcaagcctctgtctttatatggacaggagatcatgcacacgaacagactggtctgaggtttgtacaccatatcctccgacaaatgaacctggctgttttccatttgaatacgacgaagttcttcccccatacccggagttctggtgaattgaatgatgaaaacctgagattcatttatgaacaaggggatcaggcggctgtgacagccgctgaaggacggcgccttgcagaggaatggacagcgctgtctcagcagacaagcgtgttgcgggtatgggaagacggtagaatcaaaagcgtgaaggaggatttttttgattcgttcataatcgaaaaactggctcagcttcaaaaaaaccgttcagccaacacctttatcaactgtctcagcttgatcggcgaagtcattggccatctggaggagaacatcggagatgaatttatcgagtaccgcattttagagctgatccgcaaaggtatttttgagatgaaaggcacaacaaaaggaatgagatattttaatgtcaggttaaaaaatgtcatgtaa

SEQ ID NO: 428 - DNA, 1398 bp, Bacillus licheniformis
ttggttcgtgaacagttaaaacaaaaagcgcaatccatcagtaaggttcccccacattatcagctcatgatcgaagattacggagagaagtacgaaaaagagaggcgggtttttttcgcttggcaggacattgaagagccggagcgggacatatcggtggagttagatcatcaaggccgcttaatcagtttgacaaaagagtatgaaccggtggtcgaggaagctcttcctgatgaaaggctgctgcaaatcgcccttcagtttacagaacagcattacccgaatgcgccttatgaatttgttttccatgaaaagaaggtaacagaacaattcgttcgttttacgtatgttcagactgtccttgatcttccgctgccgcagacgggcttttatgtccgggtcgccaagaacggagaggtgattgagtttcgctataacggcgggacgagctctttctccattccaaagcagatagctgataagcaatcggtaacagccgattatcttgaacatgttcaattcgaattggtggttgaaaaaatccgcaatgaactttatgaagggggagatgatctcccgcatcttatttacgaagcagacttgccgtttttcagctatcccgccgatatcacggaaaaacgccagatgaagcctgcggctgatgacgaggaagaagaagacacattgccgctccctgtgctgcctgaggctgaccgtcatgctgatatcgatgacatgatcggctttaccccttcgatgcgaaaaatccgcgaaaccgatttgggagagtcaattggaacagtgtggcgcctgggagacgaccctgagccgagagatcggagtatagccggctactttgaaacatggaaccaaaatacgttgaaaatcgtgaaagacaaaaactcggggaagctcaaaggaatcgcttcttttatcaaatcggaaggaccccctgtcttgagcggggaagactgcttgaaacgggcgctgcaatttttgtacaggctttatcccgacgctgatcggctttttcgaatgcatccggcggaaaatgacggggacaggtcaaacgcattttttcaatttgatcttcaatacaaaggggtgccgttaaggcttggctctgccaatatcagcatcaatcggacaaccggcagggtcgtcggttatcacggcccggaaatcgagccggaaacgctgatcgatctgagtccttcgccatccatttcagaggaggaagcgaaagccgtttttgcagcggcatttgatgtgaagctgcagtgggaaagggactacagtcgggaaaaggatgacttctacaggcttgtctaccggccggtatacccttactttatcgatgcccatgacggaaaggcgtttatgagcaaaaacatataa

SEQ ID NO: 429 - DNA, 852 bp, Bacillus licheniformis
ttgtcagtattaaaaagccctgaatgggtatacaaacgattaatggaaaaaacggaccaaacagttattgtcgacgtgaggtttcatttgacaaaaccggacgaaggccgaaaagcgtatacgaaaggccatgtgcccggagccgttttcattgatttaaaagaagatctgtcgcgcaacccggaagagcacggcggcagacacccgcttcaagaccctgaccttctggccgcgaagcttggaaaaatcggcattgaccggcaaacagatgtcgttgtttatgatgacagcggcggcatgtttgcagcgcgcttttggtggcagcttcactatctcgggcatgacagcgtctatatcatggatgggggactgtccaactggatcaaagcgggctacgaggtgaacgccgaggatcctcgtcctagcgagcgcgaatttaagccggcgctcagagaaaacgaactgctcgatgccaaagaagtactgaagcgaatcggcagagaaggctccattctgatcgatgcgcgcgatccttcaagatacaccggggaaaccgagcctctcgatcatcgggccggccatattcccggcgctaaaaactttttttggaaaggcaatctaaccgaaggcggattatggaaaagcaaagaacagctcagacagcattacgctgctttggacccgggcagtgaaatcgtcgtctattgcggatcgggcgtatcagcctgcccgaatgtactcggcttaaaagaagccggatttgaaaatgtgaagctgtatgccggcagctggagcgattggatcagctacccagaccatccgatctccactggagccgaggacgatatttga

SEQ ID NO: 430 - DNA, 429 bp, Bacillus licheniformis
atggcagtcgttcaggcttcttctaaagatatcagtcttttggcaagacttttgagagcggaggctgaaggcgagggcgtgcaaggtatgcttatggtcggaaatgtcggaatcaatcgcatcagggcaaactgttccgactttgtgggacttcgcaccattccgcaaatgatccatcagccgcatgcctttgaagccgtgacgcacggttatttctatcaaagggcgcgggaaagcgaaaggcgtttggcacgcagggcggtcaacggggagcggctttggccggcaaagttcagtttgtggtatttcagaccggcgggggcgtgtcccgcacagtggtacaatcagccgcatgtcggccgctttaaatcgcattgtttttacgagccgacagcggaagagtgtgagaatatctataatacgttctaa

SEQ ID NO: 431 - DNA, 990 bp, Bacillus licheniformis
atgcagctcagcattcttgaccaggttcctatatcaaaaggctcggatgcgcattcagctctaaagcattctgcagagctggcggaacttgcggatcaatgggggtacaaaaggtattggtttgccgagcatcacagcacacgggggcttgccagcaccgctccagaaatcatgatcgcacacattgcggcaaagacggcgaatattcgcgtcggttcgggcggcgttctgctgccccaatacagtccctttaaagtggctgaaaactttcggcagcttgaagccctttatcccgggagaattgacctggggatcggccgctctccgggaggcacaactaaaacgaggctggcgctgacagacggggttcataaaagcctgcacgaattcccgagacagttacaagacttggttagctttctgactgattccgtgccttccggacatgattacttcggaattaaagcctcccctttgacggaatcgcccccggaggtgtggctttttggcctgggagaaaacagcgcaaaattggccggtagcatgggagcgggatacgtattcggccatttcatctctcccgcgagaggaaagaacgcctttcaatcataccgtgaaagctttcggccttcccctttctttaaacgcccccaatcattggccgccgttttcgtcgtttgtgcggagtccgatgaaaaagccgaggagctctgcttgagccaagatttatggcttctccgggttgaaaaagggctggacagccttgtcccaagcattgaagaggcgaaatcggccgcttacacagctgccgataaaaagaagcttgcccaaaaccgcagccgtatggtgatcgggtctcctcaaacagtcaaaagaaaactgctcgagctttctgaacgatatcaaacagatgagtttatgattttaactaacgtctaccggtttgaagataagaagcagtcttacgaaagactggcagaattattttga

SEQ ID NO: 432 - DNA, 93 bp, Bacillus licheniformis
atgaaaaaacaagaatacataaaggaaagaggagtagaaagtgaagaaaaaggtttatgcttttggtttagcgtcgattctcggaacagctag

SEQ ID NO: 433 - DNA, 1359 bp, Bacillus licheniformis
gtgaagaaaaaggtttatgcttttggtttagcgtcgattctcggaacagctagtctatttaccccctttatgaacaacacggcatcggcagaaacatctcagcaaaaacaagaaattcagcaaaagcgttctgaagtgaattcaggcatcgagagcaagcggaaagaaattgccaagctgcaagacgagcagaaaaagcttgaaggtaaaatccaagagcttgataaaaaagcacttgaaacaagcaacaaaatcgaagacaaagaaaaagaaaacaaaaaaacgaaaaaagaagtggaagctctgaaaaaagaaatcaaagaaaccgaaaaacggattgaagagcgttcaaaagtgattaaaaatcgcgtgcgcagcctgcaggaaaacggcggatcccaaaactatttgaatgtccttctgggcgcacaaagcttcggagattttatcactcgtgcaactgctgtttcaacaattgttgatgcggacaaagacctgcttgacgagcaggagaaagataaaaacaagcttgaaaaagcaatgtctgatttaaatacaaaactggacgaaatccaaaaaacactagccgatttaaaaacgcttaaatcggatcttgataaacagctgaaagaacaggcaaacctttctaagcagctgcaaacgaagcaagcggcagcagaatcagagctgagcgatctgaaaaaagaagcgggctctctgacaaaagaagaagccgctcttgaacaaaagcttaaagaagaaagagctgaggcggctgcagcagcaaaagcgaaagaagaatctgcgacggctgaaaagtctgattcaggatcttcatcaagctcaaattcaggttcagtcagcaaatctgacggatcgtccaacagcggttcttcaagcagcaagaaaagcagcagcccgtcaagaaactactcttccggttctgttgtaagcagcaatggaaacgcgattgaagctgccatcagcacaggttcaagcattgtcggcagatctccgtacaaatggggaggcggacgttcacaagctgatatcgacaaccgccgcttcgactgctcatcattcgtacgctgggcttatgcatcagcaggcgtagagcttggattcggtgcgacaacaagcacgcttgtcggcaagggacgagctgtcagcgcgtctgaaatgaagcgcggagacttggtcttctttgacacatacaaaacgaacggccacgtgggcatttatcttggcaatggcacattcctgaacgataacagctcacgcggggtatccgtcgattctatgagcaacccgtactggaagaaagctttcaacggagttgtaagacgggtcgttgaataa

SEQ ID NO: 434 - DNA, 813 bp, Bacillus licheniformis
atgaacctctccctgtataaacaaatgctgagaacaaacatgaaaggaatcatgagctacggggtaggctccgcattttatatccttttgatactgggcatttatccaagcatcgcgggcaatgcggaggatattgagaaaatgatcaaatcgatgccggaaggctttctcaatgcttttgggtttgaaaacggacttgggaatcttgaagattttatatctggagaatattacggattaatctttatcgtgatcttatcgatcttctctgtcatgctgtcgacaaagcttttggcaaagcgggtggatcaagggtcaatggcctatattctgtctgcgccgacaacgcgcggaaaagtggctttcacccaagcagccgtcttaacgacaggtcttttgatcattatggccgtgacgacagcggccggactggccggctaccatttgatgctgggcggtgattacgattttaatgtatcaaggttcctcgttctgaacctgcttggctttctgctcttctttgcagtcggcggcatttcgttcctcttttcggccatttcaaatgatgaaaaaagagccctcggactttccggaggcatcacgttcttattcttcagcttcgacttgctaggcaaattaagcgaaaaaacagaatggctgaggagcctgtcggttttctctttattcagaccgggcgatattgtgaacggaagcaccgacatcgctcaagtgtctcttgttctcgccgcagtcggttttgccgccttcgcactcagcattctcatttttaaaaagcgcgacttgccgctgtaa

SEQ ID NO: 435 - DNA, 888 bp, Bacillus licheniformis
atgcttacagttgaacggctcacgaagaagttttccaatggcaaaggtatctttgatctttcttttcatgttcaaaaaggtgaagtttttgggtttttagggccgaacggagccggaaaatcgacgaccatccgacatatcatggggtttatgaagcctgatcaaggcgacattaaagtaaacggaatggatgttttgaagcagcagggcgatattcaacggcatatcggctatctccccggagagattgcatttatcgaaggaatgacgggaaaacaatttctcgatttcatggcagacatgcacggcttaaaagatacagccaagcgcaatgatcttattgaacggctccagttcgatgttcatactccgatcagaaaaatgtcaaaaggaatgaagcaaaaggtcgggattgtcgccgcctttatgcacagccccgaagtgattattcttgatgaaccgacatcaggcctcgatccgctgatgcaaaaagtatttattgaaatcgtcctcgaagaaaaagcgaaaggaacgacgtttttaatgtcttcccacagctttccggaaatcgaaagaacctgtgacagagcagccattataaaagacggcatcatcattgccgtcaaggatattcatgaactgcagtcgatgcagcgaaaagtatttgaagtcacatttgaaaacacgggcgacattcccgccttcatgaattcaagtctgcaaattgagtcccggacggacaaccgcgtcaaagtggccgttttagggaaccatgatcaatttattaaagaaaccgccaaatatcacattcggcacattgatgcttcatcacaaagcttggaagaaatttttatgaactactataacagaaaggggacagcacaatga

SEQ ID NO: 436 - DNA, 588 bp, Bacillus licheniformis
atgaacggatttgaaaaaagggctttgctgattaaggagaagatcaaaaagacggctttggatatgctcaaaacatgggagccaaagcgcatccggataaccgatatcgcaaaagaggcaaacgtttcgcaggtgacgatttataattactttggaagcaaagaagcgctcctgaaagaggtttttaaagattatatcgatcagtccatcagcgagtttgaagaatatatgaacaaagatatttctgttaaagaaaaaattgaattgatgattttgcaaaaaagggcagccaataatcaaaaattcgctttaacggtcatcaaagaggtgatgatcgaagacagtgaaattatggattatgtgaagcagcaatacgatgaaaaaatcattccccttatgctccaaatgattgaagaaggtcatcggacaggcgaaatctcttccaaaatcaccgcggaaagctttctcatctttatgaatatgatcattgaacattcaaaaacattaggtaaagcctttgaaaaaaacaggaagtttacagaggaaatgctgcacattttcttctatggcttgtgcggcagaccgtag

SEQ ID NO: 437 - DNA, 1896 bp, Bacillus licheniformis
atgaagcactcctttttcttttttatgttcattgccttttttctcgtcactggtttttctgaagcaggcaaatccttttcgatcgagcgggctgatatacgcgcaacagtaaaagaaaacggcgatttaagtgtagaggaagtttacagatacgattttaaaggttcttttgaaggggcgacaagatcgttcagcgaagaaaccgcgagccgcctgaagaattttaaagcctatctccttcccgaccaccggagaaaaggcggtcaagccatcccgttaaagacaaagaaggaagacgggacttattttgcttattcggcatcaaaggatgaaacgaaaaatgtgatgtttcgctatgtgatcgaagatgccgcacaaaagtttgaagatacgtcgattttgatccattcattttaccaaaaggcaaataccgatttcggccgcgtaaagattgaagtgcgcctgcctgattcggtaaaggcacgggatattcatgcgtttttgcgtgaaaaaggaaacggaaagattacgaaggtgaacgattcatcggtcacctatgagacaggactctatcgcgcaggcacgggctccgagctgaggatatattttccgcaaagcgccttgaaggaggcggtccggcacccttcttaccagacaaaggatgagctgctgaaggaggagagagacgaggcgaaacgctacgctgagcgggatgaacgaattgccggcgctgaaaggatgattttgattttttcggggattgtggggttcatggtcatcatggctgtcatgctttcgtttttgaagaagagacgccgcgccatgctttcgtttgaagaactcgagtcctttgatcccgtgcttgtcgcatttctttacaaaaaaggccgtttcacagaccgcgatctcctggccggcctgctttcgctttatcagcggggattggtcactatgcagaaggtgcaggctgaagagaggtttctcgacgatcctaaggcgcctgatgacacatatgaatttgaattctccggaagcaaggcagatttgccaaagcctgatcagctcttaatcgaaaaactttttgagcagacgggcagcgatacctatatgttcaggctggattccctcagcgggccgactgaggaggaatgcaagcacaaggagcagctgggaaaatatgaacgaaagaggatcattcttcaaaacgtggttcaaaaatggacggaaagcgtcagacaagcgcctgaattcagggaactgtttcaagaaaaccgctggctgagaatgctgtcgctttcactgctttcagtccataccgggctcctgctctttattctgtatgcagatgtggtacatcaggccggattcatggcggcttgcgtcatatttggttttgcactgtcggcaggcattgttcttgcgaagtcaaagctgtatacgattctgtttttggccggattgtttttggcgtctgtttttaccgacagcgttcataccattttgtattacggcatatgcgtcgggctgtctattttattaattgccttcattccggccgtgaaagaaagcaggtatgcctccatctgccgaagatcgattctttcctggaggaaccatctgagaaaagaagatttgttctcagggagaagcctgtcacaaaacgaaaaaacgatgatctttgcaattgtgcttgaagtggaggatgaatctgccgtgtggctcaatcaatcagcaaacaggcttgattacgcttcccctgtactgggtatggctgcagccggctgtttgcattatccgttttacagctggcagctgccggattcgcagcagcacgccggtgcatatgatgcaggcggttccggagcgggcggaggcgacggggcaggagctttttaa

SEQ ID NO: 438 - DNA, 483 bp, Bacillus licheniformis
atgggtaaaacgatcatcaacaagccttttacggccgcccctgaagatgaagtcgttgtatttgtgatcgggatgagagtaaacaagtggcatgctgttcataaatggtggccggtttttaccgccatgccccctatgataaaggagctttatcaaaacaaaaacctcggctttttagcaatggaatcattcatcaatttcaggacgatttgtcttattcaatattggcgttctttcgaagatttgacagcatatgcaaagggtgataaacatatggcggcttggcgccgtttttatcagaaaacagccgcatcaggcgctgtcggcatctatcatgaaacgtattcggttccaaaagggcgctatgaggctttttaccataacatgccggtgttcggcttggcaaaagcgtacggacatcaacctgtcacccgcggaaccaaaactgctgaacagcgaatgcggggaactgaaataatctga

SEQ ID NO: 439 - DNA, 564 bp, Bacillus licheniformis
atgacaaaaagaaatcacacgacttacgcgctgcttggattgattacggccggctaccgaacgggttacgaaatgaaacgaatgatcgaccaaagtttgaatcatttttggaaaatcagctacgggcaaatttatcccgcactgcgtcaattaacggaagcaggctgggccgcggcttctccggcgctctcggacaaaaagcaggacagaaaagagtacatgattaccgctgaaggtcaaaaagcgctgcagagctggcttgaagaaccgatcaatgacatcgcttcagaaaaaaacgagtttttgctgaagctgtttttcagcaaggaagaatcgcgggagaaaaccgctttgaaagtgaaggagtaccaacaaaagcttgaagaacggcttgaagcatataaagcaatcgagcagtcaattctttcgtgcagctcccattcaaaggacagagagtactggcttttcacgttggattatggaaaacgcaccacctcggccggaattgaatggtgtgaggccacaatcaatcggctgaatggaaaggaagggaccaatgggtaa

SEQ ID NO: 440 - DNA, 603 bp, Bacillus licheniformis
ttggctatttctttagagaaaggtcagcggattgatttaacaaaaggaaaagcggggctttcgaagattttagtcggtctcggctgggatccggtagcgtccggaagcggcggtttttttggaaagctgtttgggggaggaaccccgaatattgattgtgacgcatccgtgctgatgctggaaaacggaagagtcacagagaacaagaacgtcatttatttcggaaacttgaggagcagatgcggtagcatcgaacataccggagataatctgacaggcgaaggcagcggagatgatgaacaaatcattgtagatttgcaaaaagttccttcgcatattcataagcttgtctttgtcgtgaatatatacgattgcgtgaaacgaagccagcatttcggaatgatcgaaaatgcctttatacgcatcgtcaacatgaatgatcgcagtgagatggtcaagtacaatctgcgggacgattattctgggcggacaagcctgattgcgggcgaaatttaccgtgacggcgccgagtggaaattcaccgctgtcggagaaggcacaaacgatacgagcattacggaaatcgttaaacgctacgcctga

SEQ ID NO: 441 - DNA, 582 bp, Bacillus licheniformis
atggcaatttcattagcaaaaggacaaaaaatcgatttaacaaaaacaaatcccggattgtcgaaagttgtcgtcggccttggctgggatgtcaatcaatatgacggcggtgctgattttgacctggatgctagcgtgttcctgctcaacgcagaaggcaagtgctcttctgaaaaggactttattttctataatcagaccgagggcgcaggcggagctgtcatacatacaggcgacaatcggacaggggaaggcgaaggagacgatgagcaggtaaaaatcaatttgaatgcagtgccggccgatattcaaaagatttcttttgtgattacgattcatgaagcggaggctcgccgccaaaatttcggacaggtgtcaaatgcttacgttcgcgtgatcaatgaagactcgaacgaagagttaatccgctatgatctgggtgaagatttctcgattgaaacagcgctgatcacgggagagctgtaccgccacggaggggaatggaagttctcagcgatcggctcaggctatcaaggcgggctggcgaggatcgccaccgatttcggcctgcaggtcggctga

SEQ ID NO: 442 - DNA, 579 bp, Bacillus licheniformis
atggcgattcaattatctaaaggacaaaggatcgatttaacgaaaacgaaccccggtttgacgaaagcgctgatcggtttaggctgggatacaaacaaatataccggcggcgccgattttgacttggacgcgtcggcttttcttgtcgatcagaacgatcgatgcatcaatgatcacgacttcgttttttacaacaacctcgagcatccaagcggcgccgtgattcatacgggcgacaaccggacaggagaaggtgaaggcgatgacgagcaaatcatcgtcgatttctcaaaaatccccgctcatgttgaaaagatcggcatcacggtgacgattcacgaggcggaaagccgcagccagaactttggacaagtctcaaatgcgtttgtccggctcgtagatgaatcaacaaatgaagagctgcttcgctttgacttgggagaggatttttcaattgagacagcggttgttgtttgcgaattgtaccgtcacggaggagattggaaattcaatgccatcggcagcgggttttccggcggattggcatcgctttgccgcaactacggcctgcaagtctag

SEQ ID NO: 443 - DNA, 774 bp, Bacillus licheniformis
gtggatttatttcatcatattatgtcaatttacgcctcatttttcgattgggaaatgtgggtggaagtattaacggaccctgtttcctgggggctgatcggctcgctggtcgtgctggaggggcttttatctgcggataacgccctcgttctcgccgtcatggtgaagcaccttccggaaaaacaacgcaaaaaagcgttgacatacggtttaatcggggcctacttctttagatttctattcattggactcggtatgatcctgattaaattctggtggatcaaactgctcggagccgcatatctggcatggctcgtcatcaagcacttcttcatcggtgagggcgatgatgaagcaaacgccatcaaaaaagacagctggatggtacgcgttttcggggtcttctgggcgactgtcatttcggtagagctcatggaccttgcattttcggtcgacagcatcctggcggcatttgccgtatctgaaaaggtatgggtgcttctgatcggcggcatgctcggcatcttgatgatgagaaccgttgcgaaattcttcttgacgctgattgacaaagtgcctgaacttgaaacaacggcctttgttttaatcggaatcatcgcactgaaaatggctgcgagtgtatggcatattgaaatgccgcacagcgtcttctttatcattctgattattgcttttgccgcaacatttatcattcactatatgaacaagcaaaaagctgtaaaagagcaaacggcggcttcaaaggaagaataa

SEQ ID NO: 444 - DNA, 1182 bp, Bacillus licheniformis
gtgcaatactttgattttttatccgcctctcaaaaagaagatgtctttttcaaactgccgggtacggttacaaaggactctccgaagcgcattctcgagtatgcgcttggagctgcgctctatgttccggggaaccgaaaagatatagcagatgtcatcatcaataacaagtatccagaactgtgctcggtcgttttttgccttgaagattcgatcggcgattgtgaggttctacaggctgaaaacaatcttgtcagtcaggccgatatgatttatcaggcgcaaaaactgcagaacatcaacagcgatgtgctgccgctgatgtttatccgagtgcgggaacctgagcagatgctcgaattgggcaacaagctcggccgcgcgcttcacttgtttgccggattcgtatttccgaagttttcgatgttgaatgcagagcactaccttgatactttaacgaagctgtcgcaagaatccggcattgtgctatacggaatgccgatctttgagacacctgatctgctggcgatggaaacgagggcaaaggcgctgcaggaattaaaatcaacgcttggcttttatcaggatatcattctgaatatcagaatcggggcgactgatttgtgcggtctctacggcttaagaagaaaaccggaaacgccgatttacgacattttggtcatctctgatttcatcaaagatatcgtcaattatttcggcttgcaattcgtgatttcggggcctgtctgggagtactttggagatgcttcgcgaacggttccgccttttgcgccgaattgggctgaggcgggggaatcttcgcttgtgatcaatcggtatatggacggattgatcaatgaaacgcttcttgacctggccaacggcattcacggaaaaagcgtgattcatccgtcacaaataaaagcggtccaaagcctgcatgttatatcaatggaggattatctggatgccttaagcatcgtcgaaagtgccgacggcacccgcggcgttgtaaaaagttctttctcaaataaaatgatcgaaatcaagccgtaccttagctgggccaaaaaaatattattaaaggctgaaatctacggggtatatcatgaaaaccgcagctatacggatatacttagagcgtccaaaccgttttcaaaccttggatcgttcgggagttag

SEQ ID NO: 445 - DNA, 222 bp, Bacillus licheniformis
atgatgaaaatagtcgatctcacgagcagcgagattctcagttcccagcaggcatgtgaagagtgggggattgattcgtctacgctccgaaagagagcgcatgattttcctgcgggaacaatcagaaagttcgggacaacctatgccgtgacaagagcgggcatgtgtgccgtatttggacgtaagagcgacactgactcagaagaaaggggagacggctga

SEQ ID NO: 446 - DNA, 1605 bp, Bacillus licheniformis
atgaatcaagagattaatattcaaaacgccctggtcaatgatgatgaatggaagcagatcatcaagaagccgctcccggagagaaccccgtatgaaaaaaacagtcatttgacgataagccgtctggcgggacggattcttggaactccgcacgatgaaacggattactacatatatctccatgagctgtatgcgtccggtgatgtgcatgtgttaagcgagacgcttgataagaccatttctccggaaaggtttcaggccatacagcggatccatatggtgaaccagaaagaaaaaggactttccgtcaatcggtttgccgcttttcttgacggggagcagctgattcctaagcaccctgatcccgctatgcaccggcatttaaggaaggcgcttatcgaagtgctgcagctgtttcagtcctttcatgaaaaaggattgaacgatccggattttcgccgggtcctccttgaccttgtcaaatggatggtcaaccatttggagaagtggctgaaaggggccgactgcgaaacggcgatgccgaaagtggtttggtacggggacaccaccaaaagccaacggtattttttatactatttgatgcttgtcggatgcgatgtgctgctgtttcatccggagggaaaagacgaatttcgccagcttgatccagagcaaaagctttcttttgtcttcacatacccggacacgtctgcattagagccgttcccgactgaaaagccccagcgcaaagcaacggtggcgtaccgttccgcgaaggagctggatactgtcctgcacaatgaggattcgctaatgtacaaaccttggcagttcagggagcatactccggcctctgtgactttgaagacaacatatgatgaactgtttttaattgcgaaggaacgagcctttatcagacctaattttcaggcgtctaaatcaacggttaacattccgaatttattcgcgatggtcatgggcgtctccagcaatgaaaaagagtactgggaccgtctgcagacactgacggagtataaggagtcgcatacgatccggcgcttcccgtttacaaaggaagagacgtcgaattatcaattccattacagcgatgcgcttgatcaaacggggatgatcgatccaggccgtttaatggagagcaatatatggcgctacaagcatctgcgtgagggagtacagcgaggcattgcccaagcggtttccaggatgtgcaaaagcccgaagatgctggctttgaacaatgaaaagacagccgatgtacagctgtatttgtttacccaagcggtacagcttccggcagcgctattgaatatgattcagacatttgactattcacagaccgtgccgaagctgatcttgtatcacacggaacagacggggacactcacccggtcggacgcggccgccttgcttttgttaaatgaaatcggcattgacattatcatctataatccgccgggccataagtgtattgaccactatatcgacaggcagcactttgatacccattggcttgatgaaatgtccttcaaccaggagtttaaagagccgtcaatcgtccggaagttcatcaataaaatcttttaa

SEQ ID NO: 447 - DNA, 1095 bp, Bacillus licheniformis
atggcaaatccaaatgaaacaagcatcgtcaatattagcaaagaggaagagatcacggttgaaaaagcggaggacatccgtgcgaaactccgccaggatccggatgtgcaagctctggcccgacaaattgacgtgaaaaaccaagtggagcttttagaattcggtaaggagcccgctcttgaaatatccaagttctctgaccgcattctttccatgatgagaacgaacagtgtgacagattcaggcgcgatgttgacgcagctcggaaaaatcatggaccgctttgacaagaatgactttgaagaacaaaaaggcttgctctctaaattatttaagcgcggcaacagcatgatcgagaaaatatttaaaaaatatcaaacgctcggcggtgaaatcgaaaaaatcaatgtcgaaatttcaaaatataaagatgaaatgacaaaatcgaccgtgacgcttgatgaaatgtatgaaagcaaccttaaatactatgtggagctggaaaaatacgtcgtagccggccagatgaaaatagaagaattgcagcggctcatccccgaatatgaagcgaaagcggccagcggaaaccagatggcgcagatggagcttgatacgcttcgaaacggcattcaagcgctggaagaacgggtgtatgatctcgatatggcgcggatggtcgcaattcaaacggcgccgcaaatccgcctgctccagcgcggcaacacaaagctgatcggaaaaatcaactcggcattcatcattacgattccgattttcaaaaacggcatcatccaggccgttaccgccaagcgccaaaaacttgtcgccgattcaatgagcgaactcgaccgccgcaccaacgaaatgctgaagcgcaacgcggaaaatatttcaagccagtccgtcgaaatcgccagaatgtccggaagaccgagcatcgatattgaaacgatcgaacaatcttggaatacgattgtcaaaggcatgcaggagacgaagcagattgaagatgagaacaaacgcctgcgcgaagaaggggcaaaacgcatattggaacttcaggacaatatgaaaaaagccgctttaaacggttaa

SEQ ID NO: 448 - DNA, 702 bp, Bacillus licheniformis
atggccgctttatggctggcattcggcagcggtttcctgtcgtttatttctccttgctgcctgcctttgtatccatcatttatttcctacatcaccgggatttcggtcggcgatttgaaaaaccggcatgcaaagcatatcaaacaatcggtgatgattcacgcagcggcttttttggccggtttttctgtgattttttacatattgggtttctctgccagctcggttggtctgctgtttttgcaataccataacttaatccgcatgctgggcgggatatttttcgtcgtcatgggactgttcttactcggcgttttccggccggcttttatgatgaaggagcggcgcttttcgattagaaagggaaaaataggcctgctgaattcaatgctggtcggaatgatttttgcggcgggctggacgccgtgcatcgggcctatattcggaacgatcgcatacgcaaattttcagaaccctgattttgggagcgcattcatgatgatcaccgcatattctttaggctttgccattccttttttgctcatggcgttttttatcggaaacatcaggccgcttatgaaatattcgaatatgctcatgaagatcggaggcgcgctgatgatcgtcatcggcatcctgctttatacggacaacatgatatggattaacatctggtattcgaatttgacgaatctcttttga

SEQ ID NO: 449 - DNA, 687 bp, Bacillus licheniformis
atggaatggaaaaatccttggaacaaaaagcagctggtctgcttgtttttgatcgcatttgcagccgtgccgattttcattgaatatttattaaagaatgctttggatctgcttttaggcgaaggcatgctttcagccatgttgatgagtatcgcaatggcggccgtttttattctaagcttgtactatatcgccttaaagccggaccgtctgtcttggcgggaaatcggaatctcccggttcgcccctgcatacttgattcaaatagcgggatggacggtttttttaatcgtgatgacgtttgccgttatggaaatcctgatttggttcggcacaggctacgaaaatacaaaaacaaaaacgatcactgccgatccttcatggttgagcattgcaatgtctttcgcttctgcctgcatcgtttctcccatctacgaagaattgttttaccgcggttttctttaccgctggttccgcgctgaattcggggttgtatgggcacttgttgcaagcagcgccctctttatgatcgctcatatccccacatacaacaccctggccgttaactttggaacagggctcgtgtttgcctggacatacgaaaaaacacgatcgattatacctgcgatgatcatccatagtttatttaacgcgattttgctgtttttcacaatcttactcacataa

SEQ ID NO: 450 - DNA, 741 bp, Bacillus licheniformis
atggtgaaagaggaactgacaaccgggcgggtggcgaagatgatggggatatccgtaaggacgctccgctactacgatcaaatcggtttattaaaaccgggctctacactgccgaatgggcgaaggcaatattcgaaggaagatttgttagagctcgaaaaaattatgatcttgaaatctgctcaattttcattggagcatatcaagacgttaatgaatcaattggatacaattagtatcatcgaaatgcataaaaggcgcctgaactcggagatcgaacagctgacgaagagcctggagcatacaaatactttgctgaacatgtatcaaatcgaaggaagcttgagctgggaagaccttctcaagctcgtcagacagccccggcataaaccatggaaggaatcattctctgaagaggaggctgagattttagcagaaaggcttccgaaggcggagagtgacgatttcatcacaaagcaatggctctctatcatcaagcggattaagctgtgtttaaaacaagaggtgccgcctgaatctgaatggggaaagcaaattgcggaggatatcatatgcctgtctgatcattcgtttaagggacatgaggatttagccgatcgattctgggaggttcgcaagtctgaggagccaaacgggctttatccgcttgacagcgggattatggaatttgcggagagagcgattgaatctgcatttcatgattcaggaggatcagggtga

SEQ ID NO: 451 - DNA, 1206 bp, Bacillus licheniformis
ttgaaattggcggatttgaggaagagcggacacgcgccttccttgttgtcatcttttttatatttcgatgtcagctttatgatttgggtgttgctgggggcgcttggtgtttatgttacggctgattttgatttatcgccttcacaggtcggattgattgtcgccatacctactttggccggatcgtttttccggattgcgctcggcattttaaccgaccgtttcggaccgaaaaagacggctgttggcggaatgctggtgacgatgattccgttgttatggggatggcagttcggttcatcggtcgccgagctgtatatcatcggaattttactcggtgtggcaggcgcaagcttttccgcttcccttcctatggcgagccgctggtatccgccgcacttgcaaggtcttgccatggggatcgccggggcgggaaacagcggaacactgcttgctacgctattcggccctcgccttgcggagcaagtgggctggaacggcgtcatgggactggcgctgattcctttaaccctcgtgttattcagctatttccttatggctaaagaacctccgaatcagccggctcctaaaccgctcaaagactattttgccgttttcaaagaaagggacacttggtatttttgccttctctacagcgtgacattcgggggttttgtcggcctgtccaactttttaagctacttttttgcatcccagtatgccgttccggcggtaagagccggcgaatttgtcacgcttgtcgttgcatccggaagctgcctccgccctgtcggcggattgattgccgataaaatcggcggcgtacgtctgcttcaattcctctttatcggagtggctctgtgcatgttctcggtcagtatgctcccgtctctaggcgttgtcacagccgcattatttatcggcatgggctgcctcggaatggggaacggcgcgatattccagcttgtaccgcagcgatttcaacaagagatcgggatggtgacggggatcgtcggcgctgcggggggaatcggcggattcttccttccgaatatcctcggaacgctgaagcaaattacaggtacgtattcaagcgggttcctaacctttaccgttattgcatttttagcgctcggtctgcttttgtttgctcaggccggatggaaaaaacagtggaaagccgaggagaaatcaatccgaatttaa

SEQ ID NO: 452 - DNA, 960 bp, Bacillus licheniformis
atgagaaaccaaaaagtcaatcgtacagttttgatcggtgcgggttttgttggaagcagctatgcatttacgttaattaaccaaggtatcacagacgaacttgtgatcattgatttaaataaagacaaagcaatgggcgatgttatggatctcaaccacggtaaagcatttgctccgcatcctgtgaaaacatggtacggcacatatgatgactgcaaagaagctgatattgtctgcgtatgcgccggagcgaaccaaaagccgggtgaaacccgccttgatctagtcgaaaaaaacttgaaaatttttaaaggaatcatcggagaagtcatggccagcggttttgacggcatcttcctcgtcgctacaaaccctgtcgacatcttgacttatgcgacttggaaattcagcggccttccgaaagaacgcgtcatcggaagcggcacaacgcttgacactgcccgtttccgctacttgctcagcgagtatttcggtgtcgctgcccacaatgcgcacggctatatcattggtgaacacggagatacggagctacctgtctggagccatgcgaatatcggcggagttcccgtcagcgacttgctgaaaagaaatgagaaatacaaagcggaagatctagatgaactgtttgacaatgtaaaaaacgccgcttaccacattattgagaaaaaaggcgcgacatactacggagttgccatgagcctcgcacgtattacgaaagcgatttatcgaaatgaagaagcaattttgaccgtgagcgctcatcttgatggtgaatttggagaaaatgatgtttatatcggagttccggcggttgtcggccgatgcggagcgagggaaattgttgagctcgatctgaacgaaaaggaaaaacaacaattcaagcatagcgcaggtgtgttaaaagcaattttaaaaccgcattttgaactgcaggcgtaa

SEQ ID NO: 453 - DNA, 1623 bp, Bacillus licheniformis
atgtggcagcagatatacgatccgtttggaaatctgtttatcagcgcttttgccgccatactgccgattcttttctttcttcttgcattgaccgtgttgaagatgaaaggaatcattgcgtcatttttgacgctggcggtcagctttattgtagcggtgttcttctttcacatgccggctgcgaaagctgtctccgccgttttacttggaattgctaacggcctttggccgatcggatatattgtcctgatggctgtatggctttacaaaatttctgtcaaaaccggaaagtttaaagtgatcagagcgagcattgccggaatttcgtccgaccagcggcttcagctattgctgatcgggttcagttttaacgcctttttggaaggtgcggcaggcttcggtgtgccgattgcgatcagcgccgttcttcttgtcgagcttggttttaaacctttgaaagcggcatccctatgtttaatagcgaatgcggcatccggagcctttggagccatcggaattccggttatcacaggagcgcagatgggaggcttaacaccggttgagctttccagaacgctcgctttgatgctgccggtcatcgctttctttgtcccgttcctgctcgttttcatattggacgggtttaaaggaataagggaaacgctgccggctcttctcgtattaagcggaagctatacggcggtgcagactttaacaatgattagtttggggccggagcttgccgacattttggccgctttaatcagcatgggagcgctggcgctgtttttgaaaaagtggcagccgcgccacatatacagggaaaccgggaatgaacatgtgcccgctgaaaaatatcgtgcagcagacattatgaacgcttggtcaccgttttatattttgaccgccgtcattgcggtgtggagcctgcccggttttaaggggctttttcaggaaggcggattcctgaagcaaacgacaattttattcaacatgccttttcttcaccgagaagtgctgaaaacgccgccgatatctccggaacaggcaccgcttgatgctgtgatgaagcttgacttcatttcagcgacgggtacggcgatcctgatcgcggtgatcatcacgattgtgctgagccgaaacatcagtttccgcggaggactttccagtctgaaagagacggtcaaggaactgtggcttcccgttctcaccatttgctttgtgatgggttttgcaaacttggccaattatgccggattgagttcaaccatcggactggcgctcgccaaagcgggggatatctttccgttcgtcagtcccgtattgggctggatcggtgtctttatcacaggttcagtcgtcagcaacaacgcattattcggccacctgcaagcagtcaccggagcgcaaatcgggacaagttcggctttgctgcttgccgcaaataccgcgggaggcgtgatggccaagctgatctcaccgcagtcgattgcgattgcaacagccgcggttaaagagacagggcaggaatcaaagcttttcagccaaaccgttaaatacagcctggttctgcttttcatcatttgcatttggacgtttgcgctatcaaagcttggcatataa

SEQ ID NO: 454 - DNA, 642 bp, Bacillus licheniformis
atgttgaacatcttcctgagctatgtgtttttgggtttgtcattggccgcaccagtcggacctgtgaatgccgcgcagatcgacagaggcatgaaaggcggattctttcatgcctggctgtttggccttggcgctgtaacggcggatgtcctatatatggctttaatctactttggagttgcgcaatttttgacagcgccattcttaaaaacgtttttatggctgtttggtttttttgttttgacctatacggggatcgagagcctggtcaaggcgaaggaagtatcgctgatgagaggtgcgggagagaaagggtcataccgcaaatcttttttgtcggggctggtgatctccctttcaaacccgctgagcatcatgttctggctcggcatttacggaagcattttggcgaaaacggtagaggcgtacaaatcataccagctgctgatctgcagttcaggcattttaatcggactttttctgtgggacttggccatgtcttttctagccgggacattcagaacatttttaagcccgcggatgatccagggaacgacttggctcgcgggcatcagtctgatcgtatttggatgctacttcggctatcagggaattctcgaactgctgcaggcggggcgctga

SEQ ID NO: 455 - DNA, 1335 bp, Bacillus licheniformis
atgaaacgacaagcgaaaaaaggagatttaaaatggtggcagctgtccatgatcggggtcggctgcacaattggaacggggtttttcctcggctcaagcatcgcgattaagaaaagcggcttttccgtattagccgcctttcttcttgctgcccttggcacttttcttgtttttcagcagctggcgaaattaacggcagatcatcctgttgaagggtctttttgttcttacgccagagaggccttcggcaattgggcggggtttagcaatggctgggtctactggtcatcggaaatgctgatcatcgggagccagttgacagcgatttccctgtttacgcgccattggtttaacgagattccgctgtgggtgttcgcctctatttatgcgattctcggattgatcgtcattttcacagggcgcagcagctttgaaaaaacggaaaacatattggccgtgttgaaaacggcggccattttaatgtttatcatcatcgctgtcttggcattgtgcgggctgctgcctggaaaaacgcctgaagtgcagttccctgaccgggttcacgaattgtttcctttcggctttatgggattgtggacggggttgatttatacattttacgcttatggaggaatcgaagtcatgggtctgatggcgattcacttaaaagacccgaaggattcatcaaagtcaggcagcctgatgctcataacccttgctgtggtctacgtcgtatcgatcgggctggccatgctccttgtaccacgcggaacattcaccgaacagaacagcccgtttattacgtcattaaaagactttcatctcgatttgatcatggatattttcaacggcatttttattattgccggtttttcaacgctgaccgcttccctgttcgccgtcaccacactgatgggaacaatggcgaaaaacggggatgcaccggcctgctttgccaaaaaagaaaaggcgaaagtatcgtggccggcactcggcctgacagtgctcgttctcgctgcttccatcgtcttgtcgctcattttgccgaagcagctttatgaacacatgacgacggccgccagcttgatgctgctctataactggatgtttatcctgctttccagcaaaaagctcacaaaaccgaaaatgaaagggaatgtccaaattgtcacagcgctcgtcctgattttgttcgccgtttcgggtacgttatttgaaaaaaacagcagacccggtttttttgtgagccttctctttcttgccgttattgctgctgtgacgatgctcatgaaaaaaaagtgggcggatcaggaagagaaaaacgggcagacatga

SEQ ID NO: 456 - DNA, 819 bp, Bacillus licheniformis
atgactttacaagaaaaaatcatgcaggaactgaatgtaaagccttctatcgaaccgaaacaggaaattgaaaaaagggtcggttttttaaaaagctatttgaaaaaaacgggtgccaaaggctttgttttaggcatcagcggaggacaggactccacattggcgggcaggctggcccagctggctgttgaagaattgagggaagaaggcattcaggcggaatttattgcggtccgcttgccttacggtgttcagcaggatgaagatgacgcccagctggcgctgaaatttatccagccggacaagtcttttgcttttgacattgcttcaactgtaggttcatttgctgctcaatatcagtcagtcacgggagaggcgcttgccgattttcacaaaggcaatgtaaaagcgagagtccggatgatcacccaatatgcgatcggaggtcaaaatcagctgctggtaattgggacagatcatgctgcagaagctgttaccggattttttacgaaatacggagacgggggcgcagaccttttgccgcttacaggactgacaaagcgccagggcagaagcctgctggaagagctgggagcgccggagcggctttatacgaagtccccgaccgccgatttgcttgatgaaaaacctcagcaatccgatgaaacagagctcggcctgacatatgataacatcgacgactaccttgaaggaaaagccgtctccagcgaggtggcagaggccatcgaaaaacgctacaaggcatccgagcacaaacgccaagtccctgcttcaatgtttgacgactggtggaaataa

SEQ ID NO: 457 - DNA, 534 bp, Bacillus licheniformis
atgaatgccgcaataagagataagaatattgtgctgatcgggtttatgggcgtcggaaaaacaaccatcggccagcttgtgtcaaagaaattaggccgtgactttatcgatatcgaccacgagatcgaaaaagactttcaaatgaccattccggagatgtttcagcaaaaaggggaagcgtttttcagacagacggaaaaagaatatatttttcagatgtgcgaacatacaatgggcaacatcgtatccttagggggcggcgcttttcagcaggaggaaatcagaaagaagtgcctcgaacactgctttgtcatctttcttgatttaagatgggagaattggaagcagcggatggatctcttgattgaaaacaggccggttcttcataaccgcacaattgaagaaatgaaacagctgttcaatgaaagaaagagcatttatgcatttcaccatttaaaagtggaaaccgataaccggtctgccgaagaaacggccgactatattgtggagatgctaaagcttggtcaatcttaa

SEQ ID NO: 458 - DNA, 771 bp, Bacillus licheniformis
atgaaacagcgaattgaagaagaactgaaaaacattgaagcaacatatggcgtcaaaatcctctatgccgttgaatctggcagcagggcatggggctttccttcacaggacagcgattacgacgtcagatttatttatgtccatcaaaaagactggtatctgtcaattgatgcaaagcgcgatgtgattgaactgccgattgacgattctctcgatatcagcggctgggagctgacaaaagcgttaaggctgttccggaaatcaaatcctccgcttctcgaatggctctcttcgggaaccgtttattatgaagcctattcgctggcagaaaaaatgaggcggctcaaaagccgcgccttttctccagtctcctgtatgtaccattatctcaatatggcgtcgggaaatttccgagactacctgacgcgtgaagaagtgaaaatcaaaaaatatttttatgtactccgcccgattctggcttgccagtggatcgaaagccgccggacggttcctccgattgaatttcaggttttgcttgacgaacttacggaagacggaccgctgaaaacagaaatccatcagctgcttgaaaggaaaaagaaaggggaggagttcaatcttgaacctcaaaaccccattctccacgaatttattgagcgtgaacttgagcggcttcagacagttgccaaagcatataaaacggatcatgaagatctgacgcaggagcttgaccgtctgtttagagaaacgctagacgaggtgtgggcataa

SEQ ID NO: 459 - DNA, 918 bp, Bacillus licheniformis
atggaagtgataacaagagactttttcctattcttatctaaaagcagcatcctgaatcgcctggcgagaaattgggggagttccgtcgcgaccggaaaaattatcggaggaaaagattttgaagcttcaattccgattattaaggggcttaacgaacaagggctgactgtgacagtcgatcacttgggcgaatttgtgaacagcagggaagtcgcaagggagcgcacgcaggaatgcattcgggccattcagctgattgctcaggaacagcttaattcacatgtttcattaaagatgacgtcattgggactcgatattgaccttgaccttgtcagggataatatgaacagtattctggaatgtgccgagcagcaccaagtgatggtcacaatcgatatggaggatgaagtgcgctgccaaaagacgcttgacctctttaaggagttcaggcagaaatacgagtatgtcagcaccgtcctgcaggcttatttgtaccggaccgaacaggatttggaggagctcaattcattaaatccgtttttccgtcttgtgaagggagcttataaagaatcgccgaaagtggctttccctgacaaaaaggatgtggatgagaattacaaaaagctcattaaaaagcagctgctgagcggccattacacagctatcgcaactcatgacgacaagatgattgatttcgccaaagaaattgcgaatgagcatcaaatcggcaaagaccgcttcgaatttcaaatgctgtacgggatgcgcagcaaaactcagctggaactggtgaaggaaggctacaatatgcgcgtgtatcttccttacggagacgactggtacggatactttatgagacggcttgctgagcggcctgccaacatcgcttttgcgtttaaaggcatgacgaagaaataa

SEQ ID NO: 460 - DNA, 1551 bp, Bacillus licheniformis
atgacaacaccttacaaacacgaaccatttacaaatttcgggatcgaagaaaaccggaaggcattcgaaaaagctctggaaacggtaaataacgaatggctgggtcagtcctatcctcttgttatcgatggagaaaggtatgaaacggaaaacaagatcgtatcgatcaaccctgcaaacaaagaagaagttgtaggcacggtatccaaggctactcaggatcatgcggaaaaggccattcaggcggctgcgaaagcgtttgaaacttggagatacacagatcctgaagaaagagcggctgttttattccgcgcggctgccaaagtgcgccgcaaaaagcatgagttctctgcgcttttagtcaaagaagcaggaaaaccttggaatgaagcggatgcggatacggcagaagcgatcgattttatggaatactatgcgcggcaaatgattgagcttgcgaaaggaaagccggttaacagccgtgaaggcgaacgaaatcaatatgtgtacacaccgactggtgttacggttgttattccgccttggaacttcctgttcgcgatcatggccggaacgacagttgcgccgatcgtgacaggaaacacagttgtactgaagcctgcaagcgcagcgcctgtcattgccgccaagtttgttgaagtgcttgaagaaagcggacttccaaaaggagtagtcaacttcgtccctggaagcggagctgaagtcggggattatttggtggaccatccgaaaacaagcatcattacgtttaccggttcaagggaagtcggaacgcgcatttttgagcgtgcagcgaaggttcagcctggtcagacccacttaaaacaagtgatcgctgagatgggcggaaaagatacggtcgtcgttgatgaagactgtgatattgaattggctgcacaatcaattttcacatctgccttcggctttgcaggccaaaaatgttcagcaggttcacgggctgtcgtgcatgaaaaggtatatgacgaagtattgaagcgcgtgattgaaattacggagtccaagaaagtcggagagcccgacagcgcggacgtttacatgggacctgtcatcgatcaggcatcctttaacaaaatcatggactatatcgaaatcggaaaagaagaaggccgcttagtcagcggaggaaaaggcgatgattcaaaaggctacttcatcgaaccgacgatctttgccgatttagatccgaaagcccggttaatgcaggaagaaattttcggacctgttgttgctttctcaaaagtaagcagctttgatgaggcgctggaagttgccaacaacaccgaatacggcctgacaggcgcggtcattactaaaaacagcgatcatatcaacagggcaaaacaagaattccatgtcggaaatctgtatttcaaccgcaactgtacaggggcgatcgtcggctaccatccgtttggcggtttcaaaatgtcgggaaccgactctaaagcgggcggacctgattatcttgcgcttcacatgcaggcgaaaacgatcagcgaaatgttttaa

SEQ ID NO: 461 - DNA, 1449 bp, Bacillus licheniformis
ttgatcatttccatcgtgatttacatggtagggatgctttatattgggtattacgcttacaaacggacagcaaacctctcagactatatgcttggcggacgaacgctcgggcctgctgtcacggcgctcagcgccggcgcatcagacatgagcggctggcttttgatggggctgccgggcgccatgtttgcaacaggcctgagcggttcgtggattgtcatcggactcgtactcggcgcttgggcgaactggatatttgtagcgccgcgtctaaggtcatacaccgaagtagcgggcaattcaatcactatccctgcatttttagaaaaccgttttcatgacaaatcaaagatcctgcgaatattttccggagtcgtcattattaccttttttacgttttatgtatcatctggaatggtttccgggggcgttttatttaacagcatatttaatttggattaccatgcagggctgtggatcatttcaggcgttgtcgtggcctacacgcttttcggcgggtttttggcagtcagctggacggactttgtccaaggcatcattatgtttgtcgcgttaattcttgttccgattgtgacggtcattcagacgggaggacctggagaagccttcagcgagatccagtcgatcgatccaaacctcctcaatatttttaaaggtacgagcgtcctcggcatcatctccttgttctcatggggcctcggctattttggacagcctcatattatcgtgcgctttatggcgatatcctccatcaaggaaacgaagaaagcgcgctggatcggcatgggttggatgatcttttcaagtgcgggcgcactgctgaccggattgctcggtattgcgtattactcgaagaacgggcttcacttggatgatccggagaccatcttcattcaattgggtaacatcctgtttcaccctctaatcacaggatttttaatctcggcgattttggcagcggttatgagtacaatttcctcccagctgcttgtgacatcaagttctctaactgaagatttatacaaaacactatttaagcgctctgcatctgataaagaactcgtctttttcggacggctttcggttttggcggtttccattgtcggactctgtctcgcctggacaaaaaacaatacgattctcggtcttgtcagctatgcttgggcgggtttcggagcgtcgttcggccccgtggtcatcttaagtttgttttggaagaggatgacaaaatggggggcgcttgccggaatggttgccggagcgcttaccgtcaacatttgggcggaagccgggctttccgatgttctttatgaaatgattccgggctttgccgccagcttgctgtttgtgtttgtcgtcagtctattgacgtcaaaaccggagcagcaggtgcttgatgaattcgagcaatacaaacaaacgctgtaa

SEQ ID NO: 462 - DNA, 1245 bp, Bacillus licheniformis
atggaagagctattagaacaagttgtttctctttcaaacattaatgagatcattgactttatcagcggggagctgaaaaagccggtcatactggaaagcgcagattttttcttattagcttacaactcctattatattaaccattttgatgcagcaaaccagcaaacgattttctccaaaaaatgtccgctgccgatctttgaaaagttcgtcgaagaaggcattattgatcaattgaaaacgattccgactccttttcgggtaaaacagattgaagaaatcggcttaaaccagcgggttgtcgtcagcgccaagcataaagacgaaataatgggctatatctgggtgcaggagattgaagacaacctgtctgatgaagagcttgatttcttatatcaagcttcctttcatgtcgggaagatcatttataagaaaaaacgcctcaaacaagaaaaagaagaacaggcggaagagctttacaaaaaggcaattaacgatcagtttcaaacggaaaaagagctgaaggccgccgccgataaagcgaacgtcgtcctgccggccgtgtttaccgtcatggtgcttcaagtcgttgacggggaggatgaactgctcgaagatctaaaggaaacgatccggtcttatttaaacctgaaagacaacatcagtcacgtactggaggatcattcgaatatcgcaatcattgtcggcagtgtgtcgcgcaagcgttccgcgctggccgctgcctcagaactgatcaaccgtctgttgacccatctgcgctcgcaaatgctgccccttattttgatcggggtcggcaatgagtacagcagcctgctgtccctcggcaaaagctacagagaggcgctccaagtgacgaaagcagcggagatcacgggaagccaagaacacattccctatgaatatcaaaagctcgggcttttcaaatatcttgaccaaatcgccgcaaaaaacgatcatctgcaatatgtaaacccggaccttcagctgctgaaagaaaaagataaagaaagccacaccgaatttttaagaacgcttgaaatctatctcgtcaacaattgcaaggtcaagccatccgcagaacagctgtttatccaccaaaacacgctcaactaccgaattaaacaaatattggaaatgacatcgattgatctcaatgattttaatacaagatgtcagttgtttatcgatttaatgctgatgaagaaagcaggctacaaatcgtaa

SEQ ID NO: 463 - DNA, 846 bp, Bacillus licheniformis
atgtttcgcacattcattttaatgttgtttacgtttttcttttttcatcttcatgcatccggcaatctgacaaaatatattaatatgaaatacgcttacctttcatacatcgctattattcttctggccattttgacagctgtgcaattctacatttatatgaaaagctcggatgaaaaaggatgtaaccatgaatgcggatgcggccatgaccacgatcatgaaaaagataagccttttctgcaaagaatgttcatttatttcgtgttcttcttccctttatgcaccggactttttctgccggcagcgacgcttgattccaatatcgtcaagtcgaagggcttctcgttcaaagcgatcgaacagccggagcattatgcccaaacccagtacctgcgccccgacacaagcatctactacggccaggatgggtatgatgaattgatgaataaagcgttgaaaaagtataaagaaaaacagcatattacattaaaagatgatgattttttgaagggcatggaaacgatctatcattatccgggagaattccttgaccgaacgctcgaattcgacggctttgcttttaaaggggaagcgatcagtgacaaacagctgtttgtcctccgcttcggcatcattcattgcatcgccgactccggcgtctatggcatgctggtcgagttccctgaaaatatggatattaaagacgaccagtggcttcatgtaaaaggaacgctgtcttccgaatactatcagcctttcaaatctacaattcccgtgctgaaagtgaaggattggtctgcaataaaagagccgaaagatccttacgtttatcggacatattaa

SEQ ID NO: 464 - DNA, 888 bp, Bacillus licheniformis
gtggcttcacaatcctttctgcagctgaactcaatatttatcagtatattaatagaagcgattccgttcgtcttgatcggggtttttatatcaggtttgattcaaatgtttgtgacggaggagatgatggcgaaaatcattccgaaaaaccgatttctcgccgttttgtcaggaacatttgccggggtattgtttccggcttgcgagtgcggcatcgttccgattgcccgcaggctgcttttaaagggagtgccgcttcatgcggtggtcgccttcatgctgacggccccgatcatcaatccgattgtattattctcgacattcatcgctttcggaaacaaatgggatgtcgtgttctaccggggcgggttggcgattgcggtgtctctcattgccgggctgatcatctcttatcaatttaaagggaatcagctgatcgaaaacgggacgcacggacatcaccaccatgtccatgagagccagtctttcctgcaaaagctcggcgggacgctccgccatgcagttgacgagtttttctcagtcggaaaatatttgatcatcggcgcatttgtcgcagcagcgatgcagacgtatattaaaacatcgactcttttggcgatcgggcagaatgatgtatcttcctccctcgttatgatggggctgtcatttgtgctgtccctttgttcagaggtcgacgcttttatcgcttcttctttcagcagtacgttttccctcggctccctcatcgcctttctcgtattcggagcgatggtggacatcaaaaatctgctgatgatgctcggcatcttcaaaaagcgctttgtgtttgtcttaatcgcctacatcgccgttattgtcttagccggatcactgttggtaaaggggtga

SEQ ID NO: 465 - DNA, 957 bp, Bacillus licheniformis
atgcagcagccttatgatatgccgcttgaacagctttatcagtataaacctgaacggacggcaccggccgattttaaagagttctggaagggttcattggaggaattggcaaatgaaaaagcgggaccgcagcttgaaccgcatgaatatccggctgacggggtaaaagtctactggcttacatacagaagcatcgggggagcgcgaattaaaggctggtacgcagtacccgaccgccaagggcctcatcctgcgatcgtcaaataccacggctataacgcaagctatgacggagacattcacgatattgtcaattgggctcttcacggctatgcggcattcggtatgctggtccgcggacagaacagcagtgaagatacagagatctctcatcacggacatgtacccggctggatgacaaaaggaatcctcgatccgaaaacatattactacagaggggtctatttagatgccgtacgagcagtcgaagtggtcagcggttttgctgaagtcgatgaaaagcggatcggggtgatcggggcaagccaaggaggcgggctggccgtcgcggtttcggcgctgtccgatattccaaaagcagccgtgtccgaatacccttatttaagcaattttcaacgagcgatcgatacagcgatcgaccagccatatctcgaaatcaactcctttttcagaagaaacaccagtccggatattgagcaggcggccatgcataccctgtcttatttcgatgtcatgaaccttgcccaattggtcaaagcgaccgtactcatgtcgatcggactggttgacaccatcactccgccatccaccgtctttgcggcttacaatcacttggaaacggataaagaaataaaagtgtaccgttattttggacacgaatacattccgccgttccaaaccgaaaagctggcgtttctgagaaagcatctgaaataa

SEQ ID NO: 466 - DNA, 423 bp, Bacillus licheniformis
gtgaatacggaacaaaccatagaagtgatgaatcagaactggacggatatttactaccatctgcacatgaaacatgatgatcaattgtctcaccaagcggttcggatgcttcagcatatcgaaaaaaaccgctttgtgaccattggccatttagcaagattgttggatgtctctcataatacggcatcagaacatgtgaaaagactaatacaaaaagggcttgtacagaaaaacagggacagcagcgatgaacgcaaagtctacgtcacgttaacgcctgaaggtgaagaagcagtgaaacggcatacgagacttaatccgaaaaaactgcaaaaggtgctggagcaattaaatgaggaagaagtcgaaatggttaaaacagcattttccttgttaagccgggaggcaaaatcatgtttttaa

SEQ ID NO: 467 - DNA, 342 bp, Bacillus licheniformis
atgtttttaatagtaaaaatcggggtttctgcaatattgattgccattataaccgagattgcacgaaaatcgcctgaaatgggcggaatgattgcggctttgccgcttgtcagtctgctgagtttattttggctgagtgtacaaggggaatctttaaagcatttaagccaatttgcgaaaggcgtgctatgggggtttccagccacagcggttcttcttttgatcgtggttttgagtttaaaagcatcattcccggttatcatttctgttgtatttggaatatgcggatggggcgggtgtttaatgctgcaaaaggctctcatccatgcaatattcgggtga

SEQ ID NO: 468 - DNA, 561 bp, Bacillus licheniformis
gtgcccgcgggcagacatatcgtttatatcatcacccagaccttcatgttcgatccaaaggctgagtgcgattgcaaatggaatcgggatgccgactatgtagcgccctactattttgaattgatttcacatgctccgtatcctgaccggctgccggcacaccctgcttatattgaacccgttaactgtcaaatatacagcggaagcgcatctcaaacgggattgatttacctgtctgacaaagcaggaaaccccgttgaaaaatccggccgagaaggtctgtatatctctttggtcaaccaggaagcgcatcgtttaaagggctatttatattactttcaaaatggagaatatcaagagttcatgatcagtcaaactaaagctcaagcattctcctacgaactcgctcctgaaaccgtccagacttatccgataaacttaaaaatactcgggagcaattatttccgatttctgtcgacatccataccgccggacggagcataccgggacgctccttttccggcgaggatgatttactactccaggctttatacgtggtag

SEQ ID NO: 469 - DNA, 162 bp, Bacillus licheniformis
atgtctgcccgcgggcacatgctggagcctgatgttgatttccttggacgaatgagcgggaacgatgaatggaaaggtttgcgagggccggtcatttccttcaaagaagacggatatatgaattcggtcttcctcattcgcatggttgcagtagacgtatga

SEQ ID NO: 470 - DNA, 684 bp, Bacillus licheniformis
ttgggctctattcaatgggagtatatttttaatgcagaattggctgcgaaatcgtttccttatgtgatgcaaggcatatggaatacgcttttcatttcttttgcgagcatgtttgccggtttaattctcggttttttcatcgcgcttgggcgcatgtccgggctcgctttgcttcgttggccggcaagaatctatatctcgtttatgagaggcgttccgatccttgtcatactatttatcctttatttcggttttccttatatcggaatccaatttacggctttggctgctgccttaatcggcttcagcatcaacagcgccgcatacattgccgagattatccgctcggccctgtcgtccgttgacagagggcagtgggacgctgcaaaatcggtcggattctcctactggcagacgatgcgccacgtgattgtccctcaatcggttaggattgcgctcccgcctcttgcgaacgtgatgcttgatctcgttaaagcgtcttccctggccgccatgatcaccgtgcctgaattgtttcagcaggcaaaaatcgtcggcggacgggaattcgactatatgacgatgtacattttagttgccttgatttactgggccatttgctcggggatcgctttgctccaggatttcctggaaaagcggacagaggtttatatcaaaaaataa

SEQ ID NO: 471 - DNA, 876 bp, Bacillus licheniformis
gtgaataaattgcatacgtataagcgcattacattgttgataactgtgttggcgcttgctcttataacagctgcatgcagcacagctcaaaataaggctgaaaacaaaaaaacggcctgggatgagataaaggaaaaagggaagatcgtggtagcgacttcaggaaccctttaccccacttcatatcatgacactgattccggcaaggacaagctgaccggctacgaagttgaagtcatccgtgaagcggctgaacggctcgacctggatgtcgaatttaaagaaatgggctttgacggcatgctgactgcggtggggagcggacaagtagacgctgccgccaacgatattacgatgacagacgaccgcaaagaaaagtttttgttctctacgccttataaatattcattcggaacggctatcgtccgcaaaaaagacttatcaggcatccacacgcttgaggacttaaaaggaaagaaagccgctggtgcagctacgacagtttacatggatatcgcacgcaaatacggagcagaggaagtcatttacgacaacgcgacaaatgatcaatttttaaaggatgtagcgaatggaagaaccgacgtcatcttaaacgactactaccttcaaaagctcgcgctctccgcaatgcctgatctggatctgacaattcatcccgatcttaaatactatccgcatcagcaaggcatgatcatgaaaaaaggaaacactgaacttaaaaaacaattcgacaaaacgattgatgaaatgctgaaggacggcacaatcaaaaagatttcgaaaaagtttttcggcggtgccgatgtttcgaaaaagcaggatatcgactatatcgatgtcgatgtgaataaatag

SEQ ID NO: 472 - DNA, 135 bp, Bacillus licheniformis
ttgatgattaaaatatttttcatctttcttatcctccttatgtttcaatttgccaatacctttatgattccatctttcaccttaaaaagtaaagcaggttgcacaatcaatcattttattttttcccaatactaa

SEQ ID NO: 473 - DNA, 552 bp, Bacillus licheniformis
atgaaaaatattttaatcatcaacgggcatgaagcctatccccatgcaagaggacagctcaatcacactatttttacagcgatggcggacaagctgagcgaaaaatatgaagtgaaaaaaacagtggtggcagacggctatcaaatcccggaggaacacgagaaattcaagtgggctgatgccgttatttatcagacgcctgtttactggttcagcgttcctgctttatttaaaaaatatattgatgaaatttatgagtacgggcttttttatcaagggtctgaagactacggaagaggcggactgtttaccgataaaaagtatatgttttcaaccacatggaacgcgccgaaggatgtattctccaaggcggggacattcttcgaaggtaaaagccttgatgaagcgctgtttcatttgcacaaaatgcaggaattcgtcggcatgaagcctttaaaaacattctctgtccatgatgtaatcagcaatccgcaagtggatcaatatttagctgatctggacgcccatttaaaagaagtattttcgatttaa

SEQ ID NO: 474 - DNA, 727 bp, Bacillus licheniformis
atgtttttaaaaaagctgactttacttcgggaaggagttccttcttatgcaaaatatccattttcaattcctgctattcaacatttaaaagaactgacgtttcaaaaaaacgtaacattttttgtcggggaaaacggatcgggcaaatcgacgctgcttgaagcaatcgcagataaatgcgaatttaacacagccggcgggggaagaaataacacatatgaagtgtacggctccggatcggctcttggagactatatcagattgtcgtggcttcccaaagtaacaaacggcttttttctgcgcgctgaatctttctatcattttgccactcatattgatgaagtggatatcacgggatttcgaagctacggaggcagatctcttcacgagcagtcgcacggcgaatcttttttatcgcttttcaagcatcgttttaaagaaaaggggatttatcttctagatgagcctgaagcggccttatctccggcaagacaagctggcattcttgaaaatcattcatgatttgacgaaatccagccaggctcagtttatcatcgcttcccactcccccattttattagggtatccggaagccgaaatctttagttttgatggtgaacaaatcgctgaagtgaactatgaggatacggatcattacactttaaccaagtattttcttcagcaccgggaaaagcttttggcggagctgtttttagatgacgtttga

SEQ ID NO: 475 - DNA, 1437 bp, Bacillus licheniformis
atgattcatcagcgactacgcccatttccagatcatttcctatggggatcagcatctgcagcctaccagatcgaaggagcctggaatgaagacggcaaggggctttcggtttgggatgtgttcacaaagattcccggaaaaacgtttaaaggaagcaatggagacattgcggtcgaccattaccaccgttttaaagaagatgttgctttaatggctgagatggggttaaaagcataccgcttttcagtcagctggccgaggatttttccgcagggcaggggagaagccaatgaagcgggtttgagattttacgatgacttgattaatgagctccttgctcatgatattgaacctgttttgacgctttatcattgggatcttccccaggctttaatggatgaatacggcggctttgaatccagaagaattatagaggatttcaatgcgtattgcgttacgctctataagcggtatggaggcagggttaaatattgggtgtcccttaacgagcaaaattacaactttaatcacggctttatcacagcgatgcatcctccgggtgtgaaggatagaaaacgcttctatgaggctaaccatattgcatttctagcgaatgcaaaggcaatcgattcttttcgccggtatgttcccgatggaaaaatcggaccgagttttgcttattcgcctgcatatcccctctccagccgtccggatgatatcctcgccttcgagaatgccgaggaatttacaaactattggtggcttgatatgtactgccggggaacatatccggacatccctttaaagtatctgaaggaaaaaggctgggcgccgacaattgaagatggggatatggagcttttagcaaaaggaaaacccgattttgtcggtgtgaattattatcaaaccatcacatatgaaatgaatcctcttgacggggtatcggaaggaaagatgaatacgaccggccaaaagggaagcaatcaggaaacaggcatgccgggtttatacaaaacaaaaaggaaccctcatcttgagacatcgaattgggattgggccattgacccgatcggtctaagaatcggacttcgcaggatttccagccgctatgggcttccgcttttcataacggaaaacgggctgggggaattcgataaggttgaaaatgacggcacgattcatgatgactacagaattgcctacttgcgtgcgcaccttgaacaatgcagacaggctttaaacgacggagtcgatttaatcggctactgcagctggtcatttacagatttattgagctggctgaacggctaccagaaaagatacggtttcgtttatattaaccgtgatgaagagaatgtaaaggacttgaagagaattaaaaaagacagcttttactggtaccaaaacgtcattcagacaaacggggaagagctttag

SEQ ID NO: 476 - DNA, 399 bp, Bacillus licheniformis
ttgatcaaaaagtgggaagcacaagaaatgacgatgtcataccatcagtttaccgtttatcagaaaggcggaaagccgcccgttatggattggacagacgaggatattaaaagaggatatacaacgggagagcacgcggtctcgtttgaagctctcgaaaacacggcatcttcagtagaagtccgtttgaatgtccaaaaacaggtgctctccttcaacaggcgcgtcaccgttcctttcgaagtgctttatgacggggtcgaaattgcaagcgttctatccaagaaattgacatgcgatatcccgcaaggcgcctatcagctgacatgctatacaataatgcctgatcacagcggcactgcacagatcacctatcttctcgattttaaacaggattaa

SEQ ID NO: 477 - DNA, 447 bp, Bacillus licheniformis
atggacaagattaaatctttgctgatcaccttgctcgccgtcgccgtcgtgatcatcggtattgtatctggcgactttttcacttcagaacaccagccttcgggccggcaaaacggctcaaactacgatgaagtgctgatttttccttcggaccgctatcctgaaacaggcgcacacattcgaaaggctatcaaaaaagggcactccgaaatctgtacgatcgacagggacggagccgccgaacgccgaaaggattcattgaaagatgttccttccaaatcaggctatgaccgcgacgagtggccgatggccatgtgcgaagaaggcggaacaggtgcttctgtcgagtatatcagcccgtctgataaccgtggagcaggatcttgggtgggcaatcaggtaagcgattatccggacgggacgaaagtacttttcaagattaattaa

SEQ ID NO: 478 - DNA, 141 bp, Bacillus licheniformis
ttgcttcgcaagctattgcttgaaggaggtgcttcacagcgtttcacttcttcacagccgggggattacaagacggcgaacttcttccgcaacgacggcgaatccttttccgtgttctcctgctcttgcagcttctattga

SEQ ID NO: 479 - DNA, 1138 bp, Bacillus licheniformis
atgaaagcgatttaagctgaaattggggacgaaaattaatcttctcgtgttagccgttattctgatcttttcgtcagcactcgggattttcattatcaaagagctttcaaaagagttagaacagatggcgacagagaaagccaaaagcgatttgaaattgagctaccgttatttgaatgaatctcttgaaggtgattgggaagtcaaagaagacaggctctacaaaggttcgacccttatcaacggaaatgaagaactcgtcgaccaaatcggcaatgatacgaaagacactgtcaccatctttcaatatgacacgcgcgtatctacaaatgtgacggtagacggaaaacgcgctgtcggaacgaaagtgtcttcggaggtagcaaatgcggttttaaaagaaggaaaaaacttttatggaaaagcagatgtagcgggaaaaacatatcaaacggcatatatgccgatcaaagacaagagcggtgaagttatcggcatcttttatacaggggccgaccaggatatgatcacaagcactcttcaatcgttcctgaaaatttttgctatcgttctgactgcttcaatcatcatctccattttgcttgtcctcattttcaccaaaaggataggcggaaggctcagaatgctgactcatgcttttgaacaggcgggcagcggcaatttgacaaccgagatccaggatgattcgacagatgaactgggcgacttgtcacatcatttcaatcaaatgaatgacagcctaaaccggctgatgcaaaaaatttcacagtcgtcgcacagtgtagctgccgcttctgatcagctgacatctggagctgaagaaacaagcctcgcttctgagaaaatcaccgaagccgtccagcatatcgcaagttcatcggaaatgcagacatcggggatagcaggcagcaaacaagccgttgaacaagtttccgccgatattcaaaacatatcagaaaacgctgcgatcctgaatgaaaagagccaatacgcccgcaaaaaagcaaaacagggggcaaaagatatctccgaaacgatgcggcaaattcacacgatgcatcaatcggtcatcaaagcggagaaatcattgaaatgcttaaaatacaagatcatatga

SEQ ID NO: 480 - DNA, 741 bp, Bacillus licheniformis
atgaaagtctacgaagcggaaaccctaatttcagctatgaagcaaagatctgatgaatataaaaatttgagagaacagctcgtcagcttaaaaaaagcgttaaacagcgtcgcagaacttgatgagtttcaaggaaaaggcgccgatgccattaaagcgttttacagagacctatcaggagtcgtagacggctggctggatttaaccgatatgcagattcagtttctgaatggtgtatcttctgctgccgaaaatgccggactttcagaggatacgttcgttgatgttcaatttcttgaacaggagcttgcaaatgtccacattcactctcaaaacatggtctccgcacagcagcaagagctgtcgaatattttaggacagatagatgatttaatatcgctacagccgttctcatccgatgaaatcaaacagcagcttgacgctgcaaaccaaaacagaaaagacacaatcaaggctgtcgaagatcttgatggactgctcaaaagagaatactcggcctctgaacatattcagcaaatgatccagaccgactattccgccttaatcgacgcaacaggaaaagggaaaaatgcgtctccgttaaactacaattcacatatctatcaaaacagtgaagtctataaaatgaaacatcgcatgcatcaagaggcaagaagctacatcgcaaataaacaaaaacagtatgaaacaggaaaagccgaaaaagcagaggaactttag

SEQ ID NO: 481 - DNA, 2055 bp, Bacillus licheniformis
ttgaatgaagaaggttaccggcttggaattgatattggaggaacttttaccgatcttacattgttaaatccggcggacggaagcatgaccgcagttaaaacgccgaccgttcccgaagatccggcccgaggaatcatcaacggcttggctctcttgaaaactcggggtgtccagccttcagaaattcatcactttgtacacggcatgacaatcggtttgaacacattattacaacgcaaaggggctgatattgctttattcgtaaccgaaggtttccgtgatattctttcgcttcagcgtctccggcttccggtaccctacgattttagatctagaatgccggagcccctcattcctcggaaaaacgtgtttcccattcaagaaagaatgctttatgacggctctgaaaagctgccgcttcatatggaagatatcgatgaggcggttggacaagctttaagaaaaggcttaaaaggaatcgttgtttcttttttgcacagctatcggaatccgctccatgaacgccaggctgccgaacggatcaggcaaatagcgcccgagcttgaggtggcaacgtctgcggagctttggccgcaaatgagagaatacgaacgaacggttatgtccgtcgcgaatctatacatcaaaccgaatatccatcactactttggaacgctgaaagagaggcttgtccaggaaggaatatcggcgcagccgtttatcacccagtccaacggaggactgatggacattgaatcggctgccgaggcacctgtcaaaacgcttttttccggaccggcagcgggggtcataggatccatcagaacggcggaagccgccggcgaggccaatatcatcacctttgatgtcggaggaaccagcgcagatatttcgattgttgaaaaaggagagccgacctttacccagtcaaatcaaatctcgggatttccgattgcgattccatctgtagcaatgtattcgatcggtgccggcggaggatcggtggcatggattgacagcggcggtctcttgaaagtagggccggagtcagttggctctgatccggggccggcctgttacggaaaaggaacaaaggccgcacttacagatgcgtttcttatatgtcattatttaaacccaaacaggtttgcagcaggaaatatgaaactgtaccgggaaagagccgaaaaagcgctcctcccggttgccgagtatttaggcacagatgtggagcaagccgcggataagatgattcaagttgcgcttgccaatatgtacacggaactaagcaatgtcatggagcaacacgggtttaacccgcgtgaattcagccttatggcttttggaggcgcaggcccggttactgctaattttttggctgaggaaattcaggccaaaaatgtgctgatcccgccgcatccgggaactctatcggctttgggcgcactgacggctgattttatctacgatgctgtatgttcaagacaggtgctgcttgagcaaataaaaacggctgagttaaaagtggagtttatgaggctgcaagaacaggcggaaacatggctgcggaaacaacgggcggacatggtgactgaagcctctcttctttacttgcttgatgcccgttataaaggtcaggcgtatgaaattgagctccctgtttcaccggaatggctggaaggcgaaagtacgagtgaaatcgcagactcctttcatctcttacatgggaagcaatatggacacagcgatgggaaagcaagcattgaattgatgaatatgcgcgtccgcattataggcaagacgccgaaaccgccaggcggaaaaggatgtcaaagtaatctgcccgaagctgaacctgtcagccaaagaaagatcatcatgaaaggcggtacatatcaagcctccgtataccgccgttcagatttaaggagcggacagagaatagatgggccggccattgttgagcaggacgatacaacgacgctgattttgccaaattggagcgggaaaaccgatcatgccggaaatttgatcattgaacggaaggagagctga

SEQ ID NO: 482 - DNA, 1995 bp, Bacillus licheniformis
atgcgcacagatcctgcccggctggaaatgatgagaagctactttaacgcgatagccgcgggaatggggcacgttattgaacggacgtcctttaccacatttgtaaaagaatcggctgatttcgctactgcgcttgcgacgccggaaggggagtttttcgtttatccgaaaacaatcggcgtcacgatttttttagggctttcattaaaacgggtcatcgaagaaagcggcccatttgaaccgggagatattatcctcacaaacgatccttatacaacggacggattggcgacccacttgcctgatattcatgtggtgaagccgattttcttggagggcgagataatcagttacgcgtggtgctttgtccattgcagcgatgtcggcggccttgtcccggcaagcatttcgccgaccgcgacagacatccatcaggaaggcctgagaataccgccggcaaggatttacaaaaaggggagagaaaatcgcgatatattgaaggttttgcgggcaaacagcagggttcccgacttaaatgaaggggatattcatgcgatggtggccgcggtcaatacggcggagaatcgattgacagaaatggtcggaaagtttggaaaagaagcggtccaacaaggaatggatgatttgctcgaacaagccgcgatgagagccggacgggtaatcagcaggattccggaaggttcatacagtttttcagattatcttgatgacgatatgatttctgacgttccgatccgcttggctgttacggcaaacgtctcgggaggggagatcacattggacttttcagactgtgatcctcaggtgaagacagcatttaaccttgtcactaatggaagcaaacattcatttctatatcagggcctgatcaactatatcataagtgaagacccgtatattccgattaacggggatctgacacggccgatccaagttatcgctccaaagggtacgctggttcatccggaatatcctgcggcggtcggcattcgtcattcgatcacgatgagactttataatgctgtactgggcgctttggcaaaggcgcttccgaaagccgtgcctgcagcaggcgccggtcagtcagcgattgtcgtactgtcggttcccgatgaatcaactggcagcaggaagatgtcggtggtcgaaccgatgggaggcggaggaggcggccagcatgacatggacggagcagatggaattgaccatgcctccggatttttgaaaaatacgccgattgaaagccttgaacagcacatcgacatccatgttcgccgctatgaattgatcaaaaatacagccggagccggttttcacaggggaggccatgcaatcgggctggagtttgaagcggcggcaccagaatcaattgtgaccgcaagagggatggagaggatgcgttttcatccgtgggggctcgccgggggaacggcaggagcgctcgggcgggtgcgcctttatccggatcagcctcaggagaaaacgatgtcgaagatcgatgttctaaagctcaataaaggggatgttatcagcattcattcaccaggcggcggaggctggggaaatcccttccgccgggaagctgaatcgattttaggagaagttgaagcgggcttgctgagcccggaagcggcatatcatcaatacggcgttgctgtaaaagaaaacggcgctggctccttcattattgatctggaagaaacagctgaaatcagaaaaaagaaagcaggcgaacatcggaaacaatgggatttcggaatcgccagagaagaatacgaacggtgctggacagaagaagccagcagcacattggcccggcttctgcgacagcttccggctcatcaaaggtcacatgttaaacatttagtccaccgttatttctcaaaagaacataacggtccgatcagtaaaagcgaagttgcggccgctgtggaaaaactggctggaaaaaataacacgggaatggtgagatga

SEQ ID NO: 483 - DNA, 1083 bp, Bacillus licheniformis
atgaaaagtaaaatttctgctttatttattctgtctcttgcagcggtgctcctcctttcgggatgcggcggaaatggaagtcaggaaagcaaacaatcagatacagtcgttatcggcgtctatgggggcgattgggaaaaacatatcaagccgagcctcgaatcttttgaaaaagaaacagggctgaaggtcaaagttgtcgcagggacagactctgagtggttcacaaaactcaaggcatcgaatggcagaaatgctccctatgatctcttaattctgcagccggacacgattcacagagcgcagtcggcgggattgctggcaccgatcgatcaggaaaaggttccgaatgtccgcgatctgtaccactctgttcagaaacgcttcaccgatgatggaaagcagtatgcggccggtttcagtatgggacaactcggaattgtctaccgaaaggatcttgtaccacaggagcctaagcgctggacggatctttggaacagcagctataaaggtcatgtcgccatatcatcgccggcttattcggcggggcttcagttttttgtaggattaatcaatgcccagggcggcctggagtcaaacgggaaagacgtggataaagcgttcaacagcttggctgatttaaagaacaacataacggcctatcccgataatccaggctcgatacaaacgcttctggaacgtggggatgcatgggttgttccgttttgggacggccgcgctttttctttgcaggatgcaggtcttgacctgggatttgcatatcccgaggaaggtgcagtcgcagcagttgcaagctgggctttaatgaaaggaagtcctaatcaggataatgcgtacaagctgttaaatcatctgctcagtccagaagtgcaaggagattttgccgatagaacgttttacggcatggccaataaaaaagtgaaatacagcgataaattaaaagggaagatcaaagtaggggaggattattacaggaatttaaaatgggttgactatgaagtcgcggcaaaagatctaggcgattggacaaatcgctggaatcaagtacttggcggaaaatag

SEQ ID NO: 484 - DNA, 1119 bp, Bacillus licheniformis
atgagcgcaattcagattaggcatgtcagccggcatttcggaaacaccatcgcattggaagacgtacagcttgaagtcaaagaaggggagtttttctccctccttggtccgagcggctgcggaaagtcaacgctcctgaatattattgccgggttccttgaaccgacgtcaggttttgtatatataggaggacgagatgtaactgatttgccgccatacgaccgacatatcggaatggtttttcaggattatgctttattcccgcatctcagcgtttttgacaatgttgcatacggcttgaaagtccgaaaatggccccgccgcaagattgaagaaagggtgatggaatgcctcgctcttgtcaggcttgaagcgtttgctaatcgcatgccccatcagctgagcgggggtcagcagcagcgggtggcgattgcccgggcattggccgttcagccgtctgtgcttttgctagacgagccgctgagcaacctggatgcgaaacttcgaaaagaaatgcagacggagctgcgcagcatccaaaagcgcgtcggcattacaacgattttagtgacgcacgaccaggaggaggctttaagcttatcggacaggattggaattctcggatgcgggaggcttcagcagctcggcactccgttggacgtgtaccgcacgcctgccaatcaatttgtggccgaatttatcggacaggtcaatttactgaacgcgcgtgcgtcgaagatacagccttcatcgggcggctatggatacgaaacggtcgatttcgaagtgtatgaaggcgttccgctgacatttgaaatcaaccaggaactctcaaaaaaaacttctgtattgttcatggtgcggcctgagaggatctcagtctccttcgagaagcaaaagaacaggctgattgaaatgcctgcaacaataaccgaagtcagttacgccgggcatgctctcaggctgaaagccgctgttttcaaaggagaatggatcattcagacgcccgatcctcaattccctagattgccgaaggcgggagatcaagtgtatctttctttggagccgggcgattttgttccgctggatgttaaggaggatgcagatgagggctgttga

SEQ ID NO: 485 - DNA, 867 bp, Bacillus licheniformis
atgagggctgttgaacaaaaacggttttattggtttttgctagttcctgtccttttatttctcggcgtttttcttgttttgccgcttgttctgctgctgttattaagtttcagagacgtggacgctatgatgaatacgctcgatacgtatagtttttctcaatatgtcgaggtgttctcttcagacgtttatttgaaaacaatcggtataacgatttggacggcgttgaagaccactgttttatgccttgtgatggcgtatccggcggcatatttactcgttaaggcgccaaccggcaggctgcgggctttgttttacattttgcttgtttcccctttattgaccagtgttgtcattcggacgttttcctggattgtgctgctttcgcaaaacgggatcgtcaacgaggcgcttatcagtatgaagatgattgaaaagcccctgccgcttttatggaatatgaacgcagtcatcattgcatatgtccaggttatgctgccgtttgcagtactgccgcttgccagttctttaagcgaagtgaaacctgatcttaaatttgcttcgatgagccttggagcgggcaggctgcggacattttttttcgttaccttgccgatgacggttccgggattgctgacaggagcaatgatcgtgttttcgctttctgccggaagctatattacgcctcttctcgtcgggggaaggatgcagccgctcctgccgttgtccatctatcagcaggtcatgcaagtctttcatcttcctcttgcagccgcaatgtcgattactttattagccgttgtcagcgtggttattggaatccttggcattttccaaaagcgttgggaggcgagaataaatgggtag

SEQ ID NO: 486 - DNA, 813 bp, Bacillus licheniformis
atgggtaggcgattgcgacgtatgcgcaggggaaaatggattgatgcgtgtgtttggacagcgggtttattggtatacttctttttggcgctgcccgtcttcgtgatcatactgtcggcattcagcccggacgaatatccgaagttcccgccatcaggcatctcgctgcgctggtttgccggagttttcagcagcagcggctggatggaatcgatttgggtcagctttatgctgcttctcgttgtaacgcctcttgcggtgatccttggaacagttgcagcctatgcattggcgcggctgaactttccgggaaaacaggcgattcaggcttttgttttatcgccgttgatgattccccaaatcgcattaggcgtatcatttctctatttattgacaatgattggggtaaacggcacgtttgccggtctggccgccgggcatatgctgatcagccttccgtatgtcgttcggacggtcggagtcagcatggcaaacgtggatcagaagcttgaactggcatccatgaatctcggcgcaggtccctggcataccttttttcatgtcatcttgccgcttattaaaccgggaatcattgcgggagccgtttttgcctctgtaacgtcattcggagaaatatcaatcagtctgtttgtttcttcaccggctgtcacgcctgtaccggttcgtacattcagctatattgaccagacatttgatccgagcgttcatgcgatttcggttatttttatcacggtttcagtgattgcgctgatcatcatcgaacggacgatcgggctctcaaaaaccatgtag

SEQ ID NO: 487 - DNA, 114 bp, Bacillus licheniformis
ttgaagcagaatgttaaatttgctgaactgtctcattctgaacggtatcttgaaatacttccgatgctccatacaaaaaagcaggctgagtttcgcctgctacatggtttttga

SEQ ID NO: 488 - DNA, 264 bp, Bacillus licheniformis
atgaaacttttcacctatttttcggtgaaaaaaacaaaattttcatttaaagtgaactgtgagcagaaaatgaatttatatcaagaaaagcagataaaggcaaacctgcggaaacgcagggacgcaaagccatggcctaaggtgctgacggtgctacggttgacaggttgccgaataaacagggagttcgcccgtttttattcgggcgggctcttttctttttatttccaatataatgttttattggaaacgacaaatctgtga

SEQ ID NO: 489 - DNA, 10749 bp, Bacillus licheniformis
atgggaaacacattttacccgctgacacatgctcaaaggcgaatttggtacacggaaaagttctatcccggtacaagtgtttcaaatttgagcggctttggaaaattaaaatctgcatccggaatcgattccgggttattgactgaagcgattcgcaagtttgttcgtacgaatgacacgatgcgattcaggctgatgtttgaaggagaggatgagccgaagcagtatatagcggaagacgaacctttccaaattgaatattttgatgcttcagaaagcggaggagcagacggcgttcttaaatggggacaagctgaggcgcgccggcccctgcctttgtatgacagtccgctgtttaaatttgccgttgttcgcattagtgaagaagaaagctggttttttgcaaaagttcatcatatcatttccgacggcatttctatgacgatcctaggcaaccggattacagatatttatttgaagcttgccaaaggggaaaccgaccttgaacctgtacagtcatcatttacggaacatatccagagcgaattggagtatgaaaattcgaagcgtttccagaaggataaagcatattggaacgcacaatatgaagcgattccggagcccgtatcgttaaaagcgagcgatacgtatcagatccaattggatgcagcccgcttttcaaaagagatttcccctgacctgtataaaaaaattcaaacgtattgtaatgaacacaacatcagtgtactctccctgttcctatccattctgcacatctatatgcaccgggtaaccggacaaaaagacgtcgttctcggaacatttatgggtaaccggacaaatgcaaaagaaaaacagatgctcgggatgtttgtgtcgacgattccgatgaaagcctccattgaagtacaccaagactttagtgcatttgtgcaggaaagaatgaaggaccagctgaaaatcattcggcatcaaaagtatccgtacaatctgctgattaatgatttgcgggaaagacagccgcatgtcagcaaattgttcgccgtctcactggaatatcaggttatgcaatggcagcaaaaagaaacggtgtcgtttcttaccgagccgattttcagcggcagtgaagtaaacgatatttccattcatgtgaaagagagatgggataccgggacgcttgcgattgattttgattacagggaggagctttttacttcggaagaaatggccgtgttatatgaacggctgatgacgctgcttgaagatgccctgctgtctccgcaaaaaacaatcgctgaactggagattgttcccgcttttgaaaaagagcggctgttaaagcgtgcatcaagccaaaccattgcatatgacaagaacatgaccctgcacggtttatttgaacaaaaagcagccgatcatcccgaaaaaacagcggttgtatatgaaggacaaaaactttcgtaccgggagttgaatgaacaatcgagccgcttggcaatggcgcttcggagaagaggcatcgggcctgatgctccggctgcgatagtgatggagcggtcagagcgggtcatcacggcgatgctgggcgttttgaaagccggcggagcttatgtaccgatcgatcctggatttccggaagaaagaatccgttttatgctggaggattcaaaggcgaaagcggttatcacagacagcgggctgacttttgaaacggctgaaacggtgcagttcagcgaagcgctttctgaatcgcgggaaaacggctatccgtcttcagcggcaggcgccgggcaccttgcatacatcatttatacttccggtacaacgggccgtccaaaaggcgtcatgattgaacacaggcaggtccaccaccttgtcagaggacttcaacaggccgttggtacatacgatcaggatgatttgaaactggcgcttctggctccatttcattttgatgcttccgttcagcagatttttacgtctctattgctcgggcaaacgttgtacatcgtaccgaaaaagacggtttccgacggacgcgctttatcggattattaccgccggcatcaaatcgatgtgacagacggtacaccggcacatttgcagcttttggctgcggctgatgatctttcaggcgtcaaactgaggcatatgcttgttggaggagaggctttatcaagggttgcgacggaaaggctgcttcagttatttgcagaaacagctgaatccgtgcctgctgttacgaatgtttacggaccgacggaaacttgtgtggatgcctcttcttttacgattacaaaccgcacagatcttcaatacgatacggcctatgtaccgattggccggccgataggaaataaccgtttttatattttggatgaaaacggcgcactccttcctgatggcgtcgaaggggaattgtatattgcaggagacggagtcgggcgaggctatttgaacttgcctgacatgaccagagacaggttcttgaaagacccgtttgtatccggaggtctcatgtatcgaacaggggatactgcacgttggcttcctgacggtacagttgattttatcggccgaagagacgatcaagtgaaaatccgcggcttccggatcgagcttggcgagatagagtcggtgctgcaaggagcccctgctgtcgaaaaagcagttgtcctcgcgcggcatgaaaccggcggcagccttgaggtttgcgcttatgtcgttccgaaacaaggcggaaagattcacattcagggactgagggagcacttatccaaacacctgcctgattatatgatcccttcctgctttgtcgagcttaatgaaataccgctgacggcaagcggaaaagtcgaccggaaagcgctgcttcgccatgaggtgtctgtcagcgggactgcagaatatgcggcgccgagaaatgaatgtgaagaaaaaatggtgggtatatggcaggaagtgctcggagctgaacaagtcggaatccacgaccagttttttgatctgggcggccactctctcaaagcgatgaccatgctggcaaaaattcataaagctttcggagtcgaagttccgttgcaagtcctatttgaaaagccgacagtagcggcgctgagcggctttgtttctgaagccgagaaagacggattcgcggtaattgaaccggcgccggaaagtgacgattatcctctttcattggcgcagcagcgaatctatatcgtcagccagctggagggtgccggagtcggctacaatatgccggccgcggcgatgcttgaaggcactcttgactctgggcgccttgaagctgcttttcaaaaactgattgataggcatgaggcgctgcgtacttcgtttacagttgtggatggcgagccgaggcagaccgttcatcaaagggttcagttcaagattgagaaggttaaggcggaaggcaagcagatcgaacaaatcgcgaaatcatttgtccgccgctttgatctcgccaaagctccgctgatgagagcgggtctcgtcagccttgcagacggcagacatctgctgttgttcgatatgcatcatctcgtatctgacggcgtgtcgatttcgatcatattgaatgaactggccgcgctgtataacggggaggaattgccggagctgcgtttgcattacaaagattatgccttctggcaaagggcgcaggcacaagaaggctttcaaaaagaagaggcctattggaaaagcatgtttgccggcgagcttcccgtactgcagctgatgacggacgagccgaggccgcctgttcaaagctttgaaggagacagggtatccgcagtcctgccaaaagacctgaaagaaaaattagccgtgctggcagagcaaaacggcgcgacattgtacatggtcatgctgtctgcgtacaacatgcttcttgcaaagtactccgggcaggaagatgtgatcgtcgggacgccggcggccggccgcagacattccgatctggaaggaatcatcggcatgtttgtcaatacgctggcgatccgttcaaaagtggacccgggcagaacgttcgcagacttcctgaatgatgtaaagaaaacggtaatcgatgcttttgagcatcaggattatccgtttgagcggcttgcggagaagtttggcgcatcgcgcgatttaagccgtcatcccatctttgacacgatgtttattttgcagaatgcatgggaagacattccgctgctcggcgatttgcacctctcgatttatgaaacgaacttcaatattgcaaaattcgacttgacgctgcaggcaaaagaagagcatggagaattgattctcgatttggattacagcacgaagctgtttaaaaaagatacggctgaaaggatgctgaaagcatacttgaaccttctggaggacatggcggctgatccgatgctcaggatcggcgagtacagccttttgacagaagaagaaacgaatcgccagctcgtcgcgttcaaccccgcgacaagcgattatccgcgggagaaaacgatcgttcagctattcgaggaacaggctgcagaaagaggcggttatcccgccctgcaatttgaagacaaagtatggtcatatgatgagctcaatcggaaagcgaaccaattggcaaggcgcctccgcaaaagtggcgtgcaagccggcacgacggcggccattcttacggccaggtcggctgaaatggtcatcggcattctcgctgtgctgaaagccggcggggcttatgtgccgatcgatcccgatcatccggaaaagcgtgtgcaacatttcttcaaggacagcggagcggcggttcttttaacgcaaaaggcgatgaagccgctcgctgaggcggcggaatttggcggcgacatcctatttgttgaggatgaaaacctttatatgggagatgcgtctgatttgcgccttccgatttctccggaagcaatggcaaatctaacgtacacatctggaacgacagggacgccgaagggcaatatggtctctcaccggaatattttgcgtactgtaaaaaacgcgaattacttggaagtgatggaatccgatatcgttctttcgatttcaaattatgtgttcgacgcctttatgtttgatgtgttcggttcattgctgaacggcgccaagctggtgatagctccaaaagacacgattcttgatatgagccggctcgcacatgtactcgaaaaagaaaagattacgattttaatgatcacgaccgcattattcaatctgctgacagacatgcggccggacagtttgaagggactccgcagggttctgttcggcggcgaacgtgcatctgtcgatcatgtcagaagagctctgaagacagttggcagagggcggctgcttcatatgtacggtccgtctgagagcacggtctttacaacctaccatccagtcaatgaagtgccggacgatgcgcaggctataccgatcggaaagcctgtcagcaatacggaggttctgattcttgattcattcagcaatgtacagccggcaggggttgcgggagaattatgcgtcggcggagacggccttgtccgcggctattttaaccgccctgaactgacggctgaaaagtttacggcgcatccgttcaaaaccggcgaaaagatttaccggacgggtgatatggcgagatggcttgccgacggatgcctcgaatttatcggtcggattgatcatcaggtcaaaattcgcggacagagaatcgagctgggcgaaatcgagcatcatctcctaacgcatgacatggttcaggaagccgctgttcttgctgttgacaccggggcgggagatcaaatgatctgtgcatactttacggctgatcaggagctttcgagccaagagcttcgccgacatgcggcagaaggtctgccaggctatatgatcccgtctgtgtttatgcagcttgatgagcttccgctcacaggcaatggaaagatcgacagaagggcgctgcctgaaccggatatcgcgcaggccgcgcaaaaggaatatacggcgccaaggagcggcacagaagcgcagcttgccgatctttggcaggaggtgctcaatgtaccgaaaatcggtgtgcatgacaatttttttgaactcggcggacactctttactcggaatgacgctcatcgcccgcatccagcaagagatgaatgttgacctgcagctgaaagacttgttccaggcgccgacaatcgaaagcctggcccaggcggcggcaaaatctgagaaaaaatctgccgtttatattgaagcggcgccggaccgggaaacgtaccccgtttcgtcggcgcaaaaacggctgtacgttcttcagcagattgaaggcgctgagaaaagctataacatgccggccgttctccaacttgaaggaaagcttgacctgaagcgcctggagtctgccgcgcaaatgctgatcaagcgccatgaagcgttccgcacgacgtttgaaatcaggaacggcgaacctgttcagcggatttgggaagctgcggaattgaccattgatgtcatcgatgcagatgaacaagaagcggaaaagctgattaaagagttcatcaggccgtttgatttaacaaaggctccgttatttagaatgagcatcatacgtgtcacggaagaaaaacatcttttgcttgtcgatatgcatcatatcatttcagacggcgcttccgtcagcgtgctgatcgatgagatgacaaggctttatgcgggagaggcgcttgaaccgctgaggattcagtataaagactatgctgtatggcagcagcacttgctcactgaacggcacaaaatgcaggaggaatactggctcaaggagcttgacggcgaactgcctgttttgacgctcccgacagactatccgcgtccttctgttcaaacgtttgaaggaagccgtatcagcttttctctgaaaccggagcttgtccagcagctcagaagactggccaaggaaacggaaagcactttatacatggtgctcgctgcctcatacagtacgtttttatcgaaactgagcggacagagcgaggtcattttcggctctccggctgccgggcggccgcatgcagatttgagccgtatcatcggcatgtttgtcaatacgcttgcgataagaacgcgtcctgaaggagacaagccgttttctgcattccttgaggaagtaaaagaaacgacgctcggcgcatttgagcatcaagattacccgtttgaagaactgatcgagaagctgaacatccagcgcgacatgagccgaaacccgttatttgatgccgtcttttcaatgcaaaatgccgatttgaaagacttgtcaatggaaggagtcacacttaaaccgtatgattttgcccatcagactgcgaaatttgatctgacgttgacagcggcggaagaagacggacttctcgtttttgaaatggaatacaatacagctctctttaagcgcgaatcgatcaaacgctggagcgggtactgggtcaacctgctcgaagcggttgccgaaaccccggatgcaagtctttcagacctttcgcttctggatgaagcggaaaaacggcggatcgtccaaaagtggaatgagacgaagctcgctgtgccgcaggacaaaacagtccatgagctgttcgaagcgcaagtcctccgcacgcctgaccgcggggcagcggtgtacaacggcgtgcagtggacgtacaaagagctgaatgcgcgcgccaaccgtctggcccggctgctgatcgaaaaaggggccggccctgaacagcgggttgggatcatggtgaagccttcgctggaaatggcggccggcgtacttgcgattttgaaagcgggagcggcctatgtaccgatcgatcccggctatccggccgagcggatcggatacgtactgaaagacagcggtgcagaactgcttctgacgcaaacaaacttagccgtacctgaagaattcagcggtgaaacgcttcttctcgattcgatgctgagcgaagaaatcacaaatgatgatgaagtgaacccgcaggcaggtacacagccaaacaacctggcatacttgatttacacatcgggcacgacaggccagccgaaaggcgtcatggtcgaacatcaatcgctcgtgaacttgtgctattggcataacgatgcattcgcggtcaccgaacaggacaaaagcgcgaaatatgccggcttcggctttgacgcttccgtctgggagatgttcccgtactggatcgccggagcggagcttcatatcattgatgaagcgatccggatggacattacgcgtttgaatgaatatttcgaagagaacggaataacgatcacgttcctgccgacacagctgtgcgaacagttcatggagctcgacaaccagtcgctgcgcgtgctgcttactggcggagacaagctgaagcggatcgaaaaacggaactacacgctcgtcaacaactatgggccgacggaaaacacagtcgttgcgacgagcacggcaatcgatcctgatgaaggcatgctttcgatcggaaagccgattgccaatacgcgggcgtatgtgcttggacaaaacaacgaagttcagcctgtcggcgtcgctggcgagctgtgcatcgccggccgcgggcttgcgcgcggctatctgaacaagccggaggaaacggcgaagcgttttacggaaggcccgtttgtgccgggcgagcgcatgtaccggacaggggatgcggtcaaatggctggaagacgggcggcttgagtacatcggccggatcgaccagcaggtgaaaatccgcggcttccggatcgagctttctgaaattgaagtccagctcgcgcggctctctgaagttcaggaagcagtcgtcaccgacatcgaagacgcctacggcaacaaagcgctgtgcggctatgtcgttgcggacgaacagcttgatacagaaagcctcgcccgtaagctggggcagacgcttccggactacatggtaccggcgtattgggtgcagcttgatgagcttccggttacggcgaacggaaaagtcgaccgaagggcgctgcctcagcctgacgtcgaagcgcagacagccgaatacaaagcgccgcgcacagaaacggaacagctgttggcggacatttggcaggatgttctcggcatagaccgaatcggagtcacggacaatttcttcgcgctcggcggggactcgatcaaaggaattcaaatggcaagccggcttcagcagcacgggtggaagctggagatgaaggacttgtttcagcacccgacgatcggggagctcagttcttatgttcaagccgctgacgctaaaccgatcgatcaaggccctgtcgaaggcgaagtcacactgacgccgatccagcgctggttctttgagcgcaaatttacgaacgagcatcattggaaccaatcagttatgcttcacgctttatcaggattcgacccggaagcggcaggcaaggctttaaccaagctgatcgaacaccatgatgcacttcgcatggtttatcagcgaaatggagacgggattgttcagtacaacagagggctggaagaaacagcggttcgtcctgaagtcatccgcttcaatgaatcgggtgctgaacttgaagctgccgtgttaaaggaatcaaaccggattcaaagcagtatcaatttaaccgaaggcccgcttttgaaagcggcgatctttgagacggatcaaggcgatcatcttctcatcgtcattcatcatctcgttgtggacggaatttcatggagaatcctccttgaggatttcgccgccgggtacgcccaagctgaaaaaggggagccgatcattcttcaagaaaagacgcactcttttgctgaatatgcggctcgcctgaaagaatacgcaaggtcaaaagctttcgcgaaagaaatcggctattggcaggaagtcgagaaggcggagacggcatcgctccctaaagatgatgaagcagaggacaaacggatgcaccatacgaaaacggctgagttttctctctcgaaagaagaaacagaacagttgatgacaaaagttcatgaagcatataacacggaaatgaacgacattttgcttacggcgttgggcttggcgctgaaagagtggaccgggcaggaagactttatcatctgcttggagggacacggccgggaggacatcatggaaggcttgaatatttcccggacggtcggctggtttacaagccagttcccggcgctgattcaactgcgccattccgaagatatcggctatcaaatcaaacagatcaaagaagagttgcgccacattccgaataaaggaatcggctatggcatttatcgctatttgaccgaagaaggcaaaaaggcgcagccgatcaagcatgatatcagctttaactatttgggccagtttgcagagatggcggattcgggtctgttcacgagatcagctttgtcgtccggcgatccgctcagcccggaaacggaaaaaccgaatgcgctagacatcgtcggctatatcgaaaacggcattttgacaatgtcaattgcctatcattcactcgaatacaaagaaagcaccgtcgccgctgtcgctgaaagctttaaaacttatttgctgcaattgatcgatcattgcttagagcgggatggaggcgaactcaccccgagcgatcttggagatgacgaactaacgcttgaagaattagataaactgatggaaattttctaa

SEQ ID NO: 490 - DNA, 10767 bp, Bacillus licheniformis
atggggaaagaaaagattcaaaaggtgtatcctttgacaccgatgcaggaaggaatgctgtaccacgcaatgcttgatccggaatcttcctcttacttcacacagctggagcttgtcatagacggggaatttgatttggggatctttgaaaaaagcgtgaatcagctcgtgcgttcatacgatattctcagaacggtttttgttcatcagcaattgcaaaaaccgcgccaggttgtcctggctgaacggcaggcaatagtggaatttgaggatcttgcggacttggatgaaggaaggcaaaaaacccgcattgaccagtataaacaagatgtacaggcggccgggtttaatttggcgaaagacatgctttttaaaacggcggtctttcggcttgaccggaaaaagcaccatctcgtctggagcaaccatcatatcgtgatggacggctggagcatggggatattgatgaaacgcctttttcaaaactatgaagcgtttcgagcaaaccggacggttacgcttgatcagggaaaaccttatgcggactatattaaatggctcggcagacaggataaggatgaagcggcatcctactgggaacaccgcctttcgggtttagaaagcccaagcgtcattcccggcggaaaaacgcagccggattcaggatcgtaccggaacgaggagttcacgttcgtttgggacaaagacatggtggatgctcttctaaagacggcaaaccgctatcatgtcacagctcccaacctttttcaggcgatttggggagcagtgcttgccaaatataacagaacagatgatgtggtgttcggcacagtggtgtccgggcgcccgtcggaaattgacggaatcgaacatatggcagggctgttcatcaacacgatccccgtccgtttaaagatcgataaaaacgcatcgtttgcagagctgtttaaacaagcacagcagcatgcaattgacgcggaacggtacgactatgtcccgctatatgagattcagaagcaatcggcattggccggccgcttgatcagccaccttgtcgcgtttgagaactatccgcttgataaagagcttgaaaacggaacgatccatgagcggctcggcttttccatcaaggctgccggagcttttgaacaaacgaattacgactttaacttgatcgtttatccgggagcggagtggacgatcaaattgaaatacaacggcgcggcttttgacgcggctttcattgagcaggccgccggacatttaacgagactggcagaagaggcgattgcaaatcccgaatcaaaagcagtcagcgccagcatgttatcaaaacaggagcaacaaacactgctcgcttttaatcaaacgaaaaccggttatccaaaagaaaagacgattccggagctgtttgaagaacaagttgaagcctctcctgacaaaacggctgttgccgcagacggaagaagcctgacttaccgcaggctgaatgagaaagccaatcagctcgcgcgaaagctgaaggcaaaaggcctgatgcacggaaatgctgccgccattttgatggagcggtctcttgaagcagccgtcagcatgctggcagtgctgaaagcaggcggcgtgtacgtgccgatcgatcccgaatatcctgaagagcggattcgcttcttgctcgaagacagcggagcaaagatcgtccttacaaaagacagcccgcagatttcactggaagggtatgaggtactcgccgcaaatgcggtggatgcagaaaaagaagacaccgccaaccttgtacatgccaacaaacccgaagatcttgcctattacatttatacatccggatcgacgggcaagccgaagggcgtgatggtcgaacaccgcaatatcgtccgccttgtcaaaaatgcgggctacatcccgctgaagagcgacgtgaagatggcgcagacgggggctgtcagctttgacgccagtacatttgaagtgttcggcgcactgctaaacgggggaaccctttatcccgtcccgaaagagacgctccttgatggaaagcggttcagagttctcctggaagagaccggaatcacaacaatgtggctgacttcgcctctttttaatcagctcgcccagcaggatccgggaatgtttgcaaccctaagtgatctgattatcggcggagatgcccttgttcctggaatcgtcaacagagttaaacgcgaatcgccggaactctcgctttggaatggatacggacctactgaaaatacaacattttcgacgtgttttttcatcgatcaagcatatgagagaacgatcccgattggaaagccgatcggaaattcaaccgcctatatcgttgatgaacacggcgcgcttcagccgatcggcgtgcccggcgagctgtgtgtcggcggagacggggtggcccgcggctacttgaaccagcctgagctgacagatgaaaagtttgtcggcgatccttttgccgaagggaagcggatgtaccgcacgggcgacttggcaaaatggcttcccgacgggaatatcgaatttctcgggcggatcgatcatcaagtgaaggttcgcggcttccggatcgaattaggcgaggttgaagcggctttggcccgccttgagggaatttcagaagcggctgctgtcattcgggaaaacaataccggagaaaccgagatttgcgcctactacactgcagttggcgcgaggccgcccgcacagctgcggacagagctgtcccggtcgcttccggagtatatgattccggctcatttgatcgaactcgacagcatgccgctgacagccaacggaaaggttgacaaacggcagctgccggctcctatcgctgaagagactgacagattcgaagcgccgaaaaatgaaacggagaaaattctggcggcaatctgggaagagattctcggcatcaagcagccgggaatcgatgacaacttcttttctatcggcggacactcgctgaaggcgatgatgctgacagccaaaatacaagagcagctccaaaaagaagtgccgatcaaagtattgtttgaaaaaccgacgatcagagagctggccgaatttcttcaaggggaaacgaaagagaaaaccgctccgattgcgccggcgccgtcccgtgcgaattatccggtgtcatccgcccaacggcgtatgtacatcctcaatcagctcgaagaagcaagcacgagctacaatgtgccggcggttctgcttctggaaggcgaattggataaggagcgtctggaagacgcgtttcgggccttgatcagccgccatgaaacattgcggacatcgttcgaattaatcgatggagaaatcgttcaaaccatccatcaagacgcagtttttcacctgacggaatcagtggcggatgaagcggaagccgaagcggcgatcagagggtttatccggccgtttcagctgaataaggcgccgctcgtccgggcggaactcgtaaagcttgaagaaaagcgccatctgctgatgatcgatatgcaccacattattacggacggaagctccaccggcatattgattcgcgacctggccagcttctaccacggtgaagaggcgcctgctcctaagctccactataaggatttcgctgtgtggcaaaacgggccggagcatcaggagaaattgaaagaacaggaacagtattggctcgatattttcaaaggcgagctgcctgttctcgatctgccgtacgattttccgcggccttcaaaacgcagctttgaaggcgaccgtgtcgtctttggaatcaatcgaaaactgacggcagacgttcaaaagctgctttctgaagccgatgcgacactttatatgttcctgttggccgcgtttaatattttgctgtccaagtatgcgtctcaggaagatttaatcgtcggatcgcctgtggccggcagaacccatccggatctgcacaacattccgggcatgtttgtcaatacgctggcgctccgcaatcgtcccgaaggggaaaaaacgtttaaggaatttttgcaggaagtcaaagagacaagtcttcagggctttgccaagcaggactatccgcttgaagaactgattgaaaaactgccattgctgcgggatacaagccggaatccgctgttcagcgtctttttcaacatgcagaacatggaaatcccgacgctgaaactcggagatttgcagatttcgtcttactcggtgcgccatcgcacagcgaagtttgatctgtcgcttgaggccgtggagcatgatggggaaatcggtttgagctttgactatgccgtatccttatttaaagaagaaacgatcaggcgctggagcggccacttcttaaatgtgattaaaacaatctgcgaaaatcccggcattaagctccgggacatcgaactgctttcagacaaagagcgcggacttctcctggaagaagtgaggcgcagccgggcagaacgcctagaggagcggccgtttcatgtacggtttgaagaaaaggcggccgaaatgcctgatcagccggctgttgtctgcggggaaacaatcctcacataccgcgggctagatgaaagagcaaatcaaattgcaaatgtgctgcgaagtgaaggcatcggaaaagacgacgttgtcggcattatgctggatcgttctgcagaggtcgccgcggcaattctcggcgtaatgaaatcagggggcgcttttttgccgattgatccggaaatgccgacgagcaggattcaatatatgctggaagacagcaaagcccgctggctcttaacagaacattcccatcaagctgctctcgcagattggtataacgggagattgatagatgtgagaaacgacacgctgatggcaagcaaaaaacgaccgcatctaatccatgacggggcgagtctggcgtacatcatctatacatccggaacgacgggtcagccgaaaggcgttcagctggaacaccgcaatctggcaaactatgtttcctggtttatcagtgaggcgcgcctgtcagcttcggataaaacgatgcttttgtcttcctatgcgttcgatctcggctacacgagccttttcccggtgctgctcgccggaggagagctccatatcgtcccgaaagaaacgtatacagaaccggagacatttattcattatatcggtgaacaagggatcacatatatcaagctgacgccgtcgctgttccatacggtcgttcagccgcaaagcttcgctttggcaaaggggcttcagtcattgagactgattgtactagggggagaaaaaatcaatccgaaagatgtcgaacggttccattcccgctatccggacacccggttcatcaatcattacgggccgacggaaacgacgatcggtgccatcgctaaaccggtcgaaccgggcatgatccggcaattcgccgagcgcccgacgattggacggccgatttcgggcgccggagcactggtattggacgcttcccgccggcttgttcccgcgggagcggcaggcgagctgtatattacgggaagcgggcttgcaagaggatatgtgaacaaccgggaacttacggctgcgaagtttatcgaaaatccttacacaccgggcacattcatgtaccggacgggggatctcgtccgccgtcttccgaatggggagattgaatttttagggcggacggatgatcaggtgaaaatccgcggctacagaatcgaattgaaagaaattgaagaggccttcattggacttgaacatatagagagagcggtcgttctttcatttacggctgactcagggctagacgaactgtgcgcttatattcaagcgaaacgacagctgccggtttccgaactgagagagcgtctttctgagcggcttccgtcgtacatgatcccgtcatatttcgtaacggtggataaaatgccgcttgcggcgaacggaaaagtggaccgcagcgcgctgccggagccgcaaggtctaagtggtcaaagcgattcatatagagcgccgtcaaccgaatttgaaaaagccctctgcggcatttgggaggaggtgcttggcgttcggccggtcggacttgacgacaatttcttcgatcttggcggacattcattaaaaggaatgatgctgacagcggaaatccaatccaagctcggaaaaaaagtaccgttaaaaacgttgttcgattgtccgacagccggcttgctcgcccgcagtatcgaagccgatggacaggcagaacaaagcgggattcagcctgccgaaaaacgcgactggtatcccgtttcatccgctcagcaacggatgtatgccctccatcatattgaaaagaacggaacgggctacaacatgccgtctgttctcatgctggaaggcgtacttgatacggatcgcttaagacgggcattcgcagacttggtgaaccgccatgaatcattgcggaccgcattcgttgaaatcgatggccgcaccgttcaaattgtgcatgaaaaagcggacattgacttaaaggttattcatattcatgaagaggacgcagaagcacagatcaaccgctttatcagaccatttgatctcagcaccgctccgctgatcagagccgagctgctctccatcagctctgcgcgccatctgcttttgattgatacgcatcatattattgcggacggcgtttccagaagccttttcgtcaaagaaattgcacagctttataaaggcgcttcgctccctgaaccgaagctgcattataaagattatgcggtatggcagcaacaacctgaccagcaagaaaacattcggaaacaggaagacttctggctccggcagtttaaggaaaccgttccggaactcagccttccgctcgactttccgcgtcctcctgtccaaagctttgccggggaccgggttcactttaaagtatcaaaaggcaccgcccttaaaatccgccgtttgatggcgaaaacgaacacgacgctgaatattgtaatgctcgccgtttttaatctgtttttaagccgtcttgccggccaaaaggatattgtcgtcggctcagcggcagcgggcagaacgaatgctgatttgaaagacgtgccggggatgttcgtcaactcgttggcgctgaaaaaccatgtacctgatcaagcatcattcagcgggtttttggaagaggtgaaaaacaacagcctcgcagccctcgaccatcaggactatccgtttgaagagctgattgccaagcttgatttgccgcgcgatatgagccggaatccgctgttcaatgtcatgctgacaacggaagatcctgataaagaaacgctcgatttagacggtctgataatcaagccgtatgagacttcacatgccgctgccaagttcgacctgacactgggggcttttgaaaaagatgatgaaatcggtcttcagttcgaatatgcaacagatttatttaaaaaacaaacgattgaacgctggagcggatatttgcttaacctgctcgaagcgattgccgaaaacccggatgcaagcctttcagacctttcgcttctggatgaagccgataaacggcggatcttgtacgaatggaacgaaacagttctcgacgtgccgcagaacaaaacagtccatgagctgttcgaagcgcaagtcctccgcacgcctgaccgcggggcagcggtgtacaacggcgtgcagtggacgtacaaagagctgaatgcgcgcgccaaccgtctggcccggctgctgatcgaaaaaggggccggccctgaacagcgggttgggatcatggtgaagccttcgctggaaatggcggccggcgtgctcgcgattttgaaagcgggagcggcctatgtaccgatcgaccccggctatccggccgagcggatcggatacgtactgaaagacagcggtgcagaactgcttctgacgcaaagcggattaacgatgccggacgcatttaccggagaagtgatcgatttgaatagagaagcctccattctggccggcgagctttatcccgaggatgacatcaatccaagcgcagaggctcagtctgacaacctggcatacttgatttacacatcgggcacgacaggccagccgaaaggcgtcatggtcgaacatcaatcgctcgtgaacttgtgctattggcataacgatgcattcacggtcaccgaacaggacaaaagcgcgaaatatgccggcttcggctttgacgcttccgtctgggagatgttcccgtactggatcgccggagcggagcttcatatcatcgatgaagcgatccggatggacattacgcgtttgaatgaatatttcgaagagaacgggattacgatcacgttcctgccgacacagctgtgcgaacagttcatggagctcgacaaccagtcgctgcgcgtgctgcttactggcggagacaagctgaagcggatcgaaaaacggaactacacgctcgtcaacaactatgggccgacggaaaacacagtcgttgcgacgagcacggcaatcgatcctgatgaaggcatgctttcgatcggaaagccgattgccaatacgcgggcgtatgtgcttggacaaaacaacgaagttcagcctgtcggcgtcgctggcgagctgtgcatcgccggccgcgggcttgcgcgcggctatctgaacaagccggaggaaacggcgaagcgttttacggaaggcccgtttgtgccgggcgagcgcatgtaccggacaggggatgcggtcaaatggctggaagacgggcggcttgagtacatcggccggatcgaccagcaggtgaaaatccgcggcttccggatcgagctttctgaaattgaagtccagctcgcgcggctctctgaagttcaggaagcagtcgtcaccgacatcgaagacgcctacggcaacaaagcgctgtgcggctatgtcgttgcggacgaacagcttgatacagaaagcctcgcccgtaagctggggcagacgcttccggactacatggtaccggcgtattgggtgcagcttgatgagcttccggttacggcgaacggaaaagtcgaccgaagggcgctgcctcagcctgacgtcgaagcgcagacagccgaatacaaagcgccgcgcacagaaacggaacagctgttggcagacatttggcaggatgttctcggcatagaccgaatcggagtcacggacaatttcttcgcgctcggcggggactcgatcaaaggaattcaaatggcaagccgccttcagcagcacgggtggaagctggagatgaaggacttgtttcagcacccgacgatcggggagctcagttcttatgttcaagccgctgacgctaaaccgatcgatcaaggccctgtcgaaggcgaagtcacactgacgccgatccagcgctggttcttcgaacggaaatttacgaacgagcatcactggaatcagtcggtcatgcttcacgccccttcagggtttgacccggagctcgtcgaacagacattggcggcattgacagagcatcatgatgcacttcgcatggtttatcaaaagaataacggccgcctcattcaatataaccgcgggccggatgaccgttcgttcgcctttcgagtggttgacctgcgatatgtcaccgacattgaaacggaaatagccgctcaagcaaaccgccttcaggcaagccttgatcttgaaaacgggccgcttgtaaaggctgaacagtatcagactgcggaaggcgaccatttgctgatcgtcattcaccatttggtgatcgacggcgtgtcatggcggattctgctggaagactttgcatcaggctattcgcaggccgcacagcagcatgatgttgttttccctgataaaaccaattcgtttaaagactgggccgaagcgcttgaggcttatgcgcaaaccgaacgcttccttaaaacggccgattattggcgcagacttgaacaagagcgtatttgtgagctgccgaaagatcgtgctgccgcagaaagaaaagcggaaaacacctctgctgttaagtttgaattaagcgaagcggagactcgtctgctgctgacgaaagtgcatgagccgtatggaacggatatcaacgatatcctgctttccgctctcagcctgacgatcagggaatggacgaacggctccaatatttgcatcaatatggaaggccacggcagggaggaaatcattccagggatgaacatttcgagaacgacggggtggtttaccgcacaatatccagttgttttaaaaagccaagcagcggcagggttgcctgagaccattaaaaacgtcaaagaaaccctccggcgcattcctgacaaaggaatcggctacggcatccttcgctacttaacagaccggaaaaaagccggtgcaattttctcgatcaagcctgacatcagctttaactacctgggacagatcgacagggaggtgcagaccggcttctttgggccttctccttatgatatgggaagacaggtctctgaaaggtctgaagcactctatgcactgagcttcagcggcatcatcagcaaggaaaaattcatcttgtcatgttcattcaatacagaggaatatgacaggcagaccatacaggagctcatggacagattcaaagctttcctgacagcattgatcgaccattgtacagctaaagaagaacgcgaatttacaccgagtgatttttctgccggcgatcttgagatggaagaaatgggcgacctgtttgacgttcttgaagaaaacttgaaataa

SEQ ID NO: 491 - DNA, 171 bp, Bacillus licheniformis
atggacaggcagaacaaagcgggattcagcctgccgaaaaacgcgactggtatcccgtttcatccgctcagcaacggatgtatgccctccatcatattgaaaagaacggaacgggctacaacatgccgtctgttctcatgctggaaggcgtacttgatacggatcgcttaa

SEQ ID NO: 492 - DNA, 3849 bp, Bacillus licheniformis
ttgagccagtttaaaaaagaacatgtccaagacatatactatttgtcaccgatgcaggaagggatgctgtttcatacgctgctgcatccggggcaaggcttttatattgaacaaatcagcatgcaggtgaaaggctcttttcaaaaggatgtattggaaaaaagcatgaatgtcatcatcggcaggtatgatatattccgaaccgttttcgttcatgaaaaaatgaaacgtccggttcaagtcgttttaaaggaaaggtcatttcaggcagaagaaattgatctatcaggactttctgaagcagaacaaaatgagagaattgaagattataaacgaaaagataaagaaaaaggatttaacctctcaaaagacattccgatgagaacggcggtttttaagaaggggcaggatcgttacgaatgggtgtggagctatcatcatattctgcttgacggatggtgcttcggcattgtcgtacaggagctgttcgaagtatacaacgcgctccgtgaaaacaggccatacagcctcgggcctgtcagaccttacaaagaatatattaaatggctcgaaagccaggacaaacaaaaatcgctggtctactgggaacatcatttagccggattcgaagggcagacgacattcagcgaacagcggaaaaacccggagcaagccggcaatcagccggaagaactgctgtttacacttccaaaagaagatacagaagcgttcacacagctagcaaaagcgcatcataccacgttgagcacggcgcttcaggcggtgtggtcggtgctgctcagccgctatcagcgatcccgcaatctgatcttcggtacagttgtttcaggccgccccgctgacattcaaggtgtcgagcacatggtcggtttgtttatcaatgtcgtcccgaaacgggcgacctttggcccgcaaacgacctttacggagctggtcgctgatttgcagaagcaggcgctcgaagctgaaccgcatcaatatgtgccgctctatgaaattcaaagtcatatagcagcgccgaacttaatcgaccatattatcgtttttgaaaattacccgctgcaagaagccaataaacagcagaaagaaaaaaatctcggcttcacaatggacgagatcagcgtttttgaaaaatcgaattatgatctgaatttgcttgcttcaccgggtgaagaaatgatgctgaaacttgcatacaaccggaatatattcgaaccatctttcatcttgcggttaaaagaacagcttttgacagccattcgcgaggtcatcagagatccggagcagccgcttgacgacatttgtgtcgtttccaaaaaggaaaaagagcgacttctccatgaatttaacggtcaagtccaacggaagcaaatcggcctgacgattccccaatggtttgagcaatacgctgaagcgctcccggaaaagcccgcggtatcagcggccgggcggacgctgacatatcgggaattgaacgaaaaggcgaacaaggtcgcgcaccttttgcgcaaaaagaacgtcggccgcggcgagcccgtcgcccttttgttccgccgttcgccggaaatggtcatcgcgatactcgccgtcttaaaagcagggggcgcctatctgccgattgacccggaatatcctgaagcacggattcagtatatgctggaagacagcggggctgtttgcatgctgacacaggaagagcttgccggccgggcggcgtcgctttcttttcataagcatacgatcctgatcgacgatcctgctgtgtctgcagaaagcgggagaaacctcgaaatcgccgccgagccggacgaccttgcttatatcatgtatacgtctggtacaacgggaaaaccgaaaggcaatctgacgacacatgccaatattacaagggttgtaaaagagacaaactacatcagcctttccgagaaagacaccttgctgtccctttcaaactatgcgtttgacggcttcacatttgatctgtacggcgcgctgttaaacggagcaaagctggtggtggccgatcaggcgacgattctccatatcggcaagctgacagaagcgattcagaaggaaaacatcacagtcatgtttgtgacaacggcgctgttcaacttgctggttgatgcgggaacagggtggatgaaagggattcgcaaagtcctgttcggcggagagcgctcatctgtcagccatgtcaagaaagcatttgctgccatgggaccggacaggatcatccatgtatacgggccgacggaaacgaccgtcttcgcgacgttctatccggtcaaccgtatggaagacagcgcggtttccattccgatcggcaagccgataaacgaaacgaatgcatacatcctgacggaaaataaccggcttcagccgattggagcggtgggtgaattgtgtctgagcggtacaggagtatcgcgcggctatttgaacaggccggaactgactgcggaaaaattcgcgccgcatccgtttaacagcggtgaaacgatgtacaggacgggagatctggcccgctggctgccggacggcaatatcgacttcatcgggcggatcgatgatcaagtgaaaatccgcggacaccggattgagctcggtgaaatcgaagagcagctgatgcgctgccaaggcgtaaaggaagccgttgtaaccgccaggaaaagcgggaacggggatgcggcgctcaccgcttatgtcgtcccggtgcagggaactgaggttgcaaacgaggaggttcgccgccaattggcgcggaggctaccggcttacatggtgccggctgcgtatatcatgcttgaagagctgccgcttaccgctaacggaaaagtcaaccgacgccttctccctgaagccgatggccggccgaattcaacagagcgccgtgcaccccgcaatgctacggaagaaaagcttgcagtgatttggtctgaggttctcggcagacagcagatcggaatagacgagaacttttttgaaatcgggggacattcattgaaagccatggccgtcgcctcccggatgctgaaagatctcgcaatcgatgttccggtgaatgtgttgtttgaaatgcccacaatcgagggcctcgcggcttatatcgaccaaggcggccatgtggatgaagtgaaaaaaaccgtcttcaatcaggcaagcacccgccatttgttcgctttcccgcctgtcctcggatacggcatcatgtacggcaagctggccgaacaaatgccggaatacaggattcacgcgttcgactttatagaaagcgatgaccgcgctgtgcgctatgcagaagccatctccgaccttcagcctgaagggccgctgacattgatcggctattcagccggctgcggacttgcctttgaagtggcgcaagcgctcgaaaagaacggacggaaggtcgaaaagctgctgatgatcgactcatatatgaagaacgatgtcagcgatttagaagggcggtcaattgaagccgatacggccgccttgatggaagccaacaaggacaatgaatatatgaaaatcaagacggttgccgatggcatcgccaaaaagatgacagcctattattcttactttgtcaatcttgtccatcaaggaacggtcagctcggagattcatttgatcaaatcagagcacgcaaaaccgctcccggcatggctttcgttgtggaaagaaggaacggagtcttcatatgatgaatatcaaggcgctggaagacatgatgaaatgcttgcggacggctttgttaaaagcaacgcagatctcatcagacagattttgggcgaacgtgccgctgtaatcggaggtgcatga

SEQ ID NO: 493 - DNA, 741 bp, Bacillus licheniformis
atgaacgagatcattaagcagtttggagcgccggcaagcggtatgcagttgatctgtttcccgtttgccgggggatattcggcatcattcagaccgcttcacgaacatttaaaaacagattttgatatgctggcgatcgaaccgcctggacacggcacaaatcgaatggcgcttgtcgacaatttggaaaagctcgccgatttgtatatagcggcgcttaagccgcggctttcctctcaattcgtgctgttcggccacagtatgggcggcatggttgtttacaggctggcgcaaaagcttgaacaagaagggatctttgcggcagccgctgtgatatcagcgatacagccgccccatattcagcggcaaaaggtgtctcaccaaaaggatgacgcatttctcgaccatctcattcagcttggcggaatacccaaagaactggcagagcacagggaaatgatgaactttttcctgccttcgttcagagcggactacagagcgcttgagacgttctgccataccgatcatacgccgcttagatcgcctgtgcatattctgaacggagaccgcgatgagaaatgcatgagggatgcgcttggctggaaaaagtgggcgaatacgatcgatttccactatttcaaaggcggacatatgtatcttttatcagaaacggaacaagtagccgccaagttgaaaacgattgccgcggccagccgcagtacggctgttccgacaatgtaa

SEQ ID NO: 494 - DNA, 912 bp, Bacillus licheniformis
ttgaacaaatctgcttatgcggcagctttgctctatgcttttatcattggattttcctttttctttgtcaaattggctctcactgcagcgagtccggtcgacattctggcccatcgctttacggtcgcttttttggctgcgcttattccccttctgctcggatgggtgaagatcgccatcagcataaaagacgcactgaaagtgctgcctttagcattattttaccctgtcatgttttttgcttttcaagttttcgggctcgtctacacgtcttcgtctgaagccggaatcattcaagcggcgatcccgattttcaccatgatattcgccgcttattttttaaatgagcggtttacgaaacggcaattcttttttaccgtcttgtcagcggcgggggtggcctgcatctttatgatgaaaagtgcaggcaccggaagttccgatttaagaggggcggcgctgattttgctttcggcgctttcatcggcgggctacagcgtgctcgccagaaagatgacgcgaaccttcagctcgcttgaattaacatatgtcacaacgggagcgggatttctttttttcaacggcatcgccggaatcagccatatgtcagacggcacgctgagcggattttttgcccccttcactgatccggtgtttgttctttcggtattgtatttaggcgtgttgtcatcgtttgcgacatcatttttatcaaattatgcactgtcaaaaatagaagctgcgaaaatcagcatgtttaatcacttggcgacactggtgacgattttggcggggattatatggctgggagaatcactcgaatggtttcacttcgccggaacggggatgatcattgccggaattattggggcgacgatggttcggcgggaaaatcggctgaaaaaaagctga

SEQ ID NO: 495 - DNA, 1350 bp, Bacillus licheniformis
atgcacaaatatgtcgcactgatgaacgaattggaggatatgatcgaagacaaatcctttcaggaaggggacaggctgccttccatccgcgcgctggccatacgtttcaaggtaagcaaaagcacggtcatcagggcgttgaacgagctggaaagacggcacctcatctattcagtgccgaaaagcggctattacgtcgtgaaaaaaacgaatcagcggcccaactccggaaaggctgtaatcgatttcgcagcatccgctcctgatccggatgtttttccatacatcgattttcagcattgcatcaataaagccatcgatacatacaaaaacgatctgtttatttatgggacgccgaaaggtctcccgtcgttaatccaagccgttcagaaagagctcgcaaacagccaggtgtttgcaaaagaggaacacatatttattacatcaggcgtccagcaggccctcgccttgctcgcttcaatgccttttccaaaccggaagcggaaagttctgatcgaacagccgagctatcatttattgattaaataccttgaagttcacggcatccccgcggtcggcatcgagagaaccgccgaaggcatcgatatggacgagctggagcgcatctttcaaaccgaagatatcaaatttttttatacgatgccgagattccacaatccgctcgggacatcctacacggaacgggaaaaaacggccatcgtcaagctggcggagaaatatgacgtctatattgccgaggatgattttttaggagatttggagaatgataaaaaggcggatccgttacattactatgacgtttcttcccacgttatttatttgaaaagtttctcaaagattatttttccgggtctgcgggtcggagccgccgtgctgcccgattctctgacaattgtgttcaaccggtacaaacagctgctcgacattgacagttccatgctgtctcaggccgctttggagatctatttgaagagcgggatgtttgaaaagcataagcaaaagatccgttcttcctatcaaaaaagatcatgccttctgcatgatctgctaaaagaatgttccgcgtctctaggggatgtgtttgaatttcatcctcccgcacagccggctatccacacccatattgaattggaccggacgatcccggcataccgtctgattaaaagcctacaaaaacgggacgtcctgctcgaaccggtcaacgctcattatatgccggcttttccaaaaagaaatctattgaaaatcaatacgtccaatgtgaaggaagaggacatccgcagcggcatcgagcggttgcggcaagcggtggaaaccgcttatttttag

SEQ ID NO: 496 - DNA, 681 bp, Bacillus licheniformis
atgaagatttacgccgtttatatggatcagctgccggaagccggtcaatttaaccgaatgatggccatggtgtctgaagaaaagcgaaaaaaagtgggcagatacagatatcccgaagatgccagccggacgctgatcggagaagtgctggcgaggcacatcatcagcgaaacgtttcatttgccgaatgagcagatccgttttacagaaggaaggtacggcaaaccggctgctgaaggtctgaacgactttcatttcaacatttcccactccggaaaatggatcgtgtgcggagccggcgcgcagccgatcggagtggatgtcgaaaagatcaagccgatcaatttcgacattgccaaacggtttttttcaccttccgagcacgatgatctcatggaaaaggacgaatcagaacgcctgtcgtatttctatcatttgtggacgatgaaagaaagctttattaaacaggcgggaaaaggcctgtctctgccgcttgattccttctccgtcaaactgaacgaacaggggcgagcttcggtggaaactccccccggctatccgccttgctatatacaagcctatgaaattgaccccggctataaaatggcggtgtgttccgccgcacctgaatttcccggccggattgtgatgaaaagctgcgctgaactgtcaatgctttaa

SEQ ID NO: 497 - DNA, 786 bp, Bacillus licheniformis
atgatagacggaacattgataaaagatacatgcttcgggagggagcttttgatctatcttcctccttcatacgggagcggtgaaaaccgctatcccgttctatacgtccatgacctgggagatttattcgatccggcatacagcaacagtctgcgctcaatcgaaaagctgttttcgagtcaggaagtgccggaattgctgctggtcggagtggctccaaaagatagggaaagcgaatacacgccttttcccaagcggcatttgctgccgaataaacgggagtacggcgggaagggcaacgaatatgccgcttttttggccaatcggctcaagcctcatatcgaccggcactaccgaacaaatccgagccgtgaacaaacaggaatcatcggaaagtcgttcggagggttgatctcggtttacacagcttttctagcatcggagacctttggaaaaatcggatctttgtcaggttctttctggtttgaaggaataaccgagtttatgaagaataaccgctttgagaataagcatctgcgcatttatatggatgtcggaagcacggaagggacagacagggataatctgcagaaagagatgataccgaggacaaaggaagccttcagcctgttaacagaaagcgccgcctccgaaaaagaactgaaatttgtcattgatgaaggtggctcacatcggcttgagcggtttgcgaagcgttttccggaagccgttaaatggctgtttggctcctgtcacaacagcgcacggaatggcaggagtttctga

SEQ ID NO: 498 - DNA, 844 bp, Bacillus licheniformis
atggacattctgaatcgtttggctgaaaaacatcgattatattgaaaagcactggatcagccgctgaaacacgaagacatcgccaaaatcgcatattgttcgaaatttcattatcagcggatgatctacatgctgacgggtgtcacctttgccgattacattcggaaaagaaggctgacagccgccgcgcaggagctgactgcaagtggttgatgctgcttttaaatacggctacagcacaccgcaatcattatcgggaggccttcagccgccttcacggcatcagcccttcacaggcccgagaaaaaggcggacgctcagggcatttccacgtctatcctttcatattcaaataaagggagtggaggatatggattacaagattgttgaaaaagaaccgtttcaggtgatcggcaaagcgttggaggttacggtcaaggatggtcaaaacaaaaaggatattccggctttttggaacgaattaaatcacaacggctttaccgattctttaaaaccgcacatcggcccgcttggcttccttggcgtctgcatggattttaacgatcaacccgatacgttcaatttttgaaaaaaataccgcttacacgcctgccggctgtgtcgaaaaaacgattcccgccgcaacttgggccgtctttgaggccatcggccccgtcaatccggctggtcaagccacatgggaaaggatcttctcagaatgttttccggcgactggctatgaactggcgaacgagccgcaatttgaagcctatcctgaggacggggatattatggcgcaagatcatatcaccgaaatttggataccggtggtaagcagaaataa

SEQ ID NO: 499 - DNA, 663 bp, Bacillus licheniformis
ttgaagcgggaacttgttttgcgctggcttttttattttgtcggattgattgttttgtctttcggggtttctcttacgattgaagggaaagtgctcggcatcggtccttgggatgcgtttcactacgggctgtatatgcttttgggccttacggtcggccaatgggcgattattgtcggggcggtcatcgtaggtttaacgtccttatttacaaaagcatggccgaaaatcggcgccgtgctcaatatgctgttaatcggtatttttatagatttctttacttatattcttccagacccggaaacgtatatttcaagcactgtcgtattcgtgatcggcgttatttttatcggttacggagtcggcatttatgtatcggccgatctcggtgcgggtccgcgtgactccctgatgcttttgatttccgagaaaacgggctggaacgttcagtgggtccgaaacggaatggagctgacgattttattgatcggctggctgctcggcgggccgatcggcatcggtactgttttaaccgccattttaaccggcctgattttgcggttttctttgccgcagtccaaacagcttttaaaagcagcaatggcaggaaggcgcatcagagctgccaagcctgtacatatgtcgctgaaaaaaaacggatga

SEQ ID NO: 500 - DNA, 531 bp, Bacillus licheniformis
atgaagaaactttatattagtgctgtcctgggtttattgtttgtttttgttggtggaacaaaaatacatgctcaagaaccacagaacaataacggggttttggatgagaataaattcattgatgaaacagtgtattcatatacgcagccaattagcatacaggatggtgaagtaacaacacaagcgaaaaaatatatcaaaaccgtgtcagttaataggagctataaaagtcttttaaacattgtagttgccagacattactctgatactactttcacttacggaagcggtaagttatataagagtcccagagctttaagtaatgattggtggacacttcctccgaattttaaatcaggaagctctaaaagctgggactggtacaatacagggaaaggtgcaacaggacgttctaatttacaagtaagatacacttggggagttccaacaccatgggggccagttggatctaattatagctcaagaataaaggtttcatttaaatcaaatggcagttggtatacaaattaa

SEQ ID NO: 501 - DNA, 930 bp, Bacillus licheniformis
atgggtacaatagggataaactttaaaaacattcaacatcaatatcgtacgaaggatgtgctaaggggggtgagtttccatgccgatccctcctccatcacgttcttggcaggcgagaatggagccgggaagacaactttgataaaggttgctctcggcttaatcagtccgaaggcaggaaatgcgctgttcgacgggcaaagcgtcggggaaatccgggagaagatcagctgcgtgtttgatgagcctcctgtttatcctaatgaaagtggtcttgacaatctaaagtttttatcaggtatacacagccttgatcgaaagtggagtcaggaggtttgtgccatgctcaaattggatgagggacttttaaaacaaaaagcaaaagcgctatcactgggtcaaagacaccgtttagctgtagcggccgcgttattgcgcaaacctaaatatttgtttcttgatgagccgtcaatcggcctcgacccaccgtcatggcagctggtccaaatcgctttaaaacagatgactgccaggggatgtgcaattttgattacggggcaaaattatgacgcgattgaaaatctcgctgacaatatagcgattttgcaaagtggaaaaattatcttctccggtcctattgtaaaacttgttcaagcatttcccgtatatgttcgaattgtaactgatgaccatcgggaaatagctgtgcagtttccagaagctgaacctgattcttccggaatataccgcatcgtttgcgaatcaggtgaacaggcccgcgccgtgattgatcaggtgaggagaagcaccctgaattttcaagagctatcgactgaaaaagcgtcaatggggaaaatggtgacagatatttacaaggatggatttcagtcggaaaagagagggttaacgtatgaatccgttcaaaattga

SEQ ID NO: 502 - DNA, 900 bp, Bacillus licheniformis
atgaatccgttcaaaattgaaacgaatcaattgaagaatagcatgcttgtgagggtttgtatcgcgttattattttgttgctttatctgggggcttctcactttatatcaaagcgctgaaggcgaggaacgcagacaggaaaagattcaccaatccgtcattgatgaagtgaaaaagaatggggcggaggaagagcttgaaaacggcggattggagattgaaaaaaatgatgatatagcgcgtagtatgtacataggacttcatccaagtgttactcctaatctgtttttattaatcctcgcgaacattgggccaattgtttttattataatcggatctcaccttgtcggaagcgaataccatcaggggactgtgaaaatgaaagccgctcacatcggatggagaaaagcggtttctggaaaactatgcgcactgttaagtctggttattgttatggttattgcagctttattgcttggactggcaggcggttggctggcttggacgttcgccacggcacattcagacttagccgcttctcttgaagtgaatgcagctgtctcctatccggtattaattttgtttttaatgatcggattgacattttacagtgttctaggaatgactgtcacgctgttgacgaaaagccggctggcgggtgtgctgatcagcttggcgatcccgtatgctgagcaaatgctgagtctgccttttttgccattgactgcttatcaatccctcatggttcaccattttatttatgtcgacggaagcatcatcggccagccctatttgacagagccgatgggcgaaccgggcgcttgggctgttcttgtatgctggctctttgttgtcattgcggttcagcagtttgcagcgaaaaaacagcagattttatga

SEQ ID NO: 503 - DNA, 174 bp, Bacillus licheniformis
ttgatttttttagttaggctgatctgtcttgcctttttagcctgtctggcgctgttgttttatgcaccttttctggcgatgcccgtttggatcgctttgatcattgccttaatcgtctgtctgtatcttgcctttatagaggaaatgaaggaatggagaagacgaaagcactaa

SEQ ID NO: 504 - DNA, 1662 bp, Bacillus licheniformis
atgcagcaacgcaatacaccggatgtacagagatggtttccgagcgaggacggaaatgaagcaaaacgaaacgagttcctatcattgatcgagcagctgatcgagggagtggacaacctgaaaaatccggatcaggtcaaccttggcggcgagaagaaccgagagggcttcttttatgaaaagctggttgcagagagtcggattccgcatgaaggtgcgccgatgaaagaggttaacgaagagctgttgaagctgttgcacggccatccgtatcacaccaaatactttttcacgaacattctgccgatggccagcatcccggggatattaggcatgcttacggcgtttatggtcaatggcaataacctgtgggatgtgtacggtccagccggagcggaggcggaagtgaaggttacagcgatgatgtcaaagcttgctgggtatgatgccgaaacaagcggaggatatacaacgtggggaggacaaggggcggtatacagcggcctcagaatcgcgattgccaaaatggctccgtcatccctaaaagaaggggttcccggcaatttctatgcgttttgttctgaagcggctcattacagcttgtataagtcgatggaagccgcaggactcggcagcgatcatttaattaaagtcaaaacaaatctcgaccattccatggatacggaagatttgcgagagaagcttagacaagtatgcgaagccgggggcattcccgtctatatcgtagccacgacgggaacgacagatgcgatcggcatcgatgatgtgagcgctgtccgccgtgcggctgaagaaaccgcgaagagcttcgggctgccggttccgcatatccacgccgattccgccctgggaggattttttgccttttttaatgagtacgatctgaatgagaacgctttatccttcagtcccggtgtcctcagcatgatcaaaccgattcaggaaaaaatgaggcatctgcatgctgccgattcgctttgctttgattttcagaagctcgggcagacgccttatgtgacgagcctgtttcttgtgaaggatcgtaatgacttaaaacggatcgatctggatcccgatgagacgccgtatgtcggccaccgcggctatggggactaccatacgggctacacgctggaatgttcgcgcatggccagttcgatcagtatgtacagcgcattgatggcatttggctatgaaggctatcaaaagctgcttgcccagttccttgaagtcaacctgcattttagggaacagctgtctcggcagattccggaggccgatattgtgaacccggacaactgcggcatgtctacgctgtttcgcatttatcctgaaggggcgcctagatttgaagacgaaatttcgggagcatgcaccattgaagagctggaaagaaacaatgcgcttactgaaaaattatttgaaaagctcggaacaaaaagggacaagatgttttttggcgatacgaaaaaacacttgcttgtgaagtcctgtgaaggggttgaattaccgctttgcgtcagcaagtttttcgtcatttctccgtataccatgcctgaacatgtcccgggaattatcgattatttaaaagaaactattgaggaagtcttccgggagcatgggtctctcatgacaaattaa

SEQ ID NO: 505 - DNA, 1725 bp, Bacillus licheniformis
atgaaaacgttgaagaaaaagctaacagaacacatttcagtcaaaattatgattggcgtcgccttagtgcttttaatcacgatcgcatcattttcagccgtgtttacttttatcagcaaagacttgtcagagcagctgaaacagcagttccaaaaccgcctttataccgatattcatcttgctgaaaatcaaatcaaacgtctggacgggaatccgcttgagatcgattccgcagacggtccgctttacaagcagacaaaaatggctgtggacagcctgaaaaagaaaaacaaacttgagaatatttatatcctttccaatgaaggcgggaaggagcggattctcgtgctgtcggatacgcccgatgatttcggcacggattacagcttttctcctgaaatgaaagaagccttgacgacaaacaaagagacggtaagcgacgtgtatgaggacgaatacggcatccaccagtcgatttttctgccgcttgagaacggctcaggagaaaaggtgggaattttggggatcgaccttgatgcttccgtgattccggagacagcggcaaaagcgaaatggtatacaattgcgatctcagcatttgtcttgctgctcggaatggtcatggcctattttctcggttcttacatcgcgaagccgatcaggcagctgatgaaggcttcagaaaaaattgccgacggcgatctatcggccgacatttctgtcaagagccgggacgaagcaggaaagcttgccgaatcgttcaagcggatgagcgaaaatttacaacaattgattggacatatttcagcttcctctgaagaggtatccaagacgagcctgcagctgaaaaatgtatcggctgaatcgagcgaaagcgcagctcaagtggctgaatcgatgaacagcatgagcgagggaatcaacgaggttgtctcttcagtttcggattgtcatacatcggctgccgaaatcgatcagcagcttacacatgtcacagaaaaagtgaacgagatgaagaacgttgccgagggcgtcagcaaggattccaagacggggcaggagcttgtcgaagaaacattgcggcagacccagacgattaaaaacgtgatggaagagtccaaacaagcggcatcagagatgcaaaaccatacagaagaaattgaaaaagtcatcggaatgatttcctctattgctgaacagacgaatttgctggcgctcaatgcttccattgaagccgcccgggtcggtgaggaaggccagggctttgcggttgttgccggagaagtcagaaagctttctgaacgttcggcagatgccgctttatccgtttcccagcttgtggcgggcacgcaggagagcagccggcttgtcatggaacgcattcaggaaggaaacgaagcggttgacaaagggcagattttaatcaatggcacatacgagaatttttcaggaatttttaaaggaatttctcaattcgccgaacgcacagatcaattgcttcagtccttgttaaaagtcgaaaaatcgtatcaaaccatttcgtccgcgatggagcagatttccgccgttaccgaagagcaggcggcaggctctgaagaagtcgctgcggcagcggagcagcaaagcgccggcatgcaggaaatcgcatcggccattcagcagctctccgctttgtcggaagaattgaatcaggcggcatccaagtttaaactggccgctgaataa

SEQ ID NO: 506 - DNA, 744 bp, Bacillus licheniformis
atgcttgcgatcaaagggctgaataaatccttcggcgaaaatgaaatcttaaaaaaaatcgatctgaacatcgaaaaaggaaaagtgatcgccattttagggccttccggttccggcaaaacgacgctgcttcgctgcctgaacgctttggaaattccaaaccgcggcattctttcttttgacgatttcaccatcgatttttccaagaaaaataaacctgctgacctcctccgcctgcggagaaagtcgggaatggtattccaggcctatcacctgttcccgcaccgcaccgtgctcgaaaatgtgatggaagggcctgtaaaagtgcaaaagcgcaataaagaagaggtcaaaaaggaagccgttcagcttctgcaaaaggtcggccttgaagacaaaatggatctctacccattccagctttccgggggacagcagcagcgcgtcgggatcgcccgcgccctggccatcaaacctgagctgatgctttttgacgagccaacatcggctctggaccccgagctggtcggcgaagtgctgaaagtcatgaaagaccttgcaaatgagggctggacgatggttgtcgtcacccacgaaatcaaattcgcgcaggatgtcgcagacgaagtcgtctttatcgacggcggcgtcatcgtcgaacagggcccgcctgaacaaatcttctcagcccctaaggaagaacgaacaaaacagtttttaaaccggattttgaatcctgtataa

SEQ ID NO: 507 - DNA, 705 bp, Bacillus licheniformis
atgtttctaagtaatatacaagcggcggccatcggccaggcgatcccgtgggatcttgtgcgtgagtcattttggccgatctttttaaggggaatctattactcgattccccttgccattctctcttttatattcggtatgatcatcgcattgatcacggcgctggcgagaatgtccaaatcccgcattttaagagcggttttcggcatttatgtctcagcgatccgcggaacgccgctgctcgttcagctgttcattattttttacttgtttccagcgtttcaagtcacgatcgacccgtttccgagcgcaatcattgccttttcattaaatgtcggcgcttatgcgtcggaaatcatcagggcttccatcctttccgttccgaaaggacagtgggaggcggcttattcgattggaatgactcaaaaaacggcgcttaccagggtcatcctgccgcaggctgtgcgcgtgtcaattccgccattatccaatacattcatcagcttggttaaagatacatcgcttgcgtcacagattcttgttgctgaattattccggaaggcccaggaaatcggggccggcaatcttgaccaaattttaatcatttatatggaagccgcattcatctattggatcatctgctttgttctcgcgcttgttcagcagcagattgaacggcgtttggaccggtatgtggccaagtaa

SEQ ID NO: 508 - DNA, 807 bp, Bacillus licheniformis
atgaagaaagcaatattcgctgtattattgacgctgttgatcaccgtgatggccgcatgcggcgcgtcaggggacaattccaaggataaaaacgcagccggcgacagcctctggtcttcaattaaagataaaggcgtattgacagtcggtactgaaggaacgtacgaaccttttacattccacgataaaaaaacagataaattaacaggttatgatgtcgaagtgatgcaggaagtcgccaagcgcctcaacctgaaagctgaatttaaagaaacgcagtgggacagcatgtttgccggactcaactcaaagcgttttgacgtcgttgccaaccaagtcgggaaaaaagaccgtgaagatcagtacgatttttctgattcatatacaacttcccaagccgtcgttgtcacaaaagcggacaacaacgatgtaaagtctgaaggagatgtcaaagggaaaaaagccgcgcagtctttgacaagcaactataatgaccttgcgaaaaacgccggcgctgaaatcgaaggcgtagaaggaatggctcaagcgtttcagctgattcagcagggccgtgtcgacctcacctataacgataaactggcggtgctgaactatttgaagacgtcaggaaacaaaaacctgaaaatcgcttttgaaacaggcgagccgcaaactacgcattttgctttccgcaaaggaagcggcgaactggttgacaaggtcaactccgcgctgaaggacatgaaagaggatggcacactcgcgaaaatagcgaagaaatggtttggcgaagatgtttctaagtaa

SEQ ID NO: 509 - DNA, 1413 bp, Bacillus licheniformis
ttgctgaaggattatgattttctgaaacttatttttcaaggaattatagatgaaatcgatatcggcttgcatgtcgtcgatgaaaacggcacatctgttgtctataacaaaaagatgagccagattgaagggatggatgtcggcgatgtgctcggcaaaaacgtgctggacgtgtttacgtttgccagccagcatgacagcaccctcctgcaggcgctgcatcacgggaaaacgaacaaaaacgtcaaacagacttactttaataacaaaggacaggaaattacgaccgtcaatcatacattccccattatggaaaacgggaatacgaaaggagcggtcgagattgccaaagatgtcacaaagcttgaacgcctgatcagagaaaatatgaacaaaacagaaagcacaaagtatacgtttgacagcctgatcggcgtcagtccggcgttcaaggaagtcattgaacatgcaaagcgggcgacccggacctcttcctccattctgatcgttggcgacaccggaaccggaaaagaactgttcgcccaaagtatacataacggaagccagcgctcaacgggcccattcatctcgcaaaactgtgcagccctcccggaaagccttgtcgaaggcctattattcggcacggtcaaaggcgcattcacgggagccgtggatcgtccgggtcttttcgaacaagctgacggcggaacactgctccttgacgaaatcaattctttggacttcagattgcaggcaaagcttttgcgcgcgattcaagaaaaaacgatcaggcggatcggcgcttcaaaggatactccgatcgacgtcaggatcatcgcgacgatgaacgaagatccagtcgacgctgtcagcggccagaggctgcgaaaagatttgtattacaggctgagcgtcgtcaccttgtttattcctccattaaaagaccggaaggaagatattatgccgctcacgcagcattttatcgacaaatacaacgcattgttccaaatggaggtcaagggttttgaagaagaggtgcggcggttcctgctttcatacgattggccgggaaacgtcagggagcttgaacatttaattgaaggcgccatgaatttgatgtcctacgaagacaaaatcgagctgacgcaccttccattgcaatacaggacgaaaccagcggcaaaagagcagctgccgcagcagggctatgatctgttcgccccgcttccttccgcctcggccgctcctttaaaggaacaaatcgagaatgccgaaaagtattatattcaaaaaaccgttaaaaaatgcaattacaatgtgtcacaagcggctcgggtgctggggatcagcaggcaaagcctgcaatacaggcttaaaaaatggaagatccgcttcgatcaggaatcagaatga

SEQ ID NO: 510 - DNA, 1203 bp, Bacillus licheniformis
atgacggttctatcaaagtccgagaaaattatgaagcaaaccgcacattttggcgcgaataactatcatcctctgccgatcgtgatttctgaagcggaaggcgcgtgggtgaaagatccggaaggcaaccgatacatggatatgctgagcgcttattccgcagtgaatcaagggcacaggcacccgaaaatcatccaggcgttaaaagatcaggcagacaaaatcaccctgacttcgagagcttttcacaatgaccagcttggtcctttttatgaaaaggtcgcttcattaacggggaaggacatggttctgccgatgaacaccggtgcggaagcggttgagtccgcagttaaagcagcgcggcgctgggcttatgatgtaaaaggcgttccggacaatcaggcggaaattatcgcatgtgaaggcaattttcacggccggacgatgctggctgtgtcgctatcttcagaagaagagtataaacgcggtttcggaccgatgcttcccggcatcaagctgattccatacggggatctggaagcgctgaaacaggcgatcacaccgaatacagccgcttttttaattgagccgattcaaggtgaagcgggaattgtcattccgccggaaggctttttgaagcaggctgctgaagtctgcaaagagcgcaatgtcttgtttatcgccgatgaaatacagtcagggcttgcacgtacagggaaaatgttcgcctctgattgggaggacgtcacaccggatatgtacattttaggtaaagcgctcggaggcggcgtgttcccgatatcgtgcattgcagcaaaccgggatgtgcttggcgtgtttaatccgggctcacacggatcgacctttggagggaacccgcttgcatgcgccgtatcgatcgcagctcttgaagtgctggaagacgagcggctcgctgaacggtcgctggagcttggggaatactttaaagaaaagctctcgcaaattgataatcctaaaatcaaagaagtgcgcggcagggggctgttcatcggggtagagctgaccgaggcggcgcgtccgtattgcgagcgcctgaaagaagaagggctgctctgcaaagaaacgcatgagacggtaattcgctttgcacctcctcttgtcatttctcatgaggatctggattgggcgattgaaaagattacccgtgttttgtcgaagtaa

SEQ ID NO: 511 - DNA, 1422 bp, Bacillus licheniformis
ttgaatcatgaaaaccgtgaacaatatacactgaaacgaacgatgaaatcccgccatttgtttatgatctcgcttggcggcgtcatcggaaccggcttttttctcggaacaggttatacgattaatgaagccggaccgatcggcgcgattctttcctatttagcgggcggaatgatcatgtattttacgatgctctgccttggggagctcgctgtggcaatgccggtttcaggctcttttcagacgtacgcgacaaaatttatcgggcctgctacagggtttgccgtcggctggatctattggctcggctggtcggttactgttgctttggaatttttgtcagcggggcagctgatgaaaagatggtttcccgatgtcggcgtctggatatggtgcttgattttcgggctgctgcttttttcactcaatgctttatcggcaaaggctttcggggaatcggaattttggctgtccggcatcaaaattatcgtcattcttctgtttattattctcggcggaggcgcgatgttcggactcatcgacttgaaagacggacaggctgcaccgttcttttccaatctgattggagacggaatttttccaaacggattcggcgcgatctttatcacgatgatcaccgtcaactttgcctttcaggggacggagctgatcgggatcgcggcgggggaaagcgaaaatccggaaaaaacggtgccccgctccatcaaacagacggtctggcggacactggtgtttttcggcctgtccgtatttgtactggcgggattgattccatgggaaaaagcgggggttgttgaaagtccgttcgttgtggtatttgaacaaatcggcattccgtatgccgccgatctgatgaactttgttattttaattgctttgttatcggtggcgaattcgggcttgtacgcatcgacgaggatgctttattccctggcgaaagagggaatggccgctcaggctttaagccgggtcaataaaagaggtattccgatgaatgcgctttggatcacgctcggttttgcgggtttgtccctcatctcaagcgtagtcgcagcagaaacgctctacatttggcttttgtctctagccggtttaagcgcgcaagtcggctggatcacgattacggtatcacagctgctatttcgcagacgatatgtcaaagaaggcggaaaggttgaagacttaaaatttaaaacgcctctttatccttatttgccgctgacgggatttattttaaacagcgccgtccttgtgagcctcgcttttgattcagagcagaggatggcattgtactgcgggattttattcatgtcggcctgctactttgtttatcacgtgtttgtgaaaaaacgccaggctcttgatcgacaagaagcaatgatctatcaaaacaaacgatga

SEQ ID NO: 512 - DNA, 894 bp, Bacillus licheniformis
atgaataaacaagtttctttgattggaatgccgatggacttggggcaggcgcggcgcggtgtggatatgggaccgagcgcgattcgctacgctcatatcgtggagcgcttaaacgagctgggctatgatatcgatgatctgggcgatgtgccgatcaaccgcgatcagccaaaaggagacgaagggctgaaaaatttagtttccgtactggaaggaaaccgcaagctggccgatatcgtcgacaatgtcgtcgagcagcgccgcttcccgctcgtgctgggcggagaccacagcattgccatcgggacattggcgggtgtagccaagcattatcaacagctcggcgtgatttggtatgacgcacacggagacctaaatacgcttgagacatcgccgtcaggcaacatccacggcatgccgctggcggtaagtctcggtgtcggccacgaaaagctggtcaacctccacggctatgcgccgaaaatcaaaccggagcacgtcgtcatcatcggtgcgcgctcgcttgatgaaggagagcgcaaatatatccgtgaaaccggcatgaaagtctataccatgcatgaaattgacaggctcggcatgacgaaggtaatggaggaaacgatcgagtatttgtcagcaaattgcgacggcatccatctgagccttgatctggacggtcttgatccgagtgacgctccgggagtcggcacccctgtcgtcggaggcatcagctacagggaaagccatttggcgatggaaatgctctatgacgcagatatcattacatccgccgagtttgttgaagtcaacccgatactggatcataaaaataaaaccggtgaggcggccgtcgaactgatcgaatcattgttagggaagaaactgctgtaa

SEQ ID NO: 513 - DNA, 873 bp, Bacillus licheniformis
atggatattcgccagttaaaatacttcgttacaatcgcccgggaaggaaaaattacaacggcggcgaagcggctccatattgcacagccgccgctctccaggcagttgaagcagatggaagaggagctcggagtcgttttatttgaccggaacaaaaagaaaaacctgacgttgacctacgaaggagaagtttttttgaaaagagcaaaagaaatcctgcacaagcttgaggattccatcttggaggtgcgggagctgcgtgaagaagtcaacggaacccttgccgtcggctcgacgatttactgcgcggccctgctgctctcaaaagtctcgaagatcagagatatgtatccgaatttaatgtttaacatttgggaaggtgagccttcacggctaagcgagctcctggaaagccggcagatcgatgcagccgtcacgacaacgcctatccacagcaaaaacaccgaatcaaaaagcctgccggaggttccatgcaagcttgttcttccagggaatcagtcgtatggcttaaaaggagaagccggaatgaaagaaattgccggcctgccgctgattctgctcaggccgtcgcacggaaaagggatttacgacgaggtcgtccatcactttcaatcatctggcctcgaaccgagggtcttttgtgagtgccatgattctacaacgcttctcagcctcgtcacttcgggattcggagcgacgattctgccgctgtccatgctgccggcgcattttgcacggcatgttcagacattggaaattcaaaacaatccgttcattctgcagccgtctgtcgtttggagggccggcagttttctgccgaagcctgtgagagaatttttggctttattttga

SEQ ID NO: 514 - DNA, 570 bp, Bacillus licheniformis
atgaacatcatcgtcggaatcacgggcgcgaccggcgcggtatttggcgtgcggatgctggagtggctgaagaaaaccgacgcagagacacaccttgtcatctctccgtgggcagcggcaacgatcctgcacgaaacgggatatacgatgaaagacgtggaaaagctcgcatcttttacgtattcccacaaagaccaggcggcccgcatttcaagcggttcctttcaaacggacggaatgattgtcgcaccgtgcagtatgaagacgttggcgggcatccgcaccggtatggcggataacctcttgacccgttcggcggacgtcatgctgaaggaacggaaaaagctcgttctgttaacaagggagacgccgctgaaccagattcatcttgaaaacatgcttgagctgacaaaaatgggggcggtgatcctgccgccgatgccggctttttataatcatccccaaaatctgaccgaaatggtcgatcatatcgtatttcggacgctggaccaatttggcatccatctgtctgaagcgaagcgctgggaaggtatgaaacaggagaaataa

SEQ ID NO: 515 - DNA, 1422 bp, Bacillus licheniformis
atggcttatcaagattttagagattttttaaatacgctgaaaaaagaaggacagcttcttgaagtccaggaagaggtgaagccggaacccgatttgggagcagctgcacgcgccgccaacaacctcggagacaaatcacccgctcttttattcaacaacatttacggctataacaatgcccaaatcgcgctgaatgtaatcggctcctggccgaaccacgcattaatgctcggccttccaaaagacacgccggttaaagaacaattctttgagttcgcgcgccgttataatcagtttccagtaaaagtgcaaagagaggagacagcgccgtttcacgaaaacgaaatcacagaagacatcaacctgtttgacattctgccgctcttccgcatcaatcagggcgacggcggcttttatttagacaaggcatgcgtcatttcgagagatgtcgaggatccggaccacttcggcaagcaaaacgtcggcatgtacagattgcaggtaaaaggcaaagaccgcctcggcattcagcccgtcccgcagcatgacattgcgatccacctgcgtcaggctgaagagcgcggcgaaaacctgcctgtcacgattgcgctcggctgcgaaccggttattgcaacggcggcatccacaccgctcttatacgatcaatcagaatacgagatggcaggggccctgcaaggcgaaccatataaaatcgtcaaatcaaaactgtctaacttagatatcccatggggcgcagaagtggttctcgaaggtgagatccttgcgggcgaacgcgagtatgaaggtccgttcggcgagtttaccggccactattcaggcggacgaagcatgccgatcatcaaaatcaagcgcgtctgccaccgcaacaatccgatttttgaacacctgtatttaggcatgccttggactgaggttgactatatggtcggcattaatacatgtgtgccgctttaccagcagcttaaagaggcgtatccgaatgaaattgtcgcggtaaacgcgatgtatacgcacggcttgatcgccattgtatcaacgaaaagccgctacggcggattcgccaaagccgtcggcatgcgcgcgctgacaactccgcacggcctcggctactgcaaaatggtgatcctcgttgacgaagacgtcgatccgtttaacctcccgcaagtgatgtgggcaatctcaacgaaaatgcatccgaaacacgatgcagtcatcatcccggatttatccgttttggcgctagatccaggttctgaaccggcgggaatcacccacaaaatgatattggacgcgacaacgccggctgcaccggaaacaaggggacactattcacagccgctcgattcccctataggaacgaaagagtgggaagcaaaattaatgaatctgctaaatcaataa

SEQ ID NO: 516 - DNA, 228 bp, Bacillus licheniformis
atgcatacatgtccgcgctgcgaattaaaaaaagcggaaaccgtcagcaaatcacccgttgaaggagcctgggaagtctatcaatgccagcactgctttttcacttggaggtcatcagagccggagacgatcacaaatcctgaaaaatacaatccggcctttaaaatcgatcccgctgaagttgaaacagctgtacaagtgccggcgattccagaccggaaaatctaa

SEQ ID NO: 517 - DNA, 456 bp, Bacillus licheniformis
atggctcagctatcaaacgaactatttcagcttttaaacggagagaagctcgccggtaagcggcacgaagcgatgatgctccagaccgtcacagaagacggctggccgcacacggcgatgatcagcgccggcgaaatccttgccctgaacaaaaccgacatccgcctggctctctggcaaggcacaacgacgaccgcgaatattgcgagaacaggacgggcgctcttcgtcgcttgctggaaaggcaaagcacattatgtgcggctgtctttaaagaaactgcccgaattaagagacgccaaacacccgagagcgcgcttcgccggtacggtcgaagcggcccgggaagatatcgcaaaatacgctgatatcatctccggcgttcagattaagctgaaggatgaagcggcggttttgcggcggtgggaagagacgctgggggagctgaggaaatga

SEQ ID NO: 518 - DNA, 447 bp, Bacillus licheniformis
atgtctaattttctacaaaaaccaagaaacaaagccatcttatccgtctacctgtttttcgtatgcggctccgttctaagcgccgttctgaatccgaagatgagcatcggggaaaagctgtttatcctctgttttaatattttctcggcaactttattcgcatttctcatttatctactgctaaataaattgatgaaagatgaagaccgcaaacacccggcagatcccgaaaaaaacgggattaatcaagtgatttggaaaaaatacaaaaagcctctgatcctgtttgtttattttggcagcctgtttgccgtctgcgctgctattcttcccatgccgatatataccgttgctgaaaagctcgtgatcctttcgatcgccattatttttattacaatttgctgtatcctggcttataaagtgacgaataaaatgctgcagaaataa

SEQ ID NO: 519 - DNA, 342 bp, Bacillus licheniformis
atgtcaccagaaacttttgttgaatataccgaatacttaatcgccggtatgttggccgctcatttcgcttacagtttgtgttttttaatcattgcgagtcatatgatcattgaatatgaaaaaatgatctttttaaaacctgaaaaacggtcccataaaatcacaaatacattcgtttttcttcttgtcggcaccggctactttgtttacaaacggctattaagatacaactggttcctgagaaaactgtatttcgccctttatcttgtgggcagaggcatcttaagcatcatcatcttttatattttttcttttctggtccatctcattttcagcgtttaa

SEQ ID NO: 520 - DNA, 153 bp, Bacillus licheniformis
gtgttttccatgtccgaactctcactcgcttggaaatccggcatgtttgcgattctgtttgccgtgatatcgggcaatttttttgcggtttatcaaacggcgaatcaaatgctgaaccggtcttgtttggaaagaatgcctgacgaagaatga

SEQ ID NO: 521 - DNA, 114 bp, Bacillus licheniformis
gtgaataaagaaattgaaacgaacataaagccgatgacggcaagcctttccttccagttgattgcaggtttgacaagggcggccaaaatgatgattgttgcatatagggaataa

SEQ ID NO: 522 - DNA, 681 bp, Bacillus licheniformis
ttgctgagattaaaagaaacggttgtatacaaagatttaccttacaatattcaatctcatttgaaggctcccgtcagccgggaaacgaaatggggaatggcctgttttatcgtgttggtgctggatattctctgcatattacctgtgctggcgagcaaagtcgaatttttcacttttgccgtcctccctgtcgctattctgatcaatgtttggatgatcctcataaataccagaaacatgaccgaatatcttcatcaccttcaatatgttcggtttatgggcgtatctttcagcggtatgtcatattgccagctgatcacggcgcaaaaaatgatgttttctgccatcggttttcatttaccgttgatcagtctgtcactattcatatatgccgcctctatcttcctcgtcattcggtattacttggctgtattccctgatcctaaaagaggcaaaagggagacagcagctccgacagggatgcttttggcggctgttccggcggccggttatatgataagtcatgctgttttgcgagtttcagagtctgccgtctatttgttgatgagtatcgtctatctgcttatggcttgtttattttctataatgggggtcaaattcatccacaaatacttcttcatcaaagcgaatcaagatatcatcagacagcataggatttaa

SEQ ID NO: 523 - DNA, 258 bp, Bacillus licheniformis
atgaaaaacgaaaaaaattttctatataaaaaaataaacgaagctatgatcatcttcacgattttattccctgtggttggtatcttttttgtcatcatgacgatatggggtttattggaacaagccccttcagaaattcccttgtttgtttcggttatcagcttgttctttttcgttcttccgctcctattgcatatcttcagaaaaaaggtctggctgaaaaaacacatggagaattataaaaattcagagggataa

SEQ ID NO: 524 - DNA, 114 bp, Bacillus licheniformis
ttgatgggtgttttctgcatcggcaacgtttggctttgtgttttttcatatctcgtctatcttcttgaaacaataattcgggaaactgagataagagaaagcatcccgatgtga

SEQ ID NO: 525 - DNA, 804 bp, Bacillus licheniformis
atgaaacacctcatcacatgtacatcagaagaactagcgcttttagtagggttatgtgactatcctggtgttgcaaaaggaattcttgaatcatcgttaggaaaaaaatcaaaaaaagaatgggatgcaatcttagaggcaactgtcaaccagctcattttaaaacaatactggaacgaagaaaaaagttcaaaagacgaaaatcctttaagcgaagaaatgcagaaattcatcgtttcctatgtgaattcagaacaaatgatccgctgttccaaccttgacaataaaaacactttaatgcttcaccattttgaaaatgaaacatggcttttccatatgattgaccgcgatatcatccatgaatttgcgtatgtcgacgagcaggaaattgcccagctgatgaaagactattaccacttttcaactgatgaggaacatattcctttaaaatttcgtctttcagataaatgctttgactggctgagtaataaagacatgacagaaaaggttcggaagaaaagttctttttcacctgaggaagaacatagctttaatcaattgatagccgatcttgaagcaaaccaatggtcgctaaacaacatctcacatttttacatccctagcttaaacgatggacctttcttgcaaaatatcgtcttttttattccatctgcccgtggcgtttgggttgctcagtatgatgaacacaatgaaaaacctgtacatatttcattaaggacacttgagcaatggaacgaattattaaaagggcttgagtatacagtatcttttcaaaatacataa

SEQ ID NO: 526 - DNA, 1626 bp, Bacillus licheniformis
ttgaaaactctagatgttcaggcttttcaaaccggcctagacaaaacgctgaccgaattaaaaaaccagactgacgagatttcaaaagtcaaacaaagcatcaaaggcctcacctcccttgacgacgccttaaaaggcgcgggcggtgaagcgatccgctcgttctacgaagaatgccacaccacttttcttcttttttatgaatcttttatttccgactataaaggacttttagaaaagacgaaaagtgcgcttcattcccttgaaccgaaccaaaacggctttatctcgcaaagctttcttgagaacgaactccatgacggcgtcagtcaagccgaatcgctgactggcagattgacgtcaaaagccaaccagacgatggccaccgtcagccacatcgtcgacctgcccgacctagacgattcagccgtcaacgaaaacgcaaaaaaagcgcaaagacaaatcagcgagacgctcgaaaagctccacaccttcgaccgcgaacagacaaatgcgctgaaagcggcgagagaagacctcgatacgatgaagcaatacatccagcagctggagaaaatgtatacggggccgaagattgaaatatcggaatataaaagcggttcaattttaaaaccgcaaaatgactcaacaatcagtcaagctcccggcggcctgcaaaacgacctgcaaaaccccggcgaaacaccgatggaaaagatgcttgggcgattagaagaaaaagcggcagaaacgttaacgaatcctgatacacaggataaagaaaaaacaaatatagcacacgaaattcttagttacttcgaaacagtcggagaaccattagatgtcggtgataaagccttattagggtatcacgcagccaacgcaacagcatcaatcgcgtggacgcgaaaattaaaaatttattatcaaggaggaaaaccgacgaagtggcagcgatttaaaggggaatataaatttcaggtcatgtcacatcgttcttggacttctcaaggggatcacagttcgaaagttgcgagaaccattaaaaacatctctgactcgaatccaagcaacccattacttaaaaaagcgcaaaaatttgtcgcttcttatgatagtccatccatgatgtttaaacatgctgtggggttccctaaaaatcaacatagttttatagatgggaaagaatttcgcaagagagctgccctgaggacaaaagcgggtgcggttgatataatggagtccacagccaaggcaaaagggtttactgcattagaaagaggagtccctattgttggtaccgcagttactttcgcttctaaccttacagaatataccgatcccgagaactcggacaaaagttttgcagaaaaaacaggacgtttcgcagcaggtgttggtacagacatttttgctgtttctacaggtgttgaaattggagcaacaataggaagcgtcggcggtcctgtgggagtgattgttggtggagcgataggcggagtagctggagcaattgctagctcttcatacggtgatgcaattaaggatgctggtgaaaaagttgctggttctattgaaaaaggaattaaaaacagttttgagtctgtgaaaagttggtttaaatag

SEQ ID NO: 527 - DNA, 279 bp, Bacillus licheniformis
atgggtcaagaaatcaaagtcaaaacgggcgaagtcaaacaggcgctctcaaaactgaagcattcagcccaagccgtgaagccgaacgtgccgacagatatcagcggcaaaaacaaccttgacgtcgtcaaaaaaatcgaaagcatgaacaaagatttgaaaagcctgacaaaagcatacgcatcggctctcgctaaacaaattgcgcaaaccgagcaggctgtcaacgccataaaagacgccgacaaaaagctgtcgtcatcgatcaaagccaagtag

SEQ ID NO: 528 - DNA, 384 bp, Bacillus licheniformis
atgatctgggaaaaaacagttttatacgggctgcaaggtacacttctcatcaaaaaacaacagctcgaacaactgaaaaattgccaaactgaattagaagcagataaaaaggaatttgacgattcaaaagacagcatcaaaaagcccgaactgtcgccgacgacatggcagggcagcctggctgattcttttaaaaacgtcagaagcgatatgaaaacggcctacaatgatatttgcggaaaacagttaaatgaagtgtttaaacaattaaaggagaaaatctcttctttaaatgatgacattgattcgctaggtaaggatatcagctcattaaaaaagaaaatcgaaaaactggaaaaagaagaaagagaagcccgccgctaa

SEQ ID NO: 529 - DNA, 993 bp, Bacillus licheniformis
atgaagaagctgttagttgtttatgccgtgatgctctgtttgttttttctgtatgtctacgactactcccggggcgataaagccggttctgcagaagaaagcaggaggcctgcggccgcaggcagtctgtccgaaaaatacgtgatggtcacgtttcaatcgggaatcgaatattggaagagcggtctgaaaggctttgaggatgccgcgcagcttttcaacgtctctgtcgagtatcggggggcggcccattatgatgtccatgagcaaacgaccgtcctcgagcaggtgattgcaaaaaaaccggcgggaatcgctgtttcggcaataaacccaaaagctttaaaccctgtcatcgacaaggcgcacgagcagggtattccgatcgttttatttgattcagacgccccgctcagcaaagcttctacatatatcggcacaaataatatggaagcgggtgctgtggccgcaaggcgaatggccgaatttttgaatggaaagggagaaaccgcggtcattacccagccgcagcagtacaatcatcaggaaaggacgaagggctttgaacaaacgatcaagcaaaaatacccgaacatgaaggttgccgcggttttggacggaaaaggggatgagctgacgtcgaaaaaagaagcggcgaagattttggaggaaaatccgtccatcaaaggaattttcacgactgaagccaatggagcgagcggcgtggcccgtgctgtgaaggaggcgggacttgaaggggaagtatgtatcatcggctttgataaagacaagaaaacgctggacggcatcaaaaacggatcgatttccgcgacaatgagccaggacacatggcaaatgggctattggtcgctgcacatgctgtttttctcaaatcaccatctgaagcatgaacgcccgcttccggccgcaatcgacacaggcattaccatcataacgaaagaaaatgtggcagcctattatgcgaatgattaa

SEQ ID NO: 530 - DNA, 1770 bp, Bacillus licheniformis
atgcgaatgattaaacgtttgatcaataatgcgccgatccgtcataagctgatcagccttctcttgttaatcagcatgctgccgacgatcggcctgggcattttatcgggatgggccgttgaaaatattattgaaaaacaggtgatcgaccaaacactgcagctgatcggcgaagtgaacaagacggctgaagtgtatgtcagccacatgcagaacctgacatatttaatatcaatgaatgaagaaatggaagcgttttttagtcataaaaaggaggatggagaggcggattataagcgaaggacgtttttgcagggcctgacttctttatattccgaagcagcgggtattctcgttgtcaatgataagggtgagatgatcagcaatgagatgtatgaacgcacgccgacagatttgacaaaagaaccatggtatcaggcggctctcgacaatgaagggattttcaagatgatcgggaagcctgtcaaccggaatatcagaagccatgtgcactatagggaagatgaggtcgtttccgccgtcagagctgttatcgatcctgaaacacagcatgtgaaaggcgttgtactcatcgatttgaagctgcgcgtcctcgcagaagcgacaaaaaatatccgcttggggaaaacgggttatttgatgatcatggatgaaaatggcggcaatatttattcgccggagacttcgaatctatttctgccgaaaaagtggttccgtcaagaacgttctggatatttttcgaagcggatcaagggagaggaatatcagttcatttatgagacgtcttcctttacgaactggacgacggtcggcgtttttaaagcgggtgaaccggttttcgaagtgaaggaaatccacttgtatgtgcttttgtttttattgacggcggcgtttctcggaatgtcagcttcctattatttgtcccattccatgtcgcggccgattttgaagctgaatgctgtcatgaaaacggcggaaagcgggaatttttcaacattgtatcaggaggaaagggaagatgaaatcggccttttgggaaaaagcttcaatcgcctgatgttcagaatccgcgagctgatgtccgttacagaaagacaggagcgccaaaaaagagaagccgaattaagagcgctgcatgcgcagatcaaccctcactttctctacaatacgctggatacaatcaattggatggcaaggaaaaaaggagcggaagaggtcagcgatctcgtgcaggctttatccaagctgttccgcatttccttgagcaaagggaaagatatcatcccactgtctgatgaatttgaacatgttgaaaactatttgaaaatccaaaaagcgagataccgcgataaattaaactactcaatcgaaatgaccgggctttgtgatgaccgcctgattttgaagctcgttcttcagcctatcgtcgaaaatgcgatctatcacggaattaaagaaaaaaaggggccggggcatattgcgatcaaaggcatggaggaggatggctcgctaatcatcaaaatcgaggatgacggagccggaatggatgaagagacgctaaagcaaataacggatcaattcaaacacagggacgatacagcgggctacggcatgatcaacgtccatgaacggatcgctcttacatttggcgagccgtacggtataacggttgaaagtcggaaaggagccggaaccgccgtcacgatacggctaccaattttagcaaaagggggaacaagccttgagtga

SEQ ID NO: 531 - DNA, 1203 bp, Bacillus licheniformis
ttgagtgaatgttggcgcgtactgattgccgatgatgaaccgtggattcgggaaggaatacgggatgccgtctcttgggagcgctatcaaatgtcggtgtcggctgaagcggagaatggcgaggaggcttttgagctcgctctcaaacacggtatcgacttattgattgtcgacttgaatatgccgatcgtaaacggaattgccttgatgaaaaagctccgcggcgccttgccccagtgccgctttgtcatcgtgacgggctacgatcagtttgcatacgcgcaagaagcgatccggctgaatgttgatgattatttgttaaagccggtcgatcccgctcatctggaacaagtgctcaaaaagatcagcgtgtcgcttgcagctgagaaaaagaagctgagcgagcaaaagcttgctgagcagcatattcaacaaaacctcggccttctgaaggagcatgttttcagaagctggatcgaaaaccgggcagacgaagaagacgtttaccgacagctcgaatgcctccgtctgccggcgcgcaatcctgaaacgctcggcgtcatcgcggctggacatgtatggaacaaaccgtctgaagccgacaatctgaaagaaaaagtagaacgtttttttattaacgagcgagataaagccgtatttttcgacggagaccgcctgatcgccgcctgtctgtggcgttctgttacggaagccgaacagcgggcgcttgcagagatgatcaaagccgaattgcaggcaagcgcagccgtctgttttgcgaagcttgctgaaaacggccgctcagccgcgcaatgctatcagcactgcaggcagcaagtgtcgaaagcattcaatatctcgccggttgtcataagggccaaggagtatatgcaaaagcatttcactgaaagggagttttctttaaaacagatggcggatgcgcttcaagtctcgtccgtctatttgagcagaatgatgaagaaggagctcggcgtgacatttgttcagcttttgacggagatgcgcatggatcaagcggttcacctgttagagacaacccctctttcaattcatgacattgccgaacaaacgggctatgatacacagcactatttcagcactgtatttaaaaagacgatgggtgtatcccccaatcagtaccgccgcatgtcgggaattgaaagaacaggaggaaaattgtaa

SEQ ID NO: 532 - DNA, 1080 bp, Bacillus licheniformis
atgaaaaaatgctggctgttgatcactgcaatgcttttctgtctcatcgttaccgcttgttcggggaatcaggcaagcggagggggagacaaaggctacgtcggaatctcaatgccgacaaagtcatcggaacgctgggtgtatgacgggaaatacatggtgaaagagtttgaaaagctcggttataaaacggatctgcagtatgcggaagatgtcgttgaaaaccaagtttcacaaatcgaaaatatgattacaaagggcgtcaatgtgcttgtcattgcttcgattgacggagaagcgctgaccgacgtcctagagaaagcaaacaagcaggatattaaagtcatttcttatgaccggctgctcatgaacagcaaacatgtcgactattatgcgacatttgacaatcataaagtcggggaacttcaagggaaatatattgaagaaaagcttggcttaaaagacaaaaaagggccgttcaacatcgaattgttcgcgggatcgcccgacgacaacaacgcgcatttcttttttgacggcgccatgtctgttttgaagccttatatcgattcgggcaaattaaaggtgttgagcggccagacttcatttgagcaaggggcgacgctcaggtgggacggcgcaaccgcacaatcccggatggacaatttgctgagtgcgcattatacaaaggcgaagcttgatgcggtgctttcaccgtatgacggaatcagcatcggaatcatttcatccttaaaaggtgcgggctacggctcggacaagaagccgctgccggttattacgggacaggatgcagagcttgcttccgtgaattcgatcattaaaggggagcagacctcaaccattttcaaagatacgagagagctggcgaaaaaagccgttgagatggcgtcatccgtcttaaaaggcgaaaaagcggaagtcaatgacacaaagacgtatgacaacggagagaaggtcgttccatcatacctgcttgaaccggtcgtcgtcgacaaagagaactacaaaaaagtgctcgttgacggcggttactataaagaatcggaattagggaagtga

SEQ ID NO: 533 - DNA, 1569 bp, Bacillus licheniformis
atgtccgattgcattttagagatgagaggcatcacgaaggagtttcccggcgtcaaagcgctcgacaatgtccaccttcgcgttaaagcgggcgaaatccatgccctctgcggggaaaacggggcgggcaagtcgactttgatgaaggtgctgagcggcgtctatccgtacggtgcgtatacgggcgacattttatataaaggggaagtatgccaattcaaaaatattaagcaaagcgaggaagcggggatcgtcatcatccaccaggagctggcgctcgtcccccagctttccattgcggaaaatctttttttgggcaatgaacaggccagccgcggcgtcatcaattggcgaaagacaaagctggaaacgctcgaattaatgaaaaaagtcgggcttcaagaatctccggatacgcttgtttcccaaatcggcgtcggaaagcagcagcttgttgaaatcgccaaagctttggcaaaaaaagtgcagctcttgattttggatgaaccgacggcggctttaaatgaagctgacagcgagaatctgctgcagctcttgctcgaactgaaaaaacagggaatctcttcgattatgatttcccataaattaaatgaagttacgaaagtcgcagattcgattaccgtgctccgggacggacagacgatcgaaacgcttgatgttcaaagcgggcaattgactgaaaaccggatcatcagaggcatggtcggcagggagctgcaaaaccgctaccctgacagaagcgccgagatcggcgacgtcatctttgaagtgaaggattggacagttcaccatcctcttcaacaggaccgcaaagtggtaaacatggcggcgctttccgtgaaaagaggcgagatcgcaggaattgccggactgatgggctccggaaggacggagctggcgatgagcatttttggaagatcatatgggaaaaacatttccggcacaatcgaaaaagacgggcgggagctttacatcaaccaccctgaagatgccattaaaaacggcatcgtctatgtgacggaggacaggaaaggaaacggtttgattctgaaggacagcattaaagaaaacattacgctgtcgaaactggataaggtgtcgagccgattggtgatggacgagcggcgcgaacaacatgaagcggaggattttcgccggaaattaaacatcaagacgcccgatatcagccagcggaccggaaatttaagcggaggcaaccagcagaaggtcatgctgagcaagtggattttcgcggagcctgacgttttaatcctggatgaaccgacgcgcggcatcgatgtcggcgccaaatacgaaatctacggcgtcatcaatcagcttgccgaagcgggtaaagcggttatcatgatctcttcggagcttcccgagctgctggggatgtgcgacagaatctatacgatgtgtgagggggaaatcaccgccgaattttccaaagaagaagccgatcaggagaagctgatgaaatatatgaccatccgcatgaagagagggggagaagcgtatgcagacaccggtgcaaacggataa

SEQ ID NO: 534 - DNA, 1212 bp, Bacillus licheniformis
atgcagacaccggtgcaaacggataaagaccgcgctcagcccggctactttcagctgtttcgcgatatgtataagcagaatatccggaaatacagcatggtcattgcgctcgtgtttattatgctgctgtttcaaatattgacagacggaattttgctgagaccgctgaacattacgaacctgattttgcaaaacagctacattctcattttagcgattgggatgatgctcgtcatcatcacgggacacattgatctatcagtcggttcagtcgccgcttttgtcggcgccgtctccgcgatgatgatcattgaaaacgatatgccgctgtttgcggcggtcgtcctgtcgttgcttctgggagcggcaatcggcgcctggcagggtttttggatcgcttatgtcaagattccggccttcatcgtgacgctggcgggaatgcttttgttcagagggctcacgatgatcgtgctggaggggaaatcgatcgctccgtttcctgtgtccttccaaaaaatggcgtccggttttattccggactggctgaacggaggcacgttccatttgacgacgattgtcgccggagcgggtgtgtcgattctttatctcgtatatcagcttcagcagagaaacatgcagaagaaattccaatttgacttgcagggaaaaggtctgtttacagttaaggtgttttttatcatcgccattatcaacctttttacctacattctcgcgacttatgaaggtatacctctcattttgatcacattgttcgtcttaatcgccgggtatacattcgttatgaaaaaaaccgtcatcgggcggagaatctacgcgatcggcggcaatgaaaaagcagccgagctttcaggaatcaaaacaaaacggctcacctttatggtcttcgtcaatatgggcgtcttagcagccctttcaggcttgatttttgccgcccgtctaaacgcggccactccgaaagcaggaaacctgtttgaacttgacgccattgcggcctgcttcatcggcggggcttcggcttacggcggtatcggcacgatcggcggggccatcatcggcggtcttgtcatgggagtcatgaacaacggtatgtcgctgctcggcctgggcatcgactggcagcaggcgataaaaggcctcgtccttctgattgccgttgcatttgatatttacaataagaataaaacttcttaa

SEQ ID NO: 535 - DNA, 1269 bp, Bacillus licheniformis
atgaaacggaaaatacactacgcctggattatcgtttttgtgacgtttttgacgcttttggccgttcaaggagtgcgcctttctttcggagcctttattcagccttgggaagaggaattttcaatggacaggggcacgatttcgcttatttccatgctgagcttcattgtatatggcgtgtcccagccggtgatcggcaggcttgtcgaccgcttcggaccgcggatcattttatccctcagcacgcttctggtcggcttgagcatcttttttacatatctcgtgacttctccgtggcagctgtttattttgtatggcatcatcgtttctctcggcgtcggcggtgcgtcgaatgtcgcgtcgaccgtgatcgtgaccaattggttcaatgagaagcgcgggcttgcattcggcatcatggaagcgggattcggtgcgggacagatgctgcttgtccctggatcgctcatgatgatccactggtttaactggaaagtgaccgtcattgttctgggattgtttttagccgttattgtatttccgatcgtcatcttgttattgcggaaccatccttcggaaaagaatgtacagccgatcggcggcgctcagggcggcgagataaaagaagagccggacgcccagccgaaaaagattccatacaaagccgtttttctcaaaagaacgttttggttcctcgtcttgccgtttttcatttgcggatttacaacaacggggttaatggatacccatcttatccctttttcgcatgaccacgggttttcgaccgaagtaacaagcgccgctgtcagcctgctggccgggtttaacatcatcggcattttgatttccggcgtcgtcgctgaccgctggagcagccggaaaattttgtgctttttatatgccgtaagggcgctgtcgcttgtcattctgttgtcgagccacaactcgatgctcctgctttgcttcgcggttttgttcggtttggtcgactttgcgaccgtcgccccgacgcaaatgctggcaacccagtatttcaggcagtattccgtcgggttcattctcggctggctattcctcagccaccagatcggttcggcgctcggggcttatttgccgggcgtctggtacagccaaacaggcaactataacctgtctttctacctttcaatcgttattttggcggtagcaagcattttgaacatcctgctgccggaacctaaaaaaataaatccaacactgaatcaggaagggcgttccgtccagcaataa

SEQ ID NO: 536 - DNA, 918 bp, Bacillus licheniformis
atgacagaaatcaatcattctatcactttaaaattcagaaagttcaatcgattctatacaaatgtgctcggttttctgaatgaacatatttatgacagccctttttcattgacggaaacccggatattatttgaaattcacaatacggccgattgtacagccaaactgattcaagatacgctcggcctggaccggggctatgtcagccggatcctgaagcggtttgaaaaagaaaatatggtctataaaaagagaagcgaggaggacagccgcaaccactatatctacttaaccagcttcggtgaatccatttataaaaagctggaggccaaagccaatcaacaaatcgaaaacatgctgaagcatatcgacggccgccatcaggaaaagctgacggaggcaatgaatacaattgaatgcatattgtcggaacacctgcctcccgaaaaatcggccgtttctataagagattactatatatcggacgatatcaaactgatgatcgaaaaacagcgtgccttctacgcggagacacacggctgggacgattcatttttggattaccttcacgaaacattcgacgccgagatcgaaaaaatctggatcgcagagagcgccggaagattcgcgggatgtgtcgggctcgtcaaacaccccggcaggaccgtgcagctcagatggtttctggtcgacgccgcttttcgacaccagggagtcggcacacgcctcttggagcatctcatcgattattgcaaagaaaatcagtatgagcggatttttttatggacggtaagcacgatggccgaagcacggcctttgtatgaaaaattcggattcagactgacggaagtgaaagacgagactttattatgggggcagcggctccgggaagaacgctgggatgccgagttaggctga

SEQ ID NO: 537 - DNA, 135 bp, Bacillus licheniformis
atgaagttaaaaatgttaatgatagattatattttacaaataaagaaagataaattcaatcatacaggaaaattcatccaccaggcaggaaagaaggaagaaaacagagtatataatctaacaacctgtttttga

SEQ ID NO: 538 - DNA, 2073 bp, Bacillus licheniformis
atggttaaaccgtatcccccgatcagccggaaagttccccgactattgcatggagccgattacaacccggatcaatggcttaaatatccggacgtattaaaagaagatatccgcctgatgaaactgtcccgctgcaatgtgatgtctgtcggcattttctcctgggtttcgctcgagcctgaagaaggaagatttacatttgactggctcgatcaggttcttgatactttcaaggaaaacggaatttatgcgtttttggctacaccgagcggtgccagaccggcttggatgtccaaaaagtatccagaggtgctgagaacggagcgcaacagggtcagaaaccttcacggaaagcggcacaatcactgctatacgtcgcctgtctaccgccggaaaacggcgatcataaacggaaagctcgcggagcgctatgcgcatcacccggccgtcatcggctggcacatttctaatgaatacggcggagaatgccattgtgaactttgccaagacaagttcagagagtggctgctggcgaaatacaaaacgctggaccgccttaatgatgcatggtggacatcgttttggagccatacctatatagattgggacgagatcgagtcgccggctccgcacggcgaggatgccgttcacggtctgaatttggactggaagcgttttgtcacggatcaaacggttgatttttgccggcatgaaatcgcccacgtccgttcgtttaaccctgatctgcctgtgacgacgaattttatgggaacgtatgccggattgaattattggaagtttgccgatttgcttgatgtcatctcgtgggattcttatccggcatggcacaacagccggcaggaagacagccggcttggagccgatattgcttttgttcatgacatcaatcgctctcttaaaggcggccggccgttcatgctgatggaaagcacgccgagcatgacgaactggcaggatgtcagcaagctgaagcgccccggtatgcatgaattgtcgtcattacaggcagtcgctcacggatcggacaccgttcagtattttcaatggcggaaaagccgcgggtcaagcgaaaaatttcacggagcagtcgttgatcatgaaggatcagagcatacgcgcgtttttcaggaagtgaaaaagctcggggaaaagctcgaaaagctggaggacgtcgcagggacgacagtcgaacccgaggccgcgattatatttgactgggagaatcgctgggctttggaagatgcccaaggtccgcgcaatatcggaaagcattatgaacggaccgccaaatcgttttatgaaccgttttggcgggaaggcgtaccggttgatgtgattcacatggaggctgatttctcccgctataagcttttggtcgccccgatgctctacatgctgaaggaaggcaccgctgaaaggattgaacagtttgttcaaaacggagggacatttgtcgccacttattggtcgggcattgttgatgagaatgatcttacgttcctgggagggtttcctgggggcttaagaaaaacgctcggcatttggtctgaggagatcgatgctcttcatgacggacagaaaaataccattgtgatggatgaagaaaacaggctcggattaagcggaagctatgaagccagcgagctttgcgatctgattcatttagaaggggccgaagcgctcgctgcgtacgaggatgatttttacgcgggccggccggcgctgacggtcaatttgttcggagacgggaaggcctactatatcgcttcaaggaatgaggcggcgttccaagaggcgtttatatccaggctcattgaagagtgcgggattgccaaagtgctcgatacagagctcccgaaaggcgtcaccgcccagctccgcacagacggccgccacgattatattttcgtgatgaattttacagcggaaagcagaagtgtctcgcttccggaggaaacatacacggacgttttaaagggaacccagaaaaaaggcgcgctcaaactgccgccttacggaacgagcattttacggagaagccataaggcctag

SEQ ID NO: 539 - DNA, 1146 bp, Bacillus licheniformis
atgaacttttacaaaacgctcgccttatcaactcttgcggcatccttattgtctccctcatggagcattctcccccgtgccgaagcttcagcttataaggacttctcggtgactgccgatgcagagacagagccggtggatacccctgacgacgcggcagatgacccggcgatttgggttcatccgaagcagcctgaaaaaagccggctgatcacaacaaataaaaaatctggcttgatcgtttacgatttaaacggaaaacagctggcagcctatccgtttggcaaattaaacaacgtcgatctccgctacaattttccgctcgatggcaaaaaaattgatattgccggggcctcaaaccggtcagacggcaaaaacacggttgaaatatacgcctttgacggcgaaaaaaacaagctgaaaaacatcgtcaatcctcaaaaacctattcaaaccgatattgaggaggtgtatggtttcagcctgtatcacagccagaaaaccggcaagttctacgccatggtgaccggaaagaacgtagaattcgagcaatatgaactgtttgacaacggaaaaggacaagtcgaaggcaaaaaggtccgctcattcaaaatgagctctcaaacagaagggcttgcagcagatgatgaatacggcaaaatgtacatcgctgaagaagacgctgcgatttggtctttcagcgctgagccaaacggcggagataaaggaaaaattgtcgatcgcgcaggcggaacgcatttaaccgctgatattgaagggctgacgatttactacggagaagacggcgaaggatatttgatcgcgtccagtcagggcgataaccgttatgccatctatgaccggcgcgggaaaaacgactatgtcaccgatttttcaattgatgacggtaaagaaatcgacgggacaagcgataccgatggaatcgacgtcatcggcttcggcctcggcaaaaaatatccatacggcatctttgtcgcccaagacggcgaaaatacggaaaatggacagccagccaatcagaacttcaaaattgtctcctgggaaaaaattgctgacgcgctggacgacaagcctgatatcgatgatcaggtcaatccccgaaaactgaaaaaacgagccaaataa

SEQ ID NO: 540 - DNA, 1491 bp, Bacillus licheniformis
atgtcaaaccatcaaaaagaaacttttcaaaacattccgcaaaaggggttttttggacatccccgcggactcttcaccttattcttcactgaattttgggagcgcttttcatactacggcatgagagccatccttatctattatttgtatacagaggtgacaaaaggcggcctcgggtttgatcaaacgacagcgaactcgattatggccgtatatggttccctcgtctatatgtccggcattatcgggggctggatagcggacaggctcctcggaactgcaaacaccgtgttttacggcggcgtgctcattatgttcggacacattcttttgtcattcccgggaagcgtccccgctttcttcatcagcatgttcttgatcatcattgggacaggccttttaaaacctaacgtatcaagcgttgtcggcgatttgtacagccctgaagacacccgccgcgattctggtttcagcatcttctatatgggaatcaaccttggcggatttctcgcgccgattatcgtcggcacagtcggtcagacatacaactaccatctcggcttcagccttgctgccatcggcatgttgttcggactgctgacctatttagcgacgcggaagaaaaacctcggatctgccggaagaacggtaccgaatccgctcacaccagctgaaaggaaaatggtgttcggacggatcgggatcggtgttttggtgatcgctgccatctttggctattccatctttatgggctggatgacaatcaagctgtttacgatgatcgtcagctgtctcggcattttgatcccgctgatttatttcatcgtcatgtttaaaagctccaagacgacgagtgatgaacgttcccgtctcacggcttacattccgctgtttgtcgcatcgatgatgttttgggcgattcaggaacaaggcgccaatattttagccacctatgcagataaacgcactcatttagaatttttaggtgtccaattgcattcatcttggttccagtcgctgaatccgttgttcatcgttgtgcttgcaccggttttcgcatggatttggatgaggctcggaaaccgtcagccgtcaacgccgacgaagttttcactcgggttgattttagccggactgtcatttgtcgttatgattttccctgcttacatcaacggcactgaatcgcttgccaatccaatgtggcttgtgctcagcttcctgatcgtcgttctcggggaattgtgcttgtctccagtcgggttatccgcaacgacaaagctggctcctgctgctttctcagcgcagacgatgagtctatggttcctgtcaaacgcttctgcacaggccatcaacgcacagatcgtcagattttacagcgttgataccgagatcgcctacttcggcatcatcggcggtgtatccatcctgctcgggatcattttgatgctgctgtcaccgaaaattcagaaatttatgaagggtgttaattaa

SEQ ID NO: 541 - DNA, 99 bp, Bacillus licheniformis
ttgaaagattttttaataaaattttatctatttatgtacaagcggattttactagattggcatatatataaagcaaaccgttttacaaaaggaggctga

SEQ ID NO: 542 - DNA, 1758 bp, Bacillus licheniformis
gtgcagcagcaacctgatgaaatgagaatgacagtggttgacgcgacaaagttcggcgctgtcggcgacggcaaaacagactccacaaatgcgatcaacgaatgtttggcatggacaaagtcgatgggatacaacacggtgtggataccgaacggcacgtacatgattgacgggacgaaaaacggcgacccgcgggctccgtttcgcggcgccggcatcaatgttcccggcaatattgaaattttgatggacgcggaggctgtcatcaaggtaaagccgaacagttcatggggatacgctgctttttatataggcggaacatccgatataaaaatatccggaggcagcatcattggtgaaagagatgaacacacatatacaccggccccgaggccgacccatgaatggggattcggaatttgcatcgaaggggcgtcaaatgtcgtcattgaaaacgtgagaatagccgattttacaggagacggaatcattatcagcaacggaggagaagggtatagaccgtcagagcgtattcaggtaaccaattgcgatatcaggcgctccagaagaaataacttgtccatcacagggtgcgacaatgttcttgtagaaggatgcgaaattgcagatgcgggaacaggaaacggaaccgctccttgctttggcattgatatagaaggctatagtgaaggaagcatcgtctatgaagaacccgtcaatgtcatcatcagaaacaacgtgttaaaaggcaatgtcaatcatgccgtttccaacttcaacggtacttctgtcatcatcgaaggcaatgttgcagacggtaccatttcatacggctatggaacggggacgacgattgcaaacaatatcatcaagaaaaatcccgaattcaccgggcagagcactggaattaacggcctcggtgtaggggctttggaagaaagaagcgatgccgtaataaagggaaatttgatttccggttttacgacaggcatagatatccgcggaaaaagcgtttttgctgcggggaataaaatccgtgattttgtaaatgccggaattcttgcttatcaagcgtcgcaagtcttcattgaaggaaattatattgaaaacgacgtacctgaacaaaggtccggcaccgctttcagcatcacgcaatcagacaatgtaacatgttccggcaatcaaattgcaaatgtcgttcttgctgtcaggagcacagggaacgacgtccaaatcaagcataacgtcattaagcaattttccagaggcatatggatatctcaaggaaatgctgtaatagaaggaaactttatttcgccgaacggctttcaaacggtgccggagtcatatgctgtatccgtcacaaacacagcttcggcagttattcaacaaaacaccatcacacgcttcagaaactttccaatatacagctcgacaaatcagcatacaaaaattatcggaaactatattgaagattcaccgctgatcgtcacggtgtttctcacccgcggaacacacgaggttatcggcaatacgataacgctcagcaggccgtccttgccggctgtcctcatttatcttgaccaatcgtcggactcggcgatcctcaacaacacgcttcgaagcaatacggcagcaagagtaacggccattcaaaccaatacgtcaaggcaaacgctcatcatcggcaatacgattgtcaaaggaatgatccattcccaccaaacagatacagtcaatggaaatatcgaagtttaa

SEQ ID NO: 543 - DNA, 219 bp, Bacillus licheniformis
ttgaaaataatcggaatcgggcttttattatttgcttccttagaggcttttgccgtcatcctggatgtatttcaaggcatgactttgcaaagagccgtggtaaataccctgacgtttgtcatcctggaagtgggcgagtggatcatcattcttttatttttggttatcatttttctcgaagcctcagaaagctttcgccaaaagagaaaaaggacataa

SEQ ID NO: 544 - DNA, 1644 bp, Bacillus licheniformis
atgccattcttttttaaaggtcgtcatcaaaaagataacaaacaagaatctctattgagcggagataagaacccggaaaccgtaaaagtgtctgggtttgtgcgtcccttgcttgccgaaaacctgagcatgattaaagaaatgaccggaaacagctccgatattgtcatccgcaagttaaaaacgggcgctggcgaaaaaattgaaatagccgtcgtttatgtcggcggcattacagatgagaaagcgattcacgattttttgctggaatcgatcatgaactccgaagaattggcggaaaaggagtacggcagggaggttcttgagacgattgcaggtgatgccgttgcactgggcggtgtcgaaaaagaaaagcggttggacaaagtgcttgaatctttgatggcaggaaatacgatcattttggcagaggagacggcagaagctgttattacgaccacgaaaggcggagaaaagcgctcgatcaaggagcctgaaaatcagcaggcattccgcggttcacgtgaaggatttatcgaagcgctcgacacgaatatttctttggtgcgcagaattattaaaaacccgaatctttgggttgaaaaaacgacgatgggaagcgtcacaaaaaccgatgtggcgatcatgtatatcaatggaatatgcgacccgaaaacggtgaaagaagtcaaaaaaaggatggaaagcattgagatcgacagcatccttgaatcgggctacattgaacagtttattgaagacaccgtatttacgacctttccgacggtatatcatactgaaaggccggatatggtcgcagggaatctgcttgaaggaagaatcgccatctttgttgacggtacaccgtttgtcctgcttgtccctgccgtttttattcaattttttcaatctgttgaggattactattcacgctttgacattgcgacattcatccgctttttgcgcgtattgatcttctttatttcgctgattgcgcctgccgtctacgtcggtgcgacgacttttcacaaggaaatgatcccaacggagcttttggtcgtaattgccgcgcagcgtgaaatcgtgccgttcccggctgtggtcgaagccatgatcatggaaatttcgtttgaaattttgcgggaggcgggcatccggcttccgaaagcgataggttcagccgtttcgattgtgggagccattgtcattgggcaggcggcggttcaggccgggattgtgtcgccggcgatggtcatcatcgtagcgatcacagcgatttcaagttttgctacaccttctttctccatggggatttccgcccggctcgtccggtttttcttcatattagccgcggcgacgacgggtttttacggcattattcttggactgatcatcatgtttgtccatttatgcagcctgcgttccttcggtgttccatatatgactcctttggcgccgtttattttgaaaaactggggcgacgccatcgttcgtctgccttggtggacacatgagaagcggcctgaactgatcggcaatgacaataaggtgcgccaaggagaataccagaaacccgagcccccggattcaggcgatatgaagacaaaacaagaagatggtgatccaaatgaaacgaatcgttaa

SEQ ID NO: 545 - DNA, 1224 bp, Bacillus licheniformis
atgaaacgaatcgttaaaattgtgctcctacttgccgccattgtccttcttcaagggtgctgggataaaagagagctgacagatttgctgctgatcactgccatcggtattgataaaggtaaagatacagattacgaattaagctatcagatcgtcaatccgatcaatgtgacaggcggccttcaaggcggacagggaggagacaggccgccgatttcaagctattctgtgacgggcaacaatctgacggaaatgagcagacatgcgtcagcaaaaatgtcgcgggaaatttattactcccacaccaacctcgtggttgtcgatgaaaaactcgccaaggaggaaggcttgatcaaaattctggatgttcttgaccgggacaccgattttcgtacaacggcgacgattattatttcccgcggccaaaaagcgaaaacattcatccggacgctgacgccgatcgataagatcccgtcaaataaagtaaacaaaacgctgcaatttaccgaagagcatttgggagaacatatgaaaacgagcgtccaggatgtcatcaagtgcttaacatcgaaggcaaagcacccgattatttcttcctttaaagtaaccggaaacaaggaaaagggtgaaaaaatggaaaacgtgcagtctacatctcctgaggcaatagtcgaagcggacggcttggcggtcattaaagagggaaagctcgtcaattggcttgaaggcaaaacggcgagaggcgttttatggctgcgcaataaaatcagcagaacgtatttgacaattccaatgaatcatgagagagatgccgtcacatttgacgtcatccgccaaaaaacaaaaatcggatctcacctgaaaaacggcaaaccggcgatttcggttgacgtggctatggaaggggacatcggcgaaacaactgtgccgattcacctggatgatccaaaagtgctgagcgatatcgaaaggaaggtggcaaaggaactgaaaaatgaattgcagaatacgattgacattgttaagcggaacaagacggatgttctgcaattcggtgatgttgtgtatcgcacccaccccgaagtgtggaaaaagatggagggtgaatggagcaatcggtattttcctgacacagacgtcgacattacggttaatgcatacgtacgaagaacaggtttaagaaacaatccgaacattttgaatcatcatgaagggcgttcttga

SEQ ID NO: 546 - DNA, 1107 bp, Bacillus licheniformis
atggagaaagcaaaaatcagtgctgcacagctgttcgtgctgattgttctgtttgaactcagcagctctctgctgatttttccaggacaatctgccgaacaggacgcctggatcgcgatcttgttcggaacagtcggagggctggctttgtttatgatgcatcactttttctaccaggtgaatcccgacgcctctccctatgaaacgctgatgaatatttttggaaaaccggttggctggagcatgacatttatctacattgtttattattgttacattgcggcaagggttttgcgcgattttggagaaatgctgctgacatcggcttatccgaacacgccgattatcttcgctaatggattgttgattgcagtttgtatttttactgtgaggaagggaatcgaggtccttgcccgttcaggcgagctgttgtttggcatcatgttttggcttgctgtcacaggcctaatcctgatagtttcgtcaggcttgatcaaaccgaaagagcttttgcccattcttggaaacggacccggtccgatgtttcatgccgtgttcacgcaaacgctgtattttccgtttggagaaattatcgcctttacattgatcctgccgtatttaaaggaaaagaaactagcgaaaaaagccgggttgttgggaattgccatcagcggcctcatcctggcttttaatgtcgcattgaacatcagcgtgcttggcgtcgatctcaatatgcggtcgcgcttcccattgctgagtacgatccagacgattcaagtcgccgaattcttggacaggcttgatgtatttttcatgctcgtgctggtgattggcggtttttttaagatgagcattttcatgtatgccgtaaccgaaggcgtgaccgttttattcaagcttaaaaacccctccaaagttgttcatgtcatcggcattattattttgattttgtccgtctccattgccagcaatatttcagagcatgttaaagaaggaatcgagtttgttccattatatgtccatttgccgatgcaggtgatccttcccgcttttatttgcatagtcacttatgtgaaaatgaaaaaaaataaaaaaaaggccatgtaa

SEQ ID NO: 547 - DNA, 729 bp, Bacillus licheniformis
atgctctatacggtaaaagaagtggctcgcttggcgaatatcacgatcaaaacgctgtaccactatcataaaatcggacttttatgccccgcggaggtgacggatgccggctatcgcctttacggggtaaaagagctggaacggctgcagcacatcttgttttatcgggagctcgaatttccgctcaaggcaattaagcaaatactggacggcaaagctgatcgactgacgattttgtctgagcagaaacgtcttttcactgcccgtttggacagaattaaacagcttatttctacgatcgatctctcgattcagcaggccgggaaaggagaagcaatggatcaatcaagcatgttcaaagggttttcaagcagcagggaatgggaggatgcgctcgctgaacaaaaccgctatttgaaggaggcgtatgatgtcgatttgctgaaaggagaaccagtcatagcggaagaaatgaatgaaaaagctgaagaggcggcccgttttatgaatggaatggccgaagcgctcagagacggagtcaaacacgaccatgaacaagtgaagactgcaattaaacggcacctcaagtttttgggaattacgcccgacgattttcagtcccagacacgcttctttatcgaagacgattttcatcgcggaatgcttgaaaatcagcaaacaggcctctcgtattatttggctgctgctgcagaagcatttgcttcataa

SEQ ID NO: 548 - DNA, 684 bp, Bacillus licheniformis
atgggcagtattttagaatttcagaatgtcggctattggtataaaaatcaggatcagcctctattcgaggatatcagcattcaattcagccaaggactcttatatacgattgtcgggacttccggttccggcaaaaccacctttttatcgttggcgggcggacttgacgcgccaaaagaggggaacatcctctacaaaggagaaaacatttcaaaaatcggactgaccagcttccgcaatcaatatgtatcgatcgtttttcagtcctataacctgctgccgtatatgacggctctccaaaatatcacgtcggccatggaaatcaccggatctcaggtcaaaaacaaggaacaatacgctttggagatgctcgaaaaggtcggcatcggcgaaaagcaggccagacagaaagtattgacattaagcggcggccagcagcagcgtgtctccatcatcagagcgttctgctgtgacacggatttaatcgtcgccgatgaaccgacaggcaacttggatgaagatacatcaaaagacatcgtccggctctttcaaaaccttgcccaccaagaaaacaaatgcgtcatcatggtcacccatgatgaacagatcgcaaaggtatccgatgtcaacatcacgctttcaaggggcggctttaccgtcaaaaaacgcatatcagcaggataa

SEQ ID NO: 549 - DNA, 1440 bp, Bacillus licheniformis
atgaattttttcaaacgagccttttggagcatgaaagcgaaaaaaggaaaaacacttttacaattgtttgttttcacgatgatttgcgtgctcgtgctgacaggaattacgatccagtcggcagccgtgaaatcgagcgaactggcgagggaacagctcggaggcagcgtcacgctcaaagttgacagggaaaaaatgatgaaagaacagcaggactcaggagaccggaaaaggtttgaatcgacccccgtttctctcaaatcagccgagaaacttgcgagcctttaccatgtcaaaagctataacttcatctcctcaacatctgctttagcggacaacttcgatccgatcgaaagcggtgacgaggattcaacggactcaaacagcgatcagccggccggatcgggcggcaatgaacagggcggccggcaaatgatgcaggctgacgtatcaatcgaaggtgtgacaagcacagccctcgtcgacgaatttgccgacgggacgtccaagatcacggaaggccgtgctttaacaaaggatgatgtgaatgaaaaagtcgccgtgattgaagaaacgcttgccgaagaaaacgagctgaaggtcggcgatacgatcaaagtcaaagcgagcagcgatgaagatgcaacgatcaatttaaaaatcgtcggaatctataaaacgacttcatccggagacaatcaagcgcaaaacttcgcctttttaaacccttataacaaaatctatacaccatatacggcggcatcggccttaaaaggcgacgattatcaaaacgcgatagatgaagcggtctacaatatggacgacgcctccaacatcgacgctttcattgcggctgccaagaaaacaggcattgatttggatacattcacattggacgccaatgaccagttgtaccagcagatggtcggcccgattgaaaatgtcgcctccttctcgaaaaatgtcgtctatcttgtcacggtcgccggggcggtgattctcggactgatcgtcatgatgtcaatcagggagagaaaatacgaaatgggtgttctgatggcgatcggcgaaaaacgccggaaactcatcggacagtttttaaccgaaatcttaatgatcgcagtgcttgccatcgggatctcagcattaaccggcagcctgattgcaaagcaaatcgggaaccagctcttgagccagcaaatcgaacaaacgtcagctagccagtctgcaggcggaatgatgggcccaggcggcggaggcttcttcggacaaagtactgctcaagtctcagccattgatcagctcgacattcaagtatccttcgggaacttaatggcacttggcggaatcggccttttaattgcgatgttcgcgacactccttccgtccatatctgttttaaggctccatccgaaaacgattttaacaaaacaagaatag

SEQ ID NO: 550 - DNA, 687 bp, Bacillus licheniformis
atgaaaatattaatgattgaagataatttaagcgtatgtactatgacagagatgttttttgcaaaagaaggatttgaaacagagttcgtccatgacggactcgaaggatataaccgttttaaatcaggtgattgggatttgctgatcatcgatatcatgctgccgtcgattgatggggtcacgatctgcaaaaaggtcagagaagagagcacggttccgattattatgctgacggcaaaggatacggaatcagaccaggtgctcggttttgagctcggggctgatgattatgtgaccaagccgttcagccctttggcgcttgtggcgagaatcaaagcggtgagccggagatatcaaaacgccggccggcaggattccgctgacagcgacacgcttgaaacggaacattttaaaatcaataaaaaaacgagagaagtgtttttggacggcgttcaaattcaaaatttgacgcctaaggagttcgatttattgtattacttggtgcaaagcccgaaataggttttttcaaggaagcagctgcttgagcaggtttggggataccaattctacggagacgagcggactgtggatgttcatattaaacggctgagaaaaaagcttggcagcgactcgcgaccgtttctttacaccgtatggggagtagggtacaagttcgatgaagattaa

SEQ ID NO: 551 - DNA, 1428 bp, Bacillus licheniformis
atgaagattaagtatctctatcagctgctggccagtcacatcagtatattagtcttggcttttctcatcacgggggcgctgttttcacactttgccaaagactttgcatacgagagcaaagtcgatgagctgtcttcctacggctaccgcatcatgggcgaaatggagatgcggccgaaaggagcgccggccattatgaagccgtttgaggaaattttgcgaagcaggaagatcagcttttttctgtttaatgaaaagaaagagatcttgatgacgccggccgatttgcggccgcgaaaactgctgctcagtgatgaagaatggaaagagcttaaagatggaaaggccgttgtcgtcaaaaccgactttaaccgttttaatgaggaagtatcggtcgtcgctctgcccaacatcgtcaacaatgaatttcagggaggcattctgctgaccgctccgatcagcgggaccgaagaaatgatcagcgacatgaaccgctttatgctctttacggcggcgggtgtcatcttagtcgctattctcttaagctggctgacgtcgaaattccatgtcgcccgcattcagaagctccgcgacgccacgaaaaaagtcgcggccggggattatgacatccatatcgaaaaccgcaataaggatgaaatcggtgatttgggcgacgactttaacattatggcccgcaagctaaaaagctcaagcgaggaaatcgaccggctcgaaaagcggagaaggcagtttatcactgacgtttcacatgagctgaagacgccgctgacgacgatcagcggtttagtggaagggatgaacagccagacgatacccgaagatcagcaggataaatgtatgaagctgatcacggaggagacaaaaaggctgattcgcctcgtcaacgaaaaccttgattatgaaaaaatccgctccaaccagattacattgcaaaagctgcattatccgctgatcgaagtgtttgaaatcattaaagagcagctggcgcttcaggcggaggagagacagaatcagctgatcctcgatgtggaagatcatgtaatggtcaatgccgattacgaccggctcatccagattctcgtcaatattacgaagaacagcattcaattcacaatgaacggaaccgtttggctgagaggccgggaagactacaaggagacggtgatcgaagtagaggataccggaatcggcattgatgaaaatgatatcgaaaacatttgggatcgtttttataaagcggatttatcacggacaaacacaccttacggagaatacgggctggggctgtcgatcgtcagacagctcgtctcccttcacaacggcacggtagagattgaaagcgagaaaaacaaaggaacaaaatttatcatccgcctgccgctgacggcgagagatgatgatgaatag

SEQ ID NO: 552 - DNA, 1706 bp, Bacillus licheniformis
atgaatctgttgagaaatataaaaatcagaagcaaactgtttgtcatcattatcatttcggcgctggctttgtcaattgtcggcatccagggggtaggcggactgagcaagctttccaaaggttccgagatgatctatcaagatcaattgattcccaaccagttgtttgcaagattaaaagcgaacaacctcgatcttgatacgtacaaattcgagttaatggtgacgaaagacaacgatcgaaatgatactttgcaaaaaaacatcaaggaaaaaaacgaagaaaacaacaccttaatggaaaagatcgatcagctgaaattaatggacaacgtctctgaaaaatacgagagcttcaaaagcgaatacaagaaattgcaagatatcagcagcgagatgctcagcttggcggtgaagaacgaaaatgacaaagcatatgatgtctatctaaaagagatggatcctcaaagagaaacggtcaaccagctgattgaagacattcaaacgctaaatgctgataacgccaaaacgatctatcagcgggattctaaagaagccggttccatcatcacgcttctcatcattgtgatcgcagcatcgcttgttttatccatctcgattggactcttaatgacaaggttgatcacaaagccgatcaaagacattcaggcgctgttcgcagaaacagagcaaggagattttactgtcaaaggaacatatcaatcgaaggatgaattgggattgctgaccgcatcgtttaacaaaatggtagcaggcgtccgttcgatcattgaaacggtcggcgaaacgtcccaccaagttgcttcatcatcacaagaattgagcgccagcgctgatgaaagcacaaaggctcaacgacgatccaggagcttgcggtaggctctgatcagcaggtggaaagcgttgaaaacagcagaaccgttattaagggaatgaccgagtttgccggaagaatttcttctagcgccgaaaaggcagccgccaccgcagaccagacggcgctgatgtcgcttgaaggcacgaaagccattgataaagtgagcgcacaaatgcagtctattaatgaaacggtcgtttctctttcagaagcatttaaacatttaacagaacgttcaaatgagatcgggaatattaccgaagtgattacgagcatcgctgaacaaacgaacctgctagctttaaacgcggccattgaagcggccagggctggagaacaaggaaaaggctttgccgtcgtcgcggatgaagtcagaaaattagccgagcaatcggcccagtcagcagaacagattacaaggttgattacgatcattcaaaacgatacaaagcagacgatgaactcggtcatttcggcaaccggcgaagtcaaagaaggacttgtcgtcgttcatgaagccggaggcgctttccaaaaaatcgaaaactcgataactgaggttgtcacacagatcaatgatgtgacaaacttggtgaaaaacctgacagccggcacaagcgaaatcgaaaccgcgatttccggcgtcaaagaagtagccgagactgcagcgggaagcacgcaaacggttagtgcggcaacccaggagcagcttgcttcaatggaagaaatcgccgccgcatcacagatcctcgcgcaaaacgccgaagagctgcagcacctgattcagaaattcaaaattaaagattaa

SEQ ID NO: 553 - DNA, 171 bp, Bacillus licheniformis
atggtgttctcccatcaatttatttactttacatatcggctttcaaaacggttttgtgaatcaatttatggcaggtattttaagggaaggggatattttctgacaacaaaaaaaccccataaaaaaggggtttttttaaacgagaacttttgcgaaaaattcctggtataa

SEQ ID NO: 554 - DNA, 1362 bp, Bacillus licheniformis
atgaaagtcgttaaatttggaggcagctcgctcgcatcaggagcccagctagagaaagtatttcaaatcgtcacttccgatccggaaaggagggccgtcgtcgtatcggcacccggaaaacggcatcccgaggatacgaaagtaactgacctgttaatcgaatgcgcccaacagtacttattatcgaaagaagcaaccggcctggttgaggcgattgtcggacggtatgccgatatcgcgctagagctcgggcttgccgatgacgtgatcaaccggatccgggcagacctgcttcagctgctcgaaggtgataaaacaaatccggaacggtttattgatgcgatcaaagcaagcggcgaagataacaatgccaaactggtagcggcctacttcaggcaccggggagttgaagcacattatgtcagtccaaaagacgccgggctgttcgtgacgagcgaacccggcaacgcacaagtgctgcccgagtcctacgacaatctgtttcagctgagacagcaaaagggcatcattatctttcccggcttcttcggattcagccaggaaggagaagtgatgacgttttcgcgcagcggctctgacattacgggctccattttagcgaatggattgaaagccgagttgtatgaaaacttcactgacgttgacgccgtttattctgtcaacccggcgatcgtatccaacccgaaagaaatccgcgagctgacataccgggaaatgagagagctgtcgtatgccggcttttccgtctttcatgatgaagcattgattcctgctttccgggcgcgcataccggttcagatcaaaaatacaaacaacccggacgcggaagggacaagagttgtcgccacacgcgacaacacgaacggacctgtcgtcgggatcgccggcgacagcggattttgcagcatttacatcagcaaatatttgatgaaccgagaaatcggcttcggccgccgcgtcctgcaaatccttgaagatgaagagctgacgtatgaacacattccgtccggcattgacgatattacgatcattttaaggcagaatcaaatggatcaagcagcagaaaaacggatgatcaaacggatcaaggaagagttggatgctgatgaagtagcgattgaacacaatattgccctgatcatggtcgtcggcgaagccatgcgccataacgtcggaacgacggcaagagcgtcaaaagcattgtctgaagccggcgtcaacatcgaaatgatcaaccagggctcctcggaagtcagcatgatgttcggcgttaaggaagctcaggaaaaacaagcggtccgcgcattataccaggaatttttcgcaaaagttctcgtttaa

SEQ ID NO: 555 - DNA, 954 bp, Bacillus licheniformis
atgaaattacgatacctattgctaatgctcatcattctttcattcagctcgatattcatcggcgttaaggagctttcgcctcttgaccttttccgctttaatgaggacgaaattcaaacgctttacataagcagaatcccgcgcttgatcagcatcgtgcttgcgggaatgagcttgagcatctgcgggctgattatgcagcagctgacgcgcaataaatttgtttcaccaaccaccgctggaacgatggattgggctcggctcggcgtgatcattgcgatcgtgcttttttcgtctgcagggatagtagtcaaaatactgtttgcctttgtttttgcactgtttggcagctttttgttcgtcaaaattttggacagaatcaagttcaaagatgcgattttcatccctctcgtcggaatgatgctcgggagcgttgtgagcgccatctatactttcatggcttatcagtacaatattattcaaaacgtcaatgcatggtttgaagggaatttttcgctggtcatgaaggggaggtatgagttcttatttctgagtataccgctcgttatcattgcctatctgttcgccaataaattcacgttggccgggatgggggagtcattttccatcaatcttggtttgaaatacaagcgggtggtcaatatcgggctgatcatcgtatctattatttcgtccgtcgtcatcctgacgatcggcacgcttccctttttgggattgatcatcccgaacatcgtgtccatttacaggggagatcatttgaaaaacagcctgcctcacacggcagttctcggagccgttttcgtcttgttttgcgatatagcgggacgtctcgtcatttacccgtacgaaatttcggttggtttgatggtcggcatcatcgggagcggcgtttttctttacttgcttttaaggagaaaagcctatgcgtcataa

SEQ ID NO: 556 - DNA, 945 bp, Bacillus licheniformis
atgcgtcataaacagaaaatgcttgtactcatcgtgatagcagcagtctgcatcgggctgtttctgttctacggtttgccgtctgtatgggaatatgcgcttccgcggaggtttgccaaggtatttgcgatcatcattgtcgggacagcgattgcgtattcgtcgatgattttccaaatgatcacaaacaacagaattttgacgccgagcatcctcggactcgattctctctatgttctgctgcaaaccgggattattttctttttcggtgcagccaaactggctgacctcggcaaaaacggcaattttctattgtctaccggtttgatggtctgcttttcatttgtgctgtttttcctgatgttccgccgcgggggaaggcacatcttcctgctgctgctcgttggaatcgtgttcggcacattgttcagaagcctgtcatcctttatgcagatgctgatcgatccgaacgagttccaagtcgttcaaaacaagatgtttgccagcttcaacaatttgaatacggacattttagtgcttgcttcgctcgtcattctggcgattctcgtttacgcttggcggtttaatccgtactttgacgtgatttcgctcggcagggatcaagccgtcaacctcggaatcgattacgaccggacggtgaagaaaatgctgatcgtcgtcgccgttctcgtttccgtgtctactgccctcgtgggtccgatcacatttttggggcttctcgtcgtcaatgtggcccgggaggtatttaaaacgtataagcacagcgtcctgattcccggagcggttttgttcagcatcattgcgcttgtcggaggccagttcattgttgaaaagctgtttggtttaacggtgacgctcgtggtgatcattgattttatcggcgggatttattttatttacctgttgctgaaggagcgtaaataa

SEQ ID NO: 557 - DNA, 759 bp, Bacillus licheniformis
atgatagaagtacgagatatcatgaaacaattcggagagcagaccgttgttcatcccacgactttaacgatacaaaaaggaatgatcacgtccttcatcggaccgaacggagcgggaaaaagcacgcttttgtccatcatcagcaggctgatcggcatggacgccggaaaagtgctgattgacggcaaagaaatcggcgcttacaaaagcaatgatttagcaaaaaaaatcagcattttaaagcagtccaaccagatcaacatcaggctgactgtcagggagctcgtcagcttcggcaggtttccttattcacagggaaggctctcgaaagaggactgggcatatgtcgatgaagcgattgattacatgaagctgagagacattgagcataaacaccttgatcagttaagcggcggccagtgccagcgcgctttcatcgcgatggtcattgctcaggataccgactatatattgcttgacgaaccattgaataatctcgatatgaaacactcagtagagattatgaagctcttgaaagaccttgtcgaaaatcgcggaaaaacgatcgttattgtcattcatgacattaatttcgcctcggtttattccgacagaatcgcagccctgaaaaacgggcggattgtaaaagaggggccggcggaagacattatccaaacgccggtgctgaaagacatctatgatatggacattccgatccaacaaatcggagatcaaaaaatctgtgtatattttaaatga

SEQ ID NO: 558 - DNA, 948 bp, Bacillus licheniformis
ttgaaaaaactatctttattgattatggcattgataaccgttcttgtcgtagccgcctgcggaaacaaagctgctgacacagatgcaaaatcttcctctaaaaaagaaaccgtcacaattaaacacaacagcgacacaacagatgtaccgaaaaacccgaaaaaagtcgttgtcttcaactttggaatgcttgacacgcttgatgagcttggtttaagcgaccgcgttgtcggccttccgaaacaaacccttccgtcttacttgaaaaaatataaagacagcaaatttgaaagcgtcggcggactaaaagagccagattttgaaaaaattgctgagcttgagcctgatttgatcatcatcgaaggcagacagtctgaacagtatgacgagtttaaaaagatcgctccgacgatcgacattgagcttgaccagaagaactacatgaacagttttaaagaaaataccgaaaacattggaaaaatcttcggcaaagaagatgctgtcaaagaagcccttgcgaaaatcgatgaaaaagtagagaaagccaacaagctggcgaaagaaaaaggcggcaaaggattggtcgtcttaacgagcgataagcaaatcagcgcgtatggaagcggctcaagattcggcttgatccacgatgtgctcggcgttgaacctgtcgataaaaacatcgaggtttcccttcacggccaaagcgtctcttcagaatatatctctgaaaagaatcctgattacctgtttgtcatcgaccgaagcgctgccatcggcgaaaaaggaacagcaaaagaagtcatcgaaaatgaaattgtaaaatcaacaaaggcctataaaaacggccatatcacataccttgatccaggctactggtacctgtcaggcggaggccttgaatccgtatctgaaatggtgaaagaagtcgaaaatggattgaaataa

SEQ ID NO: 559 - DNA, 1425 bp, Bacillus licheniformis
atgagtacaggaactgaacaacagacatacaacagaaatatcatcgtaggtttgcttattgccggggcgtttatcgcgatcttgaaccaaacgctcctggttaccgcactgccgcatattatggcagacttgaacatagacgctacaaaagctcaatggctgacaacggcgttcatgctgacaaacgggattctcattccgattaccgccgcctttttgatcgaaaaattctcgagccgcgcgctcgtcatcgcggcgatgagcatctttgcggcgggaacagtcgtcggtgcggtggcgcctaactttccggttcttctggcggcgcggatcattcaggccgcaggcgccggaattatgatgccgctcatgcagacgatctttttaacgattttcccggttgaaaaacgcggggctgcaatgggcatggtcggcttggtgatcgcatttgcaccggccatcggaccgacattgtcaggctggatcgtcgacagctttacatggagatacttattttatattattctgccaattgcactgattgatcttgtgcttgtcatcttgctgatgaaaaacgtcacgaaattgagagaaacatcagtggacatcatatctattatcctgtccagcctgggtttcggcggtttattgtacggcttcagcaacgccggatcagaaggctgggggagcaatactgttttaatttcctttgcagtcggtgcggtcgccctgttcttctttatctctagacaattgaaaatcaaaaggccgatactcgagtttcgcgttttccaatcgtggacttttacgataacaacgctacttggtatgatcgtttttgcattaatgatcggtactgagaccattttgccgctgtacacgcaaaacgtcagagacgtgacagctttcgattcgggtttgatgcttctgccgggcgcgatagcaatgggcatcatgtcgccgatcatcggccggatttttgacaagatcggcggaaaaggccttgcgattatcgggtttgccgtcttgctgctgacgtccatcccgtttgcggacctgcaaatggatacttcgctgacatttattatcgtcatttatacgctgcggatgatgggaacttccatgattatgatgcctctcacaacggcgggcatcaatgcccttccggcgcacctcattccgcacggaacagcgatgaacaatacgatgcgccagatcggcggttcgatcggcacggctgttctgatttccgtcatgagtaattcagccaaaaacgccgcgacatctcatccgttaaatgcgctcattcacggcatgaattccgcctttatcgtggccgctgtcttggcgctgatcggatttatcctttcgtttacattgaaaaagaagccgcaggccgacaaacaaggccagccggcccgctga

SEQ ID NO: 560 - DNA, 888 bp, Bacillus licheniformis
atgaacgaaaaaaaagcagcagtcttaagggccgccaaaaagctgtttgcccaaaaaggctatcacaatgttgcaatgcaagcgatcgctgaagaatgcaaaatgtcaaaagcatctatttataaactgtttcaatctaaagaagatcttctgctggcattgatcaagttcagaaagcatgaaatgctgaacaaaagcgccgtcatcaatacggaaacctcgctgacgccgaaagaaagattcgctaaaaaaatcgctttggagattacggaattcagggaaaaccgccaatttatcaatttcatctccaatgagggatcatctccggataccgcagtatttaaaaagcatctgaaagaaacaaaatcaatgattatcagctggcataaagactctatcattcaagcgtacggcgaagaggtcgagccgtttatatgggatatcgtcatcattttccacgggctgatgagggaattcctgtttttagtcggcactggaaaagcgcagcctgacgttaaaacgattccgccattcattatgtcagttctggacctcttcatagagaaaaagctgaacgaagatcagaaaagttcattaaatgaagacattattgcctcctattcgaatttctcatcatgctgggcaccgcccaaaaaagaggaattgcttgaagaccttttgcaaaaactgaaaaccaagatttcttcgctgtcacaagacgactttgccgtgacagaactgctgtcagcggcagatttgctgagcgaagagcttttcagcaaagagccccgcacgtatttaattaaggctctccttgattaccttggaaaaatcgaggccatccaatacgatgtttcacaaatacaaacgattagtataaaagaataa

SEQ ID NO: 561 - DNA, 843 bp, Bacillus licheniformis
atgaaatcatttgcaaagtatcaaacatttctggatctccatcatcagtcagacccattcgttctgccaaatgcatgggatgcagccagcgccaaagcatttcaaaactgcggttttaaagcagtcgggacaaccagcgccggaattgccatgtccctcggctatcccgacggcgaacatctcccctttgaaacattgctttccgtactgaaaaccatcacggatgccgtcgatattcccgtcagtgcagatcttgaagcgggttacggccaaacaccggaaacagtcgctgaaaacgcaaaaaaagccgcagctgccggggttgtcggtattaatattgaagacggaacgaaagaaccctgtcggccgctgtgtgatgaaacattaatggaagaaaaaataacggctgttaaaaaactgaaccttcctgttttaatcaatgcccgtacggatgtgtactggctcaatgctgacgcccccggctcccgtcttcaagcagcagtccggcggcaaatcgggtacagtcaagcaggcgcggactgcatttttatccccggagccgatgatgcaggcaccattgccgggctgagaaaaggtatatccgggccgatcaacgtgctggccggctcacacaccccctctttacagattctttccgaactggggattgaaaggatcagctgcggatccgcccctttcagagctgcactgtcactggtgaaaaagatcggtgaagacatcatccgccgcggcgccttcaatcgtatgacggacggcgtgctttcatacggagaagcggctgattggatcagccttcatcgtgacccaaaacaaaatcgttga

SEQ ID NO: 562 - DNA, 738 bp, Bacillus licheniformis
atgaatgaagtattgaaaacattgaaagaccatagatcaatccgcagctatacagatgagcccgtgagccctgaacagctggacgacattattcaagccgttcaagccgcgccgaattccattaacggccagcaggtcaccgtgattacggttcaggatgaggaacggaaaaagaaaattgccgaactggccggcggacaggtctggatcgagcaggcccctgttttccttttgttctgcgcggacttcaaccgtgcgaaaatcgcccttgagaaaaacggcgaaacgcttgcgatcacagacggaatggaatccgtgcttgtcggagctgtcgacgcaggcatcgccctcgggacggccacagcagccgctgaatcgatgggacttggcactgtgccgatcggcgcggtccgcggccgtgcagaagagttgatcaaactgctcaatattcctgaatacgtcttccctgtcgcaggacttgtcgtcggccatccggcggaccgctccgccaaaaagccgcgcctcccggaacaagcggtaaggcacagcgaaacgtatcaaccggatttaaaaccgctgatcgacgcgtacgatgaagaaatatccgaatacatgacaaaacggactaacggacaggaaacaagaaactggtctcagggcatatccgcttattacaataaagtgtactatcctcacatccgtgaaatgcttgagaaacaaggatttaaactcgaatag

SEQ ID NO: 563 - DNA, 288 bp, Bacillus licheniformis
atgatcgtattgcaagcctatatgaaagtaaaaccagaaaaacgagacgcctttctcgaaagcgtacaaccgcttcttaaacattcaagagctgaagccggcaatgcccagtaccagctgtttgaagataccgaacatgccaatacatttgtcatgcttgagcaatggaaggatcaagacgcgcttgacgcccataatcagacagagcattttcaagctttcgttcaagccgcgggcgaccttttatcagaacccctgaatgtggttaaaacgcacacaacggattaa

SEQ ID NO: 564 - DNA, 297 bp, Bacillus licheniformis
atgaaaacaaatgaaatgaagttaacagccgttctccaagccttgagtgatccttacaggcttgagattgtcaaagcattggctgacacagccgagaaaacgtgcggtacgtgcacaaatctcaatattgcaaagtctacgctgtcccaccacttcaaggtgctgagggaagcgggtctgctcaaagtccgcatcgaagggaagcatcattattactccctctgcaaacgggaattggaggagcagtttccgggactgatcgaggcggttctcaaggtagaaaaggaacggtggtaa

SEQ ID NO: 565 - DNA, 1431 bp, Bacillus licheniformis
atgatcacaataccgattgaccgctctaagggcgcggaatatatttatcaccaaatctatcaacggattaaagaagaaattttcagccgcaaccttttgccggggaaaaagctcccatccaagcgagagctcgccgaaacattgaacgtcagcatcaattcggtcaacgccgcctaccagcagcttctggcagaaggttatctttattcgcgtgaaagaaaaggcttttttgtagagcagatcgaaacgttccacgccagccgtcaccccggtccccttcaattggaaaaagaactggttgaagagcctgaaagcaaagacggctggatctcgttttcccatatgagcgtcgatacggcgcattttccgtttaaaacatggcttcgctgcgaacagaaagcggtttcttcacatgttgacgaactcggagaaatgacgcacccgcaaggcgtctacgaagtgcgccaaacgatcgcacgctttatcgctttaacgagaggcgtcaaatgtctccccgaacaaatcgtgatcagcgcagggacgcagtccttaattcacacgctccaggaccttctccccgcctcagccgtctatgcgatggaggagccgggatacagccgcatttatcgactgctgaaaaatgaaggaaaagaagtcgccacgattcagctcgaccataaaggaatgcggatcagcgagattcaccgtctgaatccggacgttttatttgtcacgccttcacaccagtttccaacaggaatcattatgccggtatcgaggaggattcagcttttaaactgggtttccgacggggcaaaccgctatattgtggaagacgattatgacagcgaatttaaatacgggagcgatacgatccccgccctgcaaagccttgaccgctctgaaaaagtcatctacatcggcactttttcaaaatcgcttcttccgggcctgagaatcagctatatggtactgccgcaaaagctgctgaagcgatacagaaaaaggcaccatttctcgattcaatcgagcagcgtcttaacgcagctcgccctgcaggaactgatcgaatcgggggagtaccaaaagcacattaagaaaatgaaccagatttacgaaaaaaagcggacaaggctgatcggaagccttgtcaaacactttaacggccgggtcaaaattaaaggcgagagcgcaggccttcactttgtggccgattttgaaacggatagaagtgaagaagaggttttattaagagcaaaggaaaggcgggtcgaggtttacggcatgagtcggtttacgttaaagaaagagcagacaaaacatgaaggaacggtatcgctcgtgctcggattcgccaaaatcgctgccgatcagatcgacgaagggactgccaagctttatgaagcggtatgcggtgatgagaagctttaa

SEQ ID NO: 566 - DNA, 1314 bp, Bacillus licheniformis
atgagtcggaacacaaaagcattcacaacggaagattggcaggccaaacgggatcaattcgtggcaaggggtgtctccaacggaaatcgtcatctggccgctaaaggggaaggtgccgttttatatgatattgacggacgccgttttatcgattttgccggggcgatcggcacattaaatgtcgggcattcacatccgaaagttgtagaagctgtcaagcggcagtccgaacagctcatccatcccggttttaacgtcatgatgtatccggcctatttggaattggcggaaaagctttgccggcttgcgccgggcgcccatgagaaaaaagcgattttcctgaactcgggtgcggaagccgtagaaaacgccgtgaaaatcgccagaaaatatacgaagcgtcaagccgtcgtttcttttacccgcggattccacggacgcacaaacatgacgatgagcatgacgagcaaggtgaaaccgtacaaattcggattcggtccttttgcacccgaggtatatcaggcgccgtttccttactactatagaaagcctgaagggatgactgatgaaagctatgatgacatggttattcaggcgtttgacgatttcttcgtctcgtctgttgctccggagacggttgcttgcgtcgtcatggagccggtacagggagaaggcggttttatcattccttcaaaacggtttgtgcagcatgtcgcagccttctgccaaaaacacggcatcgtttttgtcgctgatgagattcaaacaggctttgccagaacgggcaaatattttgcgattgagcattttgatgtcgttcctgatcttgtgacagtgtcaaaatcgctggctgccggcgttccgctcagcggcgtcatcggccgggcggaaatgctcgatgcggcggatccgggtgaactcgggggcacctacgccggaagtccgcttggatgcgtagccgctttggcagtgctcgatattatcgaatcggaacagctcaacaagcgctctgaagaaatcggcaaagccatcgaagagcgggcgcttgaatggaagatgaaatatccgcagattggggaagtccgccgacttggcgcaatggctgcgattgaaattgtcagggacgaaaagacgcgggagccggacaaagcagctgcggccaagattgccaagtacgccaatgaacacggtctgctcttgttgacggcagggatcaccggcaacattatccgttttctgtctccgctcgtcattactgatgaattacttgaggaagggttcggcatcattgaagaagcgctggaacagctctag

SEQ ID NO: 567 - DNA, 1392 bp, Bacillus licheniformis
atgggtaaacagcaaatgaaaaaaacgatgtcgcagacggatgtgctatttttagcgatcggagctatgctcggctggggctgggtcgtcctttccggcgactggatttcgacagccggctttttgggcagcacgatcgcgtttatcatcggcggcatactcgtcatcttaatcgggttaacgtacgcggagctgtcttctgccatccctgaaacgggtggcggcttgattttcgtctacagggcgttcggacgaaaaacggcttttgtcgccgcttggggtgtgctgttcggctatgtttcggtgattacatttgaggcggtcgcattgcctaccgtcatcgattacgtcctgcctgtcgaacatcaggggtttctctggtcgctaagcggctgggacgtgtatgtcacttgggtgttgatcggttcgggaggtgcggtcgtcctgacagcgctcaattacttcggcgtcaagccggccgcgatttttcagtcggtctttacgattgcgattatcgccacgggctttctccttttgggcggcgccttggtaaacggtgatttcgaacatgtacagcccctttttaaagacgggttttccggtatgatgtccgtccttgtcatgattccgtttctatttgtcggatttgacgtcatccctcaggttgcggctgaaattaatgccccgaaaaaaatcatcggcaaaattttgattatttcgattatcagtgcggtcgtgttttatttgctgattgtattcggcgtaacgatgggtctgtcagaaagcgagcttgcgacgacttctttggcaaccgcggatgcaatggtcaatctgctcgggaaccagctgttcggcacggtgcttgtcctcggcggcgtcgccggaatcattacgagctggaacgcatttatcatcggcgcgagccggattctgtttgcaatgtcggaaaagggcatggtgccgaaatggttcggcttcatccatccgaagtataaaacgccgactaatgcaattttatttctgggtgcgctggcgttttttgccccgctgctcggacgccctgcccttgtttggatcgtcaatgcagggggaacaggtattatagtcggatatttgatcgtctcgattgcattcatgaagctgagaaaaacagagccggatttacacaggccgtataaaatcaataagtggaaaacaacgggtatatctgctatcctcttaagtgttatcttccttgccttttatttgccaggcatgccggccgcgctcacatggccgtatgagtggctgatcttggcgggatggacattgatcggttttcttttatacaacagcagttcaaaacgtaaaggggaggagattcaacatgaccagcatgctagaagtatataa

SEQ ID NO: 568 - DNA, 1395 bp, Bacillus licheniformis
atgaccagcatgctagaagtatataatcctgcgactggagaaaaaatcaaatcggttccccagcaatccgcaaaggaagtcgaagaagctgtcgtacgctcgcatgaggcatttcaaaaatggtcgaaaacatcggctgcagaacgagcgggcttgctgaaaaaatggtttgatttaattgtggagcagaaggacgagctggcaaaattgattacgcttgaaaacggcaagccgtacgctgaagcgcagggcgaagtcttatatagcgcaggctatatcgaatggtatgcggaggaagcgaagcgcatctacggaagaacggttcccgcctctgtgacgaacaagcgcatcatcgtcacacgccagggagtcggacctgttgcggcgattaccccgtggaattttccggcggcgatgatcacgagaaaagcggggccggctttggcggcgggctgtacctttatcatcaagccggcgcctgatacgcctttaacggcgcttgagctcgtccgtctcgggcacgaagcgggcattccgaaagacgtccttcaatgtgtgatcggcgacggacaagagatcggctctatttttacaagccatccgctgatccgcaagattacgttcaccgggtcaacacctgtcggcaaacatttaatgaaaaacagcgccgagacggtgaagcatgtgtcaatggagctcggcggccatgccccgctgatcgttgatgaagatgccaacattgacctcgccgttaagcagacgatgctttcgaaatacaggaatgccggacaaacgtgcgtctgtgcaaaccgtctgatcgttcatgaatcggttaaggatgaatttgcagaaaaactccgcgcggaagtcgccaagctgaaagtcgggaacggactcgaagaaggtgtatcaatcgggccgatcatcaataaaaacggcttccaaaaaatcgtcgatcaaatcaatgacgcggtgaataaaggggcgaaagttctcatcggcgccgaatatgaaagcgatgatgagaaatcatgctactttgtccatccgacagtgctgacggatgttgatccttcaatgacgatcatgcatgaggaaacattcggccccgttgcgccgattacgtcttttaaaacgctggacgaagcggtcaagctcgccaatgatacgccttacggtttagcggcatacttctttacggaaaactaccgccgcggcatctatttatccgaaaaccttgattacggcattctcggctggaatgacggcggaccgtcaaccgttcaggcgcctttcggcggcatgaaggaaagcggtatcggacgcgaaggcggactggaaggcatcgagccgtatttggaaacaaaatatttgtccatcggtttggatgaataa

SEQ ID NO: 569 - DNA, 1052 bp, Bacillus licheniformis
atgaaagtatcggttctgtttgtcttgcttgcggcaattttatggggaacgacgggaacaacccaggcatttgcgccgaaagaggcggcacctcttgtgttcggcgctgtcagaatggctgtcggcggcatcaccctgctcttgttcgcggctttccgcggtcaattgaaacgaagcggctggcccgttaaaacgctgatcatcgcagcattgagcatggcattttaccagcctttctttttttcagccgtcagcctgtcaggaatcgccgtcggaacggtcgtcgccatcggcagcgctccgattattgccggctgcctcgaatggctggtgttcaaaaaggttccgcagacgaaatggtggatcgcaactgctgcagcgatagcaggcgtagccttattattcattccctccgcctcatcgggggggagctttctcggcatactgctcgcacttggcgccggtctttcctttgccgtctacacgctgacaagcaagaaactcctgcaaaagcaaaagccggaggctgtcacaggcaccgtattctttttaagcgctgtattgcttgccccgttgttgtttctgtacgatctcggctggatctcatcggttcagggaatggctgtcagcctctatatcggggtcattgcaaccggagccgcgtacctgttatttacgacaggattggcaaaagtgcccgcctcaacggcggtgacgctgtcgcttgctgaaccgcttacagcgtcgctgttgggaaccgtgcttgtcagggaatcgctgcctcttgtttcctgggccgggatcgccctgcttcttttaggcattttttatatttcctatcagcccaaaaaggataaaataaacgctgaacagatgaaagacgtaaaaaaaacccgacccggggatatacgggcgggttttcatgttgtcttgttattcatccaaaccgatggacaaatattttgtttccaaatacggctcgatgccttccagtccgccttcgcgtccgataccgctttccttcatgccgccgaaaggcgcctgaacggttg

SEQ ID NO: 570 - DNA, 225 bp, Bacillus licheniformis
atgccgccgacagccattctgacagcgccgaacacaagaggtgccgcctctttcggcgcaaatgcctgggttgttcccgtcgttccccataaaattgccgcaagcaagacaaacagaaccgatactttcatactaacgatctctccctactcgatcattcagaactttttctattgtaagataagtttgcggatttttgaatcgccgcttcggaaatttccctga

SEQ ID NO: 571 - DNA, 492 bp, Bacillus licheniformis
atgaaaaaacgaacagttttattcttcttgttgatctggctcgccggatgtgcgagcgcccaagaggctgaggaacaaaccaaatgggtgaacagcgaacagaaagcgattgagaacggcattcgttatgaaagcattacaaaagacgatattatagacaaaatcgatttaaacggtgaacaagtcgtcgtttttcgattcggcgattcggagggagaggggattggcctcgcacacatcaaaagggaaaacggcaactatcaatggtaccgcgacttaaattacgcaattgtaaaatcggaccacccgaaaacggagaatgcggaagcttccgcgccgttcacaacccctaagggaagaaagtacacgttatatacaggggatgcagatcgcctgaatggtacatttgagactgatgacgggcttcatttggagccggtggtcgatcaaaaaacgggcatgtattatcagatcgtgcaggattcggactga

SEQ ID NO: 572 - DNA, 645 bp, Bacillus licheniformis
atgttgaaaaagacattatggatgggtgcaatcctagcatcatttttgcttttctccgtgccggtcagcgcacatgtcacggtaaaaccgaccgaatcagcagcaggctcatgggaaacatacactgtcaaagtaccggttgaaaaagacaacgccacgatcaaggtcgttctcagcatgccggacggtgttgaatttcagcagtatgaaccggtgccggggtggaaaacaagcactgaaaccggcaaaaacgaaaaagtaacaagggtgacgtgggaagccgaaaacggcggcattcagcctggtgaattccagcagtttaccttcaccgccaaaaaccctgacaaagaacaaaaggccgcctggaacgcataccaatattataaggacggcacaattgtcgagtggaccggtgatgatgacgccgataccccgcatgcaatcacaagcattgtcgacgctgcaaaactcggacacgaaacggttgatgcacacggcgcttcaacgaaacaaaacgctgccgcagaaaatgaagacagtcaaggaggacaagggattcaaaccgcttccctgatcctgtcgatcctcgccgtgcttcttggaggtgctgcgctgctcttgacagtgcggaaaaagaaatcgtaa

SEQ ID NO: 573 - DNA, 1638 bp, Bacillus licheniformis
atgaaaagagcaacactctgggcagttctggctgttctttgtaccattctgctgccaaaagccgcttttgctcacgcttatatcgtacaatcaactcctgctgaaaatcaggagctgaaaaaagcgcctgaagaaattaagatcgaattcaatgaagcgattcagaacgggtttcattcgataacggtcagaaattcgtcgggtgaacgggtagattccggcaaaacggaaatcgacccccaaaacgcaaagatcatgaccgtcaagctgaaaccgaagttaaaggatgatatctactcggccgaatggagagccgtatccgcagacggtcatcctgtatcaggcacgatcccttttagtatcggaaacattcaaggcgggctgccgaaagatcagcaaaatcaagcatcaggcctgccggcagccgatatcgtcattgaacgcgtccttttgtataccggtttctccctgttcatgggagccgctctttttcagctcgtctggcaccgacctgaaaacggctggccgggtgacaaaaagcgccgtctgaagcggatcacgaatgtggcgctcttattgacaggggctgccatcatcattcagctgccactgcaaacaaaaacaaacgcaggcgtttcctggatcggggcttttcagccttcgcttttaaaagaaacgcttctgaatacgacgggcggaacgctgtggctgatcaacatcgccatcatcgccttgcttgttttctcttcgaatagaaaaggcctgaagagcgcgatcttgagcctgttcctttttgccggactattgttcgtcaaatcgctcgacggccatgccgcttcgacgagcgcaggctatatgacaatcgcgatgaacttcatccatctgaatgccgcttccatttggactggcggactcgcgatgtttgtgctgtttttcggaaaagactggctgaagcctgacaaaagtttgatatgggaaaccattcggcgcttctcgccatgggcgctcgcttcagcagggctactcatattctcgggccttttcaacagctttttcattgttcatacactggataacctgttcgggacggcttacggaaaagcgctccttgtgaaatcggcgctcgtccttctcatgatcggactcggggcatttcactattttcgttttagaaaagcgccgaaacagcagggcggccgttcgatgaaagctgaatgggcggtcgggcttctcattctgctgaccacggcggttttcaccaatattccaagtccgcccgcgccgctgccgcagcctttcagtgagacgaagcagctgacggaaggaaatacgctgtcactccgaatcagcccaaacatgccgggctcaaatacgtttgaagtcaccgtcagaaacagaaaaggagacgtcgtcaaagatatccaaaaaattgaattaaccgttgagaaaaccgggcttttcggggatgacaaggaaagcacgttcagcctcagcaaaaataaagacggtgttttccaaacgaaaaatttaaatttaagcgaagacggcatctggaagatccgcgttcacggattaacggcgtcatttgaggaaatcagaacagttttcaatgcaaaaattaataaaaaggagttttga

SEQ ID NO: 574 - DNA, 573 bp, Bacillus licheniformis
atgctaccgattaaaagaagggagcagattttggcttggatcaaagaagaagaatctctgcgcatttcggaaatttcgaaaaggctgaacgtctctgaaatgaccgtttaccgcgacattaaaccgctcgttgaaaacgggcaggtcatcaagaccgcaggcggaattacgctaaacaagccgaagcagcagcttgggcagctttgcgtcgtttgcggaaaaggggcaggttcgaggcttgccgtgcaaattgtcaaaaacgacagccaaattgaacagttttgctgcgcgcattgcgcaatgctccgctatgagaaagtgaaagatgatgtatcacagattatctgcagggattttttgctggatacgacgatcagcgccaaagctgccgtctttttgctggatacagatcttcatttgaactgctgcgagccgcatgcgctccctttcgcttctgaagcagaagcgcggaaattcaaaaaaggctttggcggacagctgttatcgtttgacgatgccgcgcttctggtccagaaaacgatgaagaacagctgctgcagcctgaagacatga

SEQ ID NO: 575 - DNA, 174 bp, Bacillus licheniformis
ttgaaggaaaagaaacaagcggaacgtgataaaaaatgtgatgaaatgttgaactttaacatcgcggccaaagccgttgaatcgtcgtcaatgggtactggtcaaaccgtcctgtttctaaaattttttgtcaggaaatgtaacaggtttgcacgctttagcgatgcaatgtga

SEQ ID NO: 576 - DNA, 2295 bp, Bacillus licheniformis
atggggaaacaaaggcttgttttaataggaaacggcatggcaggggttcgcacggccgaagagattttactacacggcgggagccggtttgagatcgtcatcatcggcagcgaaccacacccgggctataaccggattctgctgtcttctgtccttcagggagaaacggattggaacgatgtgatgacaaaaagccggagctggtatgaagaaaacgggattaccctttatacaggggaaacggctgtcgcaatcgatacggttaatcaaacggtggcgacagatcaaaaccgcgaaatcgcttatgacaaactgatcattgcgacgggctcttccccgtttatcctcccggttcatggtgcagacaaagaaggggtatatggttttagaacaatagacgattgccgggcattcataaacgcatcaaagcgatttaaaaaagcggccgtcatcggcgggggaatattgggccttgaggcggcgcggggattggcaaacctcgggatgaaggttgatgtggttcaccactcttcctccatcatgcagactcagcttgatccgccggcttctgccatgctccagaaagagctggagcgtcaagggatccattttcttttggagaaagatacagaggcgattttaggaacatcgcgcgccgagggtgtgcggtttaaagacgggacgaagatcagcgccgatctcatcgtcatggctgccggtgtcagaccgaatatcgaactggccaaggcgagcggtatttcaaccaacagggcgatcatcgtcagcgactatatggagacaaatgttccaaatgtctactccgtcggtgaatgcgcggagcataacggaacggtctacggcttagtcaagccactgtatgagcaggggaaagtgctggccaaacatatttgcggcctcgaatgttccggttatcagggctccgttcagtccgcggctttaaaaatgtccggaatcgacgtcttttcggcagggaaaatcacagaggacgactcgacgacggctattaaacttttagacgaagcggccggagtctataaaaaagcggtctttcaaggggataaaatggccggcgtcattttatacggagacaccagcggcagccaaaggctgttggaaagcatcatcaaacaaagggatattaccgttgtcaaaaaagagctgtttcaatcggaagaagacagttcagtcgcttctatggcggttcgtgaaacgatctgccaatgcaacgcggtttcaaaaggcatgatcatggaagcgatacagacgcacggtttaaagacggccgaggaggtcaaacgctgtacaaaagcttccgggtcatgcggcggctgcaggccgttggtcgaggaactgctcctccataccgccgaacaggataatcacatatctgcggcggaacaaccgatgtgcgcctgcacttcattcacggaagatgaagtcgtgaacgaaatacagatgagaaatctttcttccgttcacgaagtcatctcggcgctcggctggaaaaatagcagcggatgccggatttgcgtgcccgcgcttcactactatttaaaaatgatccgtccggacatcgcctatgaggagcacgaagaggagacggatgccatcatcccgcaaatgtacggaggccggacgaatgccgaagagctgaagcgcattgcaggagtgattgaaaaatatcaaattcaagaggtgtacatgacacaccatcagagattaaagcttgccggcatcaagccggagcatatagagcgcgtgaaagaagaactcggcatgccgtattgcccgccgcaacagcagcggatcgccgcggttaaaacgtgcccatgcggatcaccgcagattcaaacattggcagcagacttggaaaaagcagcagaatccctcctcattccggccaaggtctccattggggtgtcgggctgtttggacgattgcgtgtacgcttcagttcatgacatcggacttctcaaagtaaacggaggatgggagatttatgcgggcggccaaggaggacagcatgcttccccgggagagctgctttcagtagccgactcggcggaggaagcgggtgaactcatgaaaggcctgcttcaatattaccgcgaaacagcaaactatcttgagaagatcgggcattggattgaacgcgccggcatcattcatatccgggaagttttatttgacaacggacttcgcggccagctgatcgaacggcttgaaaaagaaaagcggctggctcagcaagaaacgataaaagggctgatgtga

SEQ ID NO: 577 - DNA, 2160 bp, Bacillus licheniformis
atgacagaacgattgctaaagtactttcgcacaaagcaaaaagaagtgcaatccgaaaaaacgtatgacacccaatgtccattttgcagcatgcagtgcaaaatgcagctcattgaacagacgattgtgacaagaaaaaaatacacggcggtcggaaaagacaatccgacgacaaaagggcggctgtgcatgaaagggatgaacgcccatcagcacgcgtttcattcagagagaatcacccatccgctgatcaaaaaaaacggcgaatttgtccgtgtatcatgggaagaagcgcttcagtacatcaaagaacaagtaacagcgatccagcatgaagacggccgcgatgctttgagtgtatacggcagcgcgtccattacaaacgaagaagcgtacctgctcgggaagttcgcccgcgtcgccttgaagacgaagcatattgactacaacggcaggctttgcatgtcggcggccgcaacagctgcaaatcaaaccttcggaatggaccggggactgacaaatgccctttccgagatcccccatgcaagggtcatcatcctcgcaggtacgaatatcgccgagtgccagccgacgatcatgccgtattttgaagaagcgaagcaaaacggggcgtacatcatcgtcattgatccccgcgaaacggcaacggccaagatcgccgacctgcatttgaaaatcaagccgggaacagacgccgcgctcgcaaacggaatgctgaaaatcatcattgaagaacagctgacagacggagcttttatcagagatagagctgaagggtttgaagaggtcaagcgccatgtagcatctttatcgcttgaagacatttcggccaaaaccgggatacaaatcgagcagatcaaaaaagccgcggtaaaattcgcccgcgaggagacgggaatgctgttcacggcaagaggggttgaacagcagactgacggaacggctgctgcaagaaatttactgaatattctaatatcaacggggaaaatcggcaaatttgcttgcggctacggcgccgtcaccgggcaaggaaacgggcagggggcgcgggagcacgggcagaaagcagaccagctgccaggttaccgttcgattgaaaatgaagccgaccgcgcctatattgcggatgtttggggcataaaagctgaagatcttccgggaaaaggcgtatccgcttatgaaatgatgaagaaagttcataaaggcgaaattacaggaatgtttttaatgtgttcaaaccctgttgtatccagcccgaacgccggctttgtcaaatccgctttgggtaaattaaagttttttgccgccgttgatttgtttctttctgaaacggcaatactcgcggatgtcgttctcccagcatcatcctatctcgaggacgaaggaacgatgaccaatctggaaggcagagtgacattaagggaagcctcaaagccgtgtcccggtgaagcgaggcatgactggcaaattatttgcgatatcgctaaagcgcttggaaaaggccgctatttttcatatcgatcggcagaggatgtttttaatgaattgagaaaagcgagccgcggcggaattgccgactattcgggcatcacctatgaacgtctgagaaaggaaggcggcattttatggccctgtccagaagaggggcaccctggaacacagcgcctgtttgaatcatccttctcccacccggacaaaaaagcaagaatgtgcgtcgtcccgaacgaaccaaaggtcaaaaaagatgtaccgactgaggagtatccccttattctgacgaccggaagggtgatgtctcactatttaaccggggttcagacgagaaggagcgccgcgctcaaggcgagacactttgaatcatttatggaaatccatccgaaaacggcggaaaagtacaatattggcgaccgggtgctggtcagggtggaatcaaaaagaggcagcatcatcgtcaggagcaaatggtcggaagccatcaggccggataccgtttttgtaccgatgcattgggcggattcgcaaaatgtgaacgatttgatagcggaaacgctcgatccgtcctgcagcatgccgggatttaaggtttgctccgtgaaaattcgtccgtcagttgacaattttgtgaataaattgtcataa

SEQ ID NO: 578 - DNA, 2421 bp, Bacillus licheniformis
gtgaaaaaaaagcagcttgtccttgtagggaacggtatggccggggtcagggccattgaagaaattcttaaaatttcaaacgaagagtttcagatcacgattttcggcagcgaaccgcacccaaactataaccggattcttctttccaaagtgcttcaaggagatacggatgttaaggacattacactgaatgattgggattggtatgaagaaaacggcattcagctgtatacaggtgaagaagtcgttaaagttgatccggagtccaaaaccgtcatcacggatacgggaagagtccagccgtatgatgaactgattttggcgacaggttctctcccttttattctgccattgcccggagcggataaagaaggtgtaacagctttccgtgatatcaaggatacggatatcatgctcgaagcttccaaaacgtacaaaaaagcagcagttatcggcggcgggctgctgggactggaagcagcgcgcggacttctcaaccttggcatggatgttaccgttgtccacctcgcgccatatttgatggagcgtcagcttgatgcagccgcaggacggcttttgcaaaaagagctggaaaagcagggcatgaaatttttactggaaaagcagaccgaagaaatttacggagaaacacgtgtcgaaggcttaaaattcaaagacggctcaacgcttgaggccgatttggtcgtcatggcggtcggaatcaagccgaacgttcagctcggcaaagactgcggccttccggtaaacagaggaatcgtcgtcaatgattacatggagaccgaagttcccaacatttacgctgtcggagaatgcgcggagcataggggcattgcctacggacttgtcgcgcctctttatgaacaggcaaaagtgcttgccaaaaaaatctgcggcgttgaaacggctccgtatgaaggatctgttttatctacccagctgaaggtttccggtgttgaggtcttttctgccggtgactttaatgaggatgacggagaagacaaaaaagcgctcaaagtgtttgacgaacaggacggaatctacaaaaaaatcgttctgcgcggcaatcaggtgatcggcgccgtactgttcggagacagcagcgaaggaaacaggctgttttccatgattcaaaaaggagcggatatttctgatacttcaaaaatttcaatcttgcagcctttgaatcaggaagaaggcatgagcttgaccgctgcgatgagcgacgatgagatcgtgtgcggctgcaacggcgtttcgaaaggaatgatcattcaggcgatcaaagagcagggatgcacatcgacggatgaaattaaagcatgcacaggcgcatcgcgctcttgcggaggatgtaagccgcttgtcgcagagattctccagcatacgctcggctcagaatttgatgcttcagcacaaaaagaagcgatttgcggatgtacggacctttcaagagacgaactcgtggccgaaatcagagaaaaagggctgacccatacaaaagaagtcatgaacgtgctcggctggaaaacggcggaaggctgttccaaatgccgccctgcgcttaactactacctcggcatgatcaatccgaaggaatatgaagatgaaagagaatcccgcttcgtcaatgaacggatgcacgccaacattcaaaaagacggcacatattcagtcgtaccgcggatgtacggcggggtcaccaattcgaatgacttgcggcgcatcgccgatgtcgtcgacaaatatgaaattcctctagtgaaaatgaccggcggccagcggatcgatctgatcggcgtcaaaaaagaggatcttccgaaagtatgggctgatcttgacatgccttctggatttgcttacggaaaaacgctcagaaccgtaaaaacgtgcgtaggcgaacagttctgccgcttcggaacgcaagattcaatggctctcggaattgaccttgagaaaaaatttgaagggctctacacgcctcacaaaattaaaatggcggtttccgcttgtccgagaaactgtgctgaatccggcattaaagatatcggcgttgtcggcatcgacggcggctgggaaatttacgtcggcggaaacggaggcacacatctgcgtgcaggcgatctgttaatgaaagtcaaaacggctgaagaagtcatcgaaatcacaggcgcatatctccaatactatcgtgaaacagccaactatttagagcggacatctgcatggatcgaacgtgtcggcttgtcccacgtccaatccgtattgaatgataaagaaaaacgcaaagagctgaatgaccgcatcaatcaagcgctgtctgtccataaagacccgtggaaagactttttggaagacggaaagacaacaagacagctattcgaaaatgttgtcacttcctaa

SEQ ID NO: 579 - DNA, 321 bp, Bacillus licheniformis
atggtgaacaagaacttaacaaaggtgtttgtttcgaagatcggggatttgccgaatcagcttgggaagacagtgttcatcaaggacaaggaaatcgcggtattcaagctttcaaacggcagcgtccgcgcgattgaaaaccgctgcccccacaaagggggcgtgcttgccgaaggaatggtaagcggcgaattcgtcttctgtccgatgcacgactggaagatcagccttgaagacggcaaagtccaagagcctgacacggggtgtgtgcagacatacgaaacggtcgttgaaggcgaagatttgtatatcgtttattaa

SEQ ID NO: 580 - DNA, 1461 bp, Bacillus licheniformis
atggggaatgggaaagtttattttgtcggggccggaccgggcgattcaggattgatcacattaaaaggaagaacgctgatcgaggcggcggatgtcatattgtatgacaggctcgtcaattcccggctgcttgagcatgcaaaagcatcatgcgaatttgtctactgcggcaagctcccggaccgccattatatgaggcaaagtgaaatcaatgcactgctcattgaaaaggggctgaaaggcctcaaagtggtccggctgaaaggaggagacccgagcgtgtttggcagagtcggggaagaagcggccgccgtcagcgaacacggcatcccgtacgagatggtgccaggcattacatcgggaatcgccgctcctctttatgccggactgcctgtgacccaccgcgatttcgcttcatcctttgccgttgtcaccgcccatgataaatcgggcaaaccggagatgaattgggaagggctggccaagggcgtccaaaccctcgtcttttacatggggatcaaaaaccttggttatatatgcgagcagctgatgaaacacggcaagtccccccttgttcccgcaatggccatccaatggggcacatggggccggcagcggagtgttaaagggacattgcagaatatcagggagaaaataaccgagcatcagatcaaaaatcccgcgattatcgtcatcggcgacatcgtatcattcaggcagaacagctggtttgaagaaaagcctttgatcgggctgaacatcatggcagtcaaaagctgtgaagaagaacaaattccagtggaggcgcttcgtgaacaaggcgctgaagttgtggaatggccgaaatggaaatcggccgaaacggtgcctgacgatgcacttttaggtcgaatcgcttgttttgacagcctgctgttcacctcaagtgcgtcactgcgcagatttttcagccggcttgctgctttgaagatcgatgtcagggaaatgcgcggaaggctttacgcttcagatcagcatgtaaaagcagctcttgaagaacggggatttgaagcctttctgcaaacggaaatgccggtctcgggcagctgtttgctgatcggcagccgggaagccgtgcaaaattacccgcactccgggtgcgaggtattgattacacatgacagggtgatcgacagccgctttacctcgatcatcaaacgggaaattgatgagtttcctattgatatagtgttgttttcaaatcgaacatgcgtcgagctgttcgtaaacgaggcggagacagtcggcctccatccggaaaaaacggctgcccgtcttcaggcgttctgcctcactgaagaagcgggggagagagctgcagccgtagggtttcagcgcgttcatgcagtgaatgatcgcgatcgcctgccggatgtcatcaaagagatcaaccgaacagccgaatttgtctgtcagagctga

SEQ ID NO: 581 - DNA, 114 bp, Bacillus licheniformis
atgtcatcaaagagatcaaccgaacagccgaatttgtctgtcagagctgaaaaaagcagggggaaccctgcttttttagcgtgcggcactgcttctgaacaacacctcttttaa

SEQ ID NO: 582 - DNA, 681 bp, Bacillus licheniformis
gtgaagttttcgatccaacgtgcagtctcttatcatgatcaagtccatcattatttaaaagatatgattattaaaggaggatatcagcccggcgaacggatctatgaatccaaaatcgccaaggagctgcaagtgagccgcagccccgtcagagaggcgattcggacacttgaacaagaaggcctgttattgatagatgataaatcaaaaattacagtttatgaaccgacaatcaaagatcttgaagaaatataccaatgccgtcaggcgctcgaatccctggccgtttctttggcgactcgccttgcctctaatgaaacactggagctcatttccgaaacgctctctgaggcgcataagcaccagaaaagccaaggtccggagtcggctaatgctctgcttcgcctaaatacgcaatttcatgatgccatcatcgaagcgagcgaaaacgaacgcctgcaaaaacagctgcttgatttacggtcgctgacctttttctaccggagcaaaaaccttgaaaaaccggagcgcactcttgaaatcatcaatcagcacgaggagattctgcgtcacatgcaggacagaaatgacgcaaaagcagccgaatcaatgaggaagcatatagaggcagacctttgctacttaaaagaggtgttgttcagaagcagtgccgcacgctaa

SEQ ID NO: 583 - DNA, 1641 bp, Bacillus licheniformis
atgaaatcaagcgttgtgtcagcatgggatatgctttggagatcacaccgggaagcaaagaggctgcttttgttcgccatgcctgtcagggcgggaaaagatgccggtttaaagataaattcggaacaaaccatgaaggaagagaagccgccgagctataaaacgcctcaaaaaatcgggctgctgcttggtcctgcattgtttttcgctgtccttttgttcttttttcccgagggtctgagctatgaaggtagaatggtattggcgactactttgtgggttgcggtttggtggattacggaggctgttccgattccggctgcatcattgctgccgatcgtgctgcttccgctgacgggggcgctggaaggggcagctgtcacgtcgagctacggcgatccgatcgtctttttattcttagggggcttcttgattgcacttgcgatggaacgttggaatctccataaacggattgcgctcaatattatttctgtagtgggcacgagcacctcgaggatcgtcctcggttttatggcggccacaggatttttgtctatgtgggtctcaaatacggccgcggtgatgatgatgcttccaattggaaccgctatcattcatcaggtatcagctgtcataaagtctgaaagaaaagatttagccgcagaagaggcgaaattttcaaaagcgctgatcttcagcatcgggtatgcggggacaatcggcggactcggtacgctgatcggcacgccgccgaacattattttggcggccaatattaagaagctgtacggagttgaagtgtctttcggcggatggatggcttttgccgttccggtcgtcgtcattttgcttgtagcggtatggctgtacttgacgaaagtggcgcatccgatcaagatgaaggagcttccgggcggaaaagaattgattctcgaagaaaaaagaaagcttggaaagatgagttttgaagaaacaatggttctgctcgtcttcgggtttgccgcgtttatgtgggtgacgagaacgtttttatgggatgacaaaataccgggtattgacgatacaatgattgcgatattcgccgcttcattgctcttcttgatcccttcgctcaataaagggggcagggtattggactggtcggtatcgaaggacttgccgtgggggattctccttttattcggaggaggcttggcgctcgcaacaggttttaaagaaacgggtctggcggagtggatcggcggaaggctgacggtattggatggatttaactttgtggttattgtcatcatctcaacggcattggtgctgtttttgacggagattacgtcgaatacggctacggcgaccatgattctgcctgtactggcctcgctcgctttagcgctgaatgttcatccgtacgcattaatggtgcctgctgcaatggcggcaaactgcgccttcatgctgccggtcggcacgccgccgaatgcaattattttcgcatcgggcaaattgaagatcagcgaaatggttcgaaccggctttgtcattaatattttcacgctaattttaatcgtcggagctgtgttctacattcttccgcatttatggggagtagatctgaccgtcttccccgacaatctgaaatcgaattga

SEQ ID NO: 584 - DNA, 413 bp, Bacillus licheniformis
atgaacaaccctgtactgccgcatcgatatccatttctattcatagattgtgttgtagagagtgagccgggaaaatgggtgaaaggctataaattcataacggaaaacgactggttcatcaccgaaaatcaaaaggaaatgccattttcatcttaatagaagcgctggctcagaccgcagcatttactgcgttgaaagaaccggctgaaatcggctttctgtcttcggtgaaaaaagccgaatgcaccggcaaggccgttgtgggagacaaacttgatctatactttgaagtttcccgctataaacgggggtttttattcggcaaaggaaccgcctcagtaaacggaaaacctgcagtgaaagcagagatcggaatttttatggagcaaagtgaaagcgggggagaagattga

SEQ ID NO: 585 - DNA, 468 bp, Bacillus licheniformis
ttgatagaaataaagcctgtcgcgtttgtggaaaacttgcggactttcccgaaggatgatcattggggcgatgtgatttctgaaattaagttggctgaaggcatccatccggacgctttaaaagggatcgaagaattttcccatttggacattatcttttactttcatcaagtaaaagaggaacacattcaatataaggcgaggcgcccgagaaacaataaaaactatcctgagacaggcattttcgcccaacggggaaaaaacaggccgaacaggctcggcgcgaccgttgtcaccctccttgaaaaatccgggagcaagcttgtagtgaaagggttggatgcgattgacggaacacctgtaatcgatatcaaaccggtgatgaaagagtttctcccgaaaggacaaatcatacagccgaaatggtcggaagatttgatgaaagtatattggcatgcagctgattga

SEQ ID NO: 586 - DNA, 2052 bp, Bacillus licheniformis
atgatcaacgagaaacgtcctgctcaattgctccaatatttgctgcgtgtcagagaggcgacaatgcatcagctgattgatcattttcaattatcgaaacggcaaatctgctatgacctggacaaaatcaatcattggctgaccggcaagcagctgcctgaaatcgaatataaaagaaagaacaggctggccgttccggaaacattgcttgaattgcggttctccgaagcctgttcagacatcggccgctcgtttatttttacgcaggaagagcggatcaaggccttgtacatgtttctgtttgtccgcagggagccgatttcatccgctcatctgacacagctattgcaggtcagcaaaaatacggtcatgaatgatgtgaaaaaagcgaatgaggcgctgactccgtttttagtggcgatcaaatatacaagacagcgcggctatcatttaataggaagcgagtttgataaaagagttcccgtcatgcaccacctttcttctttcctgcaaaagccttacggcaaagaaatccttcattatattttaaaaatttccggctcgcgcgatcacaaacaacaagaatttaaaagagcggttgaacttgtctcaaaagaatacgggcttcaactcgtcgaagaaaggcttaatgaatttatctactttctgatgatgtattcgatcagagtggccgaaggaaaaattgtccgttttcaccaggaggagggtgagcttttaaagcaaagtccgctgaaaaacgcagccgtaaggcttgtgaatgagcttcggattcccgttcatgaaacggaactttgctacattttgatccagctgctcggtctttcattcggacagcagccggcacatgatccgctttatcagctgtgtgaaaaacttgtatttgaatttgaatcaagagcatgcatcacatttcccaggaggcgcgaggtggcggaatctctttaccggcacttgaagccggcatatttcagaatgaaataccgcattccgattcacaatcccttgctcagcaaaattaagaaagagcataaagaactgtttaccatcgttcaaaagctgatgcggcaccttgaagcgctgttgaacaaaccggttccagaggaagaaatcggctttatcacaattcattttggtgcattgcttgagcagccggtgcagtccgggtcatccaaaaagacggcagtcgtcgtctgtccgagcggtgtcagctcatccttaatggtcaggcgccagcttgaatcgttattttcagagattgtcgttgagaaagcgatgtctttgcaggaattcacacctgacgtctttgatcattatgatgccgtgttttccaccgttgagctgaaaaccaaaaagcgatactacatggtcaggccgctgatgacgcccgctgaaaaaagcaggcttgtcaatgaagtgtatcaggaaatgttcggtgtgaagcaaagggagcttttgacagacgaatttcttcacatcctcaagaagcatgccagtatcatagacgaaaaaggactaagagaatcattgaaaaatattgcatttgttcaaaaagtgacggaaacaagggggaaacgaccagtgctgaaagatcttctgacagatgaaaccattcaaatggccgaacaaatcaaaggctgggaagaagcgattcaaacagcggcaaagcctttgcttgataaggaggtgatcttgaaggaatacacggatgccatgatcgacaatgtcaaaacgatgggaccttatatgattatcggccccgagattgccatccctcatgcaagacctgaaaagggcgtccaaaaggtgggaatgagtctcctgaaactgaaggagccggtctattttttggatgatgagcagtatccggtaaggcttttgttttgcattgcggcggttgaccatacgacacatctgaaagcactttcccaactgacccggcttctcagcaataaagaaaatcaggattccttaaaggaaaccgagtcgttggagcatatcaaacgtttaatcgaagcctattcatccaattaa

SEQ ID NO: 587 - DNA, 282 bp, Bacillus licheniformis
atgaagatattggcagtttgcggatcaggactcggaagcagttttatgctggaaatgaatattaaggatattttgcaggaaatggggttaatggagatcgaggtggatcattcggatttgagttcagcgtctcctgatcaagcggatttgtttatcgttgccaaagatatcgcagaaggagcggcccacctgcgcgatatcgtcgtgcttgaaagcattatagacatggatgaactgaaaacaaaactggttaaaacattgcaggaaaaaggagtgctttaa

SEQ ID NO: 588 - DNA, 1375 bp, Bacillus licheniformis
atgggtgaaagagcactaaagctgatgatggatgtgttaagccagccggctgtattaattgcagccatttctcttatcggtcttctgcttcaaaaaaagcctgccaatgaaattgtgaaaggggacgaccaaatcgtttttaggctttatcgtgatttcagccggggcgggcatccttgttggctcgcttgagccgttcggaaagatgtttcaagcagcctttcatgtgaacggcgtcgttccgaacaatgaagcgattgtcgcgatggcgctcaatgaatacgggacggcaacagcgctgatcatgtttttcgggatgctgtccaacatcttaattgcccgttttaccagattaaaatacatttttttgaccgggcatcacacattgtatatggcatgtttaatcgccgttatactggcggtggcgggtttgaagggcccgtttttgatcggcgtcggagctgtttcgctcggcttgacaatgagtttgtttccggcgatggttcagccttttatgaaaaagataaccggcaatgataaggtcgcgttcggccatttttcttcaatcggttacgctgtgtccgggttaatcggcaaagcggcaggcaagggctcgcgctcaactgaaaaaatccggtttccaaacggcctcggatttttaagggacagctctgtcagcattgcgctcactatgaccatcttgtacgttttgattgccttatttgcaggggcgggctatgtggagcgcgagttgagcggcggtacgcattatcttgtcttctccgttattcaagcggtcacatttgcggcaggggtgtttattattctttcgggagtcagactcgtgctcgcggagatcgttccggcttttaaaggcatatctgataaactcgtaccggattccaagccggcactggattgtccgatcatttttccgtacgcgccaaacgccgtattaatcggctttttttgcagcttcattggcggcatcaccggcatgctgattctcggagcggccggagccgtcatcgttcttcccggagtggttccccactttttcacaggagcttcggccggcgtattcggaaacgctgcaggggggatacggggagcggtcttggggtcttttgtcaacggtctgattatcacgtttttccctgtgttcctgctgccggtcatgggtgatttaggctttgccaatacgacattttccgataccgattttgccgcaacaggaatcgtgcttgggcatgcggtgaaactgctgggatctggaggcgttgtaattggaatcgcagcggtagtggttggcgcagtcttgttcggctttaaacgcggaaaggcggaaaagccagatcagaaagtcgaagcataa

SEQ ID NO: 589 - DNA, 843 bp, Bacillus licheniformis
atgtcagtaagggaaatcgatatggagcgttttcgtgatcaaatcaggctgctgacattgaaacagcttcatcacctcggctttggacattatggtggcagcttgtcaatcgccgatgtgttggccgttttgtatggaaaggtgatgaaaatagatcctgccaatccgtcgtgggaagatcgggacttctttatcctttcaaaagggcacggcggccccgccttatatgcagcgcttcatctttccggctattttgaagaagatgtgctctatacgctaaaccaaaacggcacagctcttccgtcgcaccctgaccgaaatttaacaccgggagtcgatatgacgaccgggtcgctgggccaggggatctcggctgcagcaggagtcgcgctgtcgcacaagctttcaggacgcgctaaccgcacctttgtcattgtcggcgacggggagctgaacgaaggccaatgctgggaagcgatccaatttgcggcgcaccataagctccgcaatctttatgtgtttgtggatgataataaacaacagctggacggcccgacgaaagagattatcgatccgctggattttgtcagcaaatttagagccttcgggttttattccgaaagggtaaacggacacgaaccggaagcgatttatcgtgcggtcaaaagaggagaagcccagcgggaaaggccggttgccgtcatccttgatacggtgaagggaaagggcatcccttattttgaaaaaatggagaacagccaccacattagagcaaatgaagagcaaaaccgcatgatcgaaaggatcattttgacgcttgaagaaaaggaagtgagggcatga

SEQ ID NO: 590 - DNA, 951 bp, Bacillus licheniformis
atgaatgaggcggcaaatgtagagctggacgctgttgaaatgaggcaggcatacagctcagccgtttatgaactggctcaagaaaacacggacatcgtggccttggaagcggatttgatgagctcgatctccatggacaaagtcaaacggcgcattcccgagcaagtgatcaattgcggtgtcatggaagccaatatgatagggattgcggccgggctttcgttaaccggaagaatcccgtttgttcacacgttcgctcagtttgcgacaagacgctgttttgaccagctgtttgtttcaggtgcatatgccaaaacaaacattaagattctcggatcagattcgggaattacggctgaacataacggcggaacccatatggcctttgaagatttgggactcgcccggctgatcccaaacgcctttgtttatgaagcaagcgatgcggcaatgctcaaatttttgatcaaaaaggctgcggcagagtacggcattcactatatcaggacgatcagaaaaaaggctgtcaggctttatgatgaacacgaaacattcacagacggaaaagcaaaagttctcaaagatggcagcgatgcggcgctgtttgccagcggcatcatggtcgccgaagctttgcaggcggctgaactgctaaaagaaaaaggaatcgatgcagcagtgatcgatatgtattgcatcaagccgattgatcaagaaacggtggttcgttatgcacaaaaaacgaatgcgattgtcacggctgaaaaccataatgtcataggcggattgggaagcgcagttgcggaagtgctgagtgaacattatcccgcgccgcttaaaagaatcggggttcatgaagccttcgggcaggtcgggacaatcgattatttgaaaaaatcttaccgtttgaccgcagaacacattgcactggcggcggaacagctcgtttaa

SEQ ID NO: 591 - DNA, 756 bp, Bacillus licheniformis
gtgtcagtcagtcaaagaaatcgaatcgatgtgaagctagtagctctggatatggatggaacactgttaaatgacgaacaaaccatttctgatgaaaacagaaaagcgattaaagaagctgaggaaaaaggggtttatgtcgtgcttagcaccgggcggacgctgatgacgtgccgggagttggcggagtcgctcgaactgtcttcttttttgatcacggcaaacggcagtgaaatctgggattcgtctttcaacctggtcgagcgccagctgcttcatcccgatcatgtccaaatgatgtgggatttgcgcaatctgcacaacaccgatttctgggccgccagtgtcgataaagtgtggagaggcgagtttcctgaggatatacaagcgtatgaatggctgaaattcggctttgatattccggatgacgacgtcagaaaccgggtcctggaagagctgaaaaagaacaaagaattggaagtcaccaattcaagcccgaccaatattgaagtcaatgccatcgggatcaataaagcggccgctttggcaaaagtgtgcgagcgcctcggctttacgatggaacatgtgatggcggtcggagacagtttaaatgatatcgccatgatcaaagaagccggtttaggtgttgccatggggaacgcccaggaaatcgtcaaagaaaccgcggactggattacagattccaatatcgaacacggagtcgcaaaggcgatcaggcattgggtattgtcctag

SEQ ID NO: 592 - DNA, 120 bp, Bacillus licheniformis
ttgggtattgtcctagccgaaaaaagagccgatttgcggctcttttttttgtgcaaaataaaaaatattcatggactgaagcaagctgaaaaaccttgtgaaatcaggtttttcagctaa

SEQ ID NO: 593 - DNA, 762 bp, Bacillus licheniformis
atgaatcaagttgatttaaactgcgatcttggagaaagcttcggcgcttataaaatcgggctggatgaggagattctcgagtttgttacatcagccaacatcgcttgcggatttcatgcgggagaccctggcgtcatgcgcaaaaccgtcaaaatggcggcggaaaaaggcgtgaaaatcggcgcgcatccgggacttcccgatttagcgggattcgggcgccgcaatatggcgatcacgcctgaagaagcatacgatcttgtcgtgtatcaaatcggtgcgctttcaggatttctaaaggctgaaggcgtgaccatgcagcatgtgaaaccccatggcgcactatataatatggctgcgcaaagccgggaactgtcggatgcgatcgcgcgcgcagtttatcaaacagacccggaactgattttattcggtttggcgggaagcgaacttgtgcttgccggtgaaagagccggtttaaaaacggctcacgaagttttcgccgaccgtacatatcaagaagacggaacgctgacttcccgccgccagaatgatgcgctgattcaagatgacgatgaagccgtcggccaggtgatccgcatggtgaaagaaggcaaggtccgcagcctgcagggaacggatgtcatccttaaagcagatacggtgtgcattcacggtgatggtgcacacgcgcttcagtttgcgaaaaaaatccgccgcgaactcagagcagcagatattaaagtacaagctttttctacatga

SEQ ID NO: 594 - DNA, 1212 bp, Bacillus licheniformis
ttgaaacaaaataaaaaaacaaaagcgccggcaggcaactggacgttgcttttgggcgccgcttttttaatggccacatctgcaatcggtccgggatttttaacacaaaccacagtatttacacaatctttggccgcaagcttcggctttgtcatcctcgtttccatcattttagatattttcgcccaaaccaatgtgtggagaattattgcggtttctgaaaaaagagggcaggaaatcgccaacctcgtcttaccgggactcggctattttatcgcctttcttgtcgttctgggcgggcttgccttcaacatcggcaatatcggaggcgccggtctcggcatgcaggttttattcggcatttcgccgcagatgggagccatcatcagcgccgtcatcgcgattttgatctttgtcattaaagaagcgggaaaagcgatggaccggtttacgctgatcgcaggctttgtcatgattttactgacggtgtacgtcgctgtcaccaccggacctccggtaggggaagcgataacgaagacggtcatgcctgataacattgattatcttgcgattataacgcttgtcggcggtacggtcggcggatacattacatttgccggcggacaccgattgcttgatgcgggtgttaaagggaaggatgcgatccctgaagtaacgaaaagctctgtttccggcattttgatcacgtctgtcatgaggattgcgcttttccttgccgtacttggcgtcgtatcaaaaggtatgcagattaatccggataatccgccggcatcagtattccagcatgccgcaggaaatgtcggatacaaaatcttcggcctcgtcatgtggagcgctgctattacatccgtgatcggtgctgcttatacgtcggtatcattctttaaaacgttttctccgaaaatcgaaaagaattcacgcggcattataattgtctttattattgtatcaacgctttgctttgtaacaattggaaagccggtcaaccttctcgttcttgccggcgcattaaacggcttaatcttgccgatcgcactaggctcccttttaatcggcgcgcataagaagaatgtcatcggcgactacaggcatccgatctggcttacaattccgggcattctggtcgttattgtcatggccatcatgggaggctatacgttaatcaatgaaattcctaagttatggggatga

SEQ ID NO: 595 - DNA, 789 bp, Bacillus licheniformis
ttgcatgtaaatgaaatgcgtcctgacgaagtcagggctctgattcgaaaaggggaaataacgggtccgacagccggcatggccgggggttttacccaggcaaacctggtgattttgaaaaaagagctcgcttttgagttcttgctgttttgccagcgcaatcaaaagccgtgtccgattcttgatgtcacggaccccggatctccggttccgtccatcacggcgccggacgctgatatccgcaccgattttccaaaataccgcgtatacaagcgtggcgaattggcggatgaagtgacagatatctcttctttatgggaagacgacatggtcggttttttaatcggctgcagctttacgttcgaacaagcgttaatgaataacggaatccctgtcagacacattgaagaaaagcgaaatgtcccgatgtatcaaacgaatattccttgtgtcccggcaggccgttttcaagggcctatggtcgtcagcatgaggccggttccggaagagcaggcggtgcgagccgttcaggttacatcaaggcttcccgccgttcacggagggcctgtccatatcggcagtccagaagccatcggtataacagacatcgcaaaacccgatttcggcgatgcggtaacgataaaaaaaggggaagttccggtattctgggcttgcggcgtcacccctcaggcagtcgcaatgcacgcaaggccggagctgatgattacgcattcgcccggccatatgctggttaccgatgttcgggatgaacaatttggtgtgttatag

SEQ ID NO: 596 - DNA, 735 bp, Bacillus licheniformis
ttgaaaaatctttcgaatgcgacaatgtctccgctcggcgactccgcggttatcatccagcttggagaggggataagcgaacagacgcaccgtgtcgtcagcgcgctgacaaagcggattgaaaacgatccgtttcccggttttattgagtgtgtgccggctttcacgagtgtgaccgttttctatcagccatttgaagtataccgcaagatggagagcggcaaggctgttgattctccgtatgaaaaggtaaaagccctcctcgaccatcatctccaagagctcacaatggaagaagagacagatcagcgcacggtggaaattccggtttgttacggcggccgtttcggccctgatttggaggaagtggccgacatcaacggcctgactgcacaggaagtcatcgatattcacacctcgggtgagtacctcgtttatatgatcggctttgcgccgggcttcccttacctaggcggaatgtctgaaaagatagccgcaccgcggcggtcatctcctcggacttcgattcccgccggttcagtcggaatagccggcatgcaaacaggcgtctatcccctttcaacgccgggcggctggcagctgatcggcaatacgccgcttgaattattcaagccttatgaacagcctccgagccttctgagagcaggggatatcgtgaaatttgtcagcgtgacagaagaggagtatcacgcgctgaaggaggggaaatcttga

SEQ ID NO: 597 - DNA, 1014 bp, Bacillus licheniformis
ttgagcatagaagtgttaaagccgggtctgatgacaacggttcaagacttgggccgcacaggttttcaaaaatacggcgtgcttgtcagcggtgccatggatgccgattctttgcggattgccaatctgctcgcggggaacagccagaacgaagctgcgcttgaagtgacgctgatggggccggggccgtctctccgctttcaaaaacctgctcttatagcggtgacgggcgctgacttttcactgatggtaaatgacgaagaagtcccgctttggcgcccggttttcatcaaagagggcagcgtgttgacattcggcatgtgcaagcgcggaagccgtgcatatatggcagtggccgggggaattgatgtgccgcctgtaatggaaagcaaaagcacatatgtcagagcaggactcggcggctttcaaggaagggcgcttcaaaagggagacgtgttatcgctaggcagcccgacgccgttgtcggaagcgctgcacagaaagctcgcagacgagggcaaagaacggggctttgcggctccgaagtgggctgtcgaccgcaaatattttctcccgctaaaaaagaacccggtcattcgtgtcatcaaaggcgatcagtttgcttgctttacctcatcatcacaagagcgctttttcgcgggtccattccgggtgacggctaaatccgaccggatggggtaccgtcttcaaggagaggcgctcgaactcactcagcctctggaaatgatctctgaagcggtatcattcggaacgattcaagtgccgcccgacggcaatccgatcgttcttctcgcagacaggcagacagcgggcggatacccgagaatcgcccatatcgcatcagctgatttttctcaggtcacgcagatgatgccgggcgagcaggtgcagtttcagcttgtcagccttcaggaagcagagcgcgtttacatcgaacgggagacgaaaatcagcgaactttctgcccgattgaagcttgaatacatgttatga

SEQ ID NO: 598 - DNA, 750 bp, Bacillus licheniformis
atggaacataaaaacaaaacagtcgtcaaagccatgaccctgctcaatctgttcctgacgagagaaaggctctcgctgggcgacatgattgagctgacaggcatgccgaaaacatctgtctaccgcatggtttgttctctcgaagaaatgggttttctcgaccgcgacgagaacgggatgtatagcttaggactgctgtttttgcaatacggccaccttgtttcagaaaggcttgatattcgaaaaatcgctctgcccatcatggaagaactccgcgatgacgtggatgaagccgtccatttaattgtaaggcagggaaatgaagcaatgtatatagaaaaaattgagggcacgcagaccgttcgcctctatacagcgatcgggaggcggtcccctttatatgccggagcctgtgcgagaagcattctgacgtttttgcctgaagaggagcgggatgcctatatcgagcaaacagagctggtgccgatcgcttccggcacgatccgggacaaggctgagctgatccgcattgtggacgagtcgtaccggagcggctgcacggtcagtcattcggagctcgaagactacacctccgcgattgccgcgccgattttcaatcataagcgcgaagtcgcagctgggatcagcatcgccgggtttgaagcccgctttcagaaagaccgtcttccttatttgaccgaaagagtgaaaaaggcggcgcttgacatctcgagaaaattaggtttttag

SEQ ID NO: 599 - DNA, 639 bp, Bacillus licheniformis
atgacgcttcaatatacggctctcggcgactctttaaccgtcggggtcggtgcaggtttgtttgagccgggatttgtacagcgctataaaaggaaaatggaagaggatttgaacgaagaagtttctttgattgtatttgcgaaatccggtcttgagacgtcggaaattttagcgatgctgaacgagcctttcatcatggaacaggtcaaaaaagcggacgtcatcacgataacgggctgcggaaatgatcttctgcaatcgctggagatatatgaaaaagaaaaggatgaacacgtctttttggaagcttcctcccactgtcagaaaaactactcaggcatgcttgagaagatcagagaaataaagggagaaaaagatacgcgttatctcgtccggcttctcaatttatacaacccatttccgtcaatcgaattagcggacaaatggatttccggctttaacaggcacttaaagcagctagagtccgctccgcaaatcaaggtgatcgatacttatgctgtctttaaaggacgcgaaaaagaatatttgtcaattgaccgtgtgcatccaagcagcagagggtatgaagcgatgtcggaaaagctgagagcggcgggctacgggcggctggagggctga

SEQ ID NO: 600 - DNA, 1932 bp, Bacillus licheniformis
atggaagatagacaaaatcaagatttcaaagtaaagattcaacgtttcggaagctatttgagcggaatgatcatgccgaatatcggtgcatttatcgcatgggggatcattaccgcattgtttattccgacgggatggatgccgaatgaagcgcttgcttcattggttgatccaatgatcaaatttttgctgccgctcttgattggatacacgggcggtaagatggtgtacgatcaccgcggaggcgtcgtcggtgcgactgcagcgatcggcgttatcgtcggcgcggacattccgatgttcctcggcgcgatgatcatggggccgctgggcggctacctgatgaaactgacggacaggcttttcaaagataaggtccgttccggatttgaaatgctgatcaacaactttacagccggaattctcggcttcattctggcggtgctcggctttcttgcaatcggtccggtggtgctcggcttaaacaaaacattggcggccggcgtggaagtgatcgtcaatgcgaatctgcttccgctcgcaagtatttttgtagagcctgcgaaagttcttttccttaacaatgcgatcaaccacggtattttgagcccgattggtattgagcaggccgcccagacaggaaaatcaattttattccttttagaggcgaacccaggccctggtctcgggattcttttagcttacatgattttcggaagaggcacatcaaagcagaccgctccgggcgctgcagtgatccatttcctaggcggtattcacgaaatttatttcccttacattctgatgaaaccgctgttaatcctggctgcaatagcgggcggagcgagcggtgtgctgacgttttccatctttaatgcggggcttgcggctgttccttcacctggaagtattattgcggtgctggcgatgacgccgaaaggcaaccacatcggcgtgatccttggtgttctcgtcgcagcagtcgtttcattcattgtagcttctttgattttgaaaacgtctaaagccggcgaagaagatttgacggccgcggcggaaaaaatgcagcaaatgaaaggcaagaagagccaggccgtttctgcattgacttcggctgacgaagcggaagaatcagcggctccgtacgaaaatgtcagcaagatcatcttcgcgtgtgatgccggaatgggctccagtgcgatgggggcatcaattttgaaaaacaaagtcaaaaaagcagaactcgatatcgacgtatccaatacatcgatcaataatctgccggaagatgccgatatcgtcatcacgcataaagacttaacggaacgcgcaaaagcgaagcttccaagcgccagacacatatcggtggaaaacttccttaacagtccaaaatacgacgaactgatcaatcagcttaaaaagtaaagtttgagaacccgtgagcctgaaaatcaggctcacacaacatgtatgaaagagagtgatttcccaatgaaaccagtacttgcaaaagaaaacattcatctcaatcaatctgccgcaacgcaggaagaagcgatcagactggccggaaaggcgctggttgacgccggctatgttaccgcggattatatcgagaaaatgttggagagggaaggcctcacttccacttacatggggaacgcaatcgccattccgcatggtacggaagacagcaagcaggatgttcttcattccggaatatccgttatccagcttccggaaggtgtcgaatacggcgatggcaatattgctaaagtgatctttggcattgccggaaaaaatgatgagcatttggagattttgtcaaagattgcgattgtctgctcagaagcggacaatgtcgaacggatcatcaatgcgaaaaatgaagacgagttaatggcggtttttgaagaaggtgaccaggtatga

SEQ ID NO: 601 - DNA, 1140 bp, Bacillus licheniformis
atgattgcactgcatttcggtgcggggaacatcggccgcggatttatcggagccttgctctgcaaatcggggtatgatgtcgtgttcgccgatgtaaatgatgccgtgatcaatgaactgaacgataagggccgctataccgtcgaaatggccgatgccggaaggaagcaggaaacgatcggaccggtccgggcgatcaacagtgcgacccagcttgacgaattgtatgatttgatagcgaaagccgaccttgtcaccacagcggtaggcccggcggtgcttaaattgatcgcagagccgattgcagaaggtttgaagcgtcggatgaaaataaacaagcagcctttaaatattatagcttgcgagaatatgatcgggggcagcgctcatcttcgcgaggaaattttcgcccgcttaactgaaacggagcgcgccgcaatcagcgattcagtcggctttccgaactcggcagtcgacagaatcgtgccgatccagcaccatgatgatccgttgaaagtaacggtggagccttttttcgaatgggccgttgatcaaacggaattcgccggaaaagtgccggatattgaaggtgtgacatatgtagcggatcttgcgccattcatcgaaagaaagctgtttacggtcaataccggacacgccatggcggcgtatgccggctataagaaaggtttgaagacgataaaagacgccattcatcatctggaggtccgccaaacggtggcaggcgcgctagaagaaacaggccggtaccttgtccaaacatacgattttacacaggaagagcaccgggcatatatgacaaaaattatcggccgctttgagaatgaatgcctgtcagacgatgtcacccgtgtggccaggtcgccgcttcgcaagcttggcagggatgaccgtcttgtcggcccggcccggaagctttgcgatctcggctttgaacctgtccgccttgcagaaggcattgccctggcgctgcagtttgattgtgccgatgatccggaagccgttcagcttcaaagcatgatcgctgaaaaaggctatgccggcgtgcttcgcgacgtatgcggactcgaagaggatcattctttattcaaactggtaatcagccatttgaaagcatag

SEQ ID NO: 602 - DNA, 2078 bp, Bacillus licheniformis
atgtatatgacagcaagggaacaaaaactaatgaaataccttttgcatcaaaaccgttatgtcaaagtcaatgaaattgccggctatatagaagtcagcacaagaacggtccaccgcgagctcaaggcggttaaatccgttctggacaagtacaggcttcagcttgataagcagccgggaaaaggcttgaaactggtcggagcctacagagacaaacagcggcttcttgaagatctgtcccgggacagtcatgtcgaatacagtgccgatgaacgaaagcttttgattttatgcgcgatgcttgaacgggagagccgatcaagctttatacaattgcccatgacttgcaggtgacggcggcaacgatcagcaacgatcttgacgagctggagaagtggatcgctccattcggcctttcgctgatcagaaaaagaggctacggtatagagctgagggggccggaggacgccaagcggaaaatcgtcggaaacttgatggccgacaagctcgatgttcagcagtttctggaaacgatcgaaatgaatattaaaggcaagaacgaagcgccggagaaaatattcggtgtcgtcagccgggggaaattgctgaaagcggaaaaagtgctgtttcagatgaaagaaaagtatggactttctctttccgacagtgcatacatcgctctggtcgtccacttgacgtttgcgatcgagcggatacagctcggtgaaatgatcaatatgaatgaagaagaattgacggatctgaagcgtacgaaagagtttgaactggcgcttgcgcttgcaaaggcgcttgaagatgcgtttcacgtgaagatacccgaagctgaggcggggtatattacgatgcatttaagaagcgccaacaaaagcttcaaaatcgactacagagcggaagatatcgagctggatactgcgctcagaacgaaaaagctgatcgatttcatctcgcaaaaaacgggcatgaatttaaccggcaatcattcgctttatgaaggattaatcgcccaccttgaaccggcgatcatccggatcaaagaaaagatgtcggtgcataatccgttaacagagcaggtcaaaaaagattattttctcctatatatggccatagaggaaggcgtcgaaatatttttcccggaaatccggtttccagatgaagaaattgcttttatcgtccttcactttggatcggcgcttgagatgagcaaacaaaaagtagacatcaacgcgctcgtgatttgttcgagcggaatcggttcatcaaagatgctggcctcgcggttgaaaaaagagcttcctgaaatcgcttcctttgagatatcctctctgatggaactgaagacgaaaaacactgatgcctttgacatcatcgtttcaaccgtgccgatcccatatgaaaacattgactgcgtcaccgtcagtcccctccttgacacggaagatgtgaaacagatcaaacaccagctcacccgaaaaatcccgctcatccttcggaaaaagcggatggcgcccaaaaaaccggagccgtttccagatatgcttcagattgcgcggaaaatcggccattacgcggccggcattcaacatatactgagccattttacggttgaaacgatggaagctgaatcaagcctggaacatacggtcaaacggatttgcggaaccctggaagatcaaggcctggttaaggatgcagggcagatggcggatggactgatgaaaagagaagcacagggtggcctcggaattcccggaacaaccttcgcgctgtttcatttaaaaagtgaagcggccgcggttcccctctttaaagcttatgatctgtccaaaccgttcgagatcaaagggatggacggaagcgccatgaagatgatgcggatgctcatcatgctggcgccggccgatctgtctccggaaggttccgagattctgagcttcatcagctcttcgatgatagaaagtgatgagagcataaaagcataccagaccggagaccgcgagcagctgtacggcatgctgaacgtgctgtttcaccggtttatacaggataaagagtggtga

SEQ ID NO: 603 - DNA, 870 bp, Bacillus licheniformis
atggatttgcgcaatcagcagacaaacgggcagccggcgcagacgcaagaccgccagcccggcatcgaaagcgtcatgaatccgcgtccgatctatgaggatgaaaattacaaaggaacggataaactgaaaggaaaggtcgcgctgatcacaggaggcgacagcggaatcggcagagctgttgccgttgcctatgctaaagaaggcgcggacatctcgatcgtctacttgaatgaacacgaagacgctcaggagacgaaagcgcgcgttgaaaaagagggcgtcaaatgcctgctgcttcccggcgatgtcagggatgaagctttctgcaatgacgcggttgagcagacggtgaaggagctgggccgtcttgatattcttgtcaataatgcggccgaacagcatcctaaagacagcattaaagagatttccagtgaacagctcgagaaaacatttaaaacaaatttcttctcttatttctactttacaaaaaaagcgattgattatctggagccgggcagcgcgatcatcaatacaacatcgatcaacccttaccggggcaatccgcagctgattgactacacggcaacaaaaggggcgatcaatgcgtttacacggtcgatgtcacaggcgctcgtcaaagacggcatccgtgtcaatgccgttgcaccgggaccgatttggacgccgctgatcccgtcaacgttttcaggggaggaagtggcgaagttcggtacagatacaccgatgggccgtccaggtcagccggtcgaccatgtgggctgctatgtgcttttagcatctgacgattcttcgtatatgacagggcagaccctccacgtcaacggcggagactttatcacgacataa

SEQ ID NO: 604 - DNA, 672 bp, Bacillus licheniformis
gtgaaggtgacaaaggaagatgtaattgaatactacgagaaagcgggcattgtgctgaacgacgatgataaagaaaacatccaaatcatggactacggattaaataagctggataagctggggcttcagctgttcgtctatgtcaacacagaccgctactgcgccaaagagctcgtattattccctgaacaaacatgccccgaacaccggcatcctcctgtagacaagcagaaagggaaggaagagacattcaggtgcagatacggaaaagtgtatttgtatgtagaaggagaaaaaacggaagccccggccgttatgccgccggacgaggatattgaacatttcaccgtttggcacgaaattcagctcacgcccggcgaacagtttacgattccgccggacacgaagcattggttcaaagcggggagtgaaggtgcggtggtcacggagtttcttcaacaagcaccgatgatcacgatgtgttcacagatccgagaatttagcgaatgggagtccatctcattcgctttttttcgctcgctccatcacatcaaagccgatgaagtgccgtccgtcatgatcggcaaaataaaattgaacaccgttcacacaaagtgttttgaccgcttcctgtgccgtcggtcgaaaccgccgaacgtgcgtcccgtttag

SEQ ID NO: 605 - DNA, 384 bp, Bacillus licheniformis
gtgaatattttcatatcgtttgatgccgaggctgatatgggctacattgctttaacggaaaggcgtgccggatcggtatcagcaacagatgatatcggcgacacggctttgtctgcagactttgaccgccatcagcggatcatcggtgtcgaatttccgggggacgaggctccggaaatcgcgcggcttggaacgctgaccggcagaaaatataaacttgaaccggcttacctaaacgggacgcacgttcggcggtttcgaccgacggcacaggaagcggtcaaaacactttgtgtgaacggtgttcaattttattttgccgatcatgacggacggcacttcatcggctttgatgtgatggagcgagcgaaaaaaagcgaatga

SEQ ID NO: 606 - DNA, 423 bp, Bacillus licheniformis
atggaacagcagcaattgaagaacaaggtgcttgatattctcgatcatcataaaatcggttcgcttgcaacggttgaaagcggcaagcctcattcccgctacatgacctttttccatgacgggctgacgctttatacaccgacaagcgatgagacgcacaaggcggaagagattgataacaatccgaacgtccacgtgctgttgggttataacggcgaaggattaggcgatgcataccttgaaattacaggtacggcaaagctcaaccattcaaaggatttaaaggacaaaatttgggatgaaaggcttgagcaatggtttgacggaaaggacgatccgaacttgaccgtgcttgagattgagccttcggaaatcagactgatgaatgaaggcgaaagcaccccggtcacgcttgacatgtag

SEQ ID NO: 607 - DNA, 114 bp, Bacillus licheniformis
atgataattgagaccgcttcggcttttgccggagcggtttttgatttgccgaaacgtttccgttttaaaaacagtcttacctatagactggaggaaggtaaatggactttttaa

SEQ ID NO: 608 - DNA, 810 bp, Bacillus licheniformis
atggactttttaacatccaaggtgctattgattttttgttttctgttgttgatccattccatcgaaacgctcgcttacgctgcccggctgtcaggcgcgagagtcggatttatcgcatcggctctgtcattatttaatgtgatggtcatcgtctcgagaatgtcaaacatggttcagcagcctgtgacgggaaagcttgttgatgtcgcgggggcggatgcgctttccctcgtcggcagccaatttcggtttttgatctttggttcaaccgtcggcacaattttcggaatgctgcttctgtcgacattcgtcgccgtattttcgagagcgattgttcatttggcaggagaaaatggctccgttttgcaagtgtttcgcaaggcgttttcaaaaaatagcttcaagcatgcaaagcattatgcaaaaagaccgagcctggaatatgtgaaagactttcggttccgctatataccgaaacggctgtttgtcttgaacatggtcattacggcgatttatacaatcggcgttcttgccgctctttatgcgggcgtccttgtgcccgaaaggcatacgaccgcggtgatggcctccggccttgtcaacggggttgcgacgatgctgctcgcgctgtttgtcgatccaaaggtgtcggtacttgcagatgacgtagcaaaagggaagcggagctatacgtatttgaaatgggcttcgatcacaatggcagcatcgagggtggccgggacgatttttgcccaagtactatttattcccgcttcttactatatcgcatggatgacgaagtggatgtag

SEQ ID NO: 609 - DNA, 942 bp, Bacillus licheniformis
gtggagagggttagagtaagagtaagaaaaccgaaaagaaaaaggcgaaaaatcataaagcgcctgtttacattaactttgctggttatcatagcagcagcgggttatacctactttgaatacaaaaaaggcttatctgaatctgacggagattttaaagaagacggacagtttgaatttaacggggaaggctctgatcttgatgaagtgaacatcctcgttcttgggatcgattcaagaggggaagaccattcaaggtctgactccatgatggtcatccactataataaaaagcagaaacagcctaaattgatttcgattatgagggacagctatgtcgacattccgggatatgacaagcaaaaagtcaatgcggcttatgcatacggaggcccggaactcgtcagaaaaacattaaaagaatcctttgatttggacattaactattacgctgtcatcgattttaaaggttttgccaaaatcgttgatgcggtggcgcctgacggcatcgaagtcgatgttccgaaaaaaatgtcatacggaatcggcatgacactgcagccgggaaaacaagttcttcacggtgaaaggctgctgggctatgtccggttcaggcatgacagagaaagcgattttggacgggtcagaaggcagcaggaagtcttttcaaagcttcaaaaagaagcggtgagcatcggaaatatcgcacagcttccgaagctgtgggggctcgtcgatccgtatattgaaacaaacattccgaacggcgtcatactctccgtcggcaaagactttttgcttggaagcgtaaaagaaaccaaaagcttcaggctgccggttgacggatcatttacgaacaaagacgatccaaaatacggggcagtccttgatttagaccttgaacaaaacaaggaagagctgaaacgctttttaaatgagtga

SEQ ID NO: 610 - DNA, 294 bp, Bacillus licheniformis
atgctgcaaacgccgattggccgccttcggttgatgggttttattgaaggcatgtcgcttttaatcctgctgttcatcgccatgccgcttaaatattgggcggattacccgatggccgttacgattgtcggatcggttcacggcggattgtttattttgtatttgtttgttctgttgtatgcaacttttgtgctgaggtggtctgtgaaatggccggctgccggtcttgtggccgcatttgttccattcggcaatttcctttatgaccggggactaaaaaaatatgatcagtaa

SEQ ID NO: 611 - DNA, 411 bp, Bacillus licheniformis
atgacaagaatcaatttttcagacagaggagagacgccgtttcagcggctgctcggacactctgaaagcctgatgtcaagctggacggctttagctgaggagctgtcaggagatggctttttatcaaaggaactgaaggagcaggtgcgccgtgtgctggctcagggaaacgggtgtgaatattgcaaggccaaggggaagcccgagattccgaatcagcagaaaacgagctttgcgatggggtttgcagaggtctttttggcgcagagggagcgcgtgtcagacaggcagtttgatgttttaaaagaagtgttttcagaagaagaaataacggaattgaccgcatttatttgttttacgactgcccagcaatacttcggcgctttaatgaagcttccggcagacgcataa

SEQ ID NO: 612 - DNA, 429 bp, Bacillus licheniformis
atgaaaattgatgatctcgattttaaaatcatagccgaattaaagaaagacagccgtttatcgatgcgggagctgggcaggaagatcagcctttcggcaccgtctgtgaccgaaagagtcaggcggctcgaatcgttcggcgtcataaaaaaatatacgctggacatcgattaccaaaaggtcggtcttcccgtttcctgcatcattgaagcaacggtgaaaaacggggaatacgagaggtttaaagcgtatatcgaacgcctcccgaacattgaattctgctaccggatcgcgggagctgcctgctatatgctgaaaatcaatgcagagagcctggcgaagatcgaagcgtttatcaatgaaacgtctccatatgcccaaaccgtgacacacgtgattttttcggaaattgaaacaaaggaatcgtga

SEQ ID NO: 613 - DNA, 2184 bp, Bacillus licheniformis
gtgtctaaaacagttgttttagcagaaaaaccttcagtcggccgtgacttggcccgcgtgctgaagtgtcataaaaaaggaaacggatatcttgaaggcgaccgctatatcgtgacatgggcgctcggccatctggtcacattggcggaccctgaaggatacggaaaggaataccagtcttggcggcttgaagacctgccgatcatccctgagcctttaaagctcgtcgtgatcaaaaagaccggaaaacagtttcaggcggtaaaatcgcagctgatcagaaaagatgtcaaagacatcgtcattgcaaccgatgccggccgggaaggcgagctcgtcgcccgctggatcatcgaaaaagcaaaggtcacgaagccattgaagcgtctgtggatttcatctgttactgacaaagcgatcaaagacggatttaaaaacttaaagaacggcaaagactttgaaaacctttaccattcagctgtggctcgagctgaagccgattggatcgtcggcatcaacgcgacgagggcgctgacaacgaaattcaacgcccagctttcctgcgggcgcgtacagacgccgacgctggcaatgatcgccaaaagagaggaagatattaagaactttaaacccgtcccttatttcggcttgcgcgcagcggtcgacggcatgacgctgacatggcaggacaaaaagacgtcacagacacgcacgttcaacgcatctgtgacgtcgcagcttgcaggagcgctgcaaggcaaaccggccgtcatcgtcgacttgaaaaaaacggacgaaaaaagctttgctcccggactttatgatctgactgagctgcagagggacgcccataaacgcttcggcttttccgcaaaagaaacgctgtccgttttgcagaagctctatgagcagcacaagctcgtcacctatccgcggacggactcaaggtttctttccaatgacatcgtcccgacgctgaaagaccgtttggaaggcatgcaggtgaagccttatgcccagcatgtggcccggatcctgaagcggggggttaaagccaataaaagctttgtcaacgatgcgaaagtatccgatcaccacgcgattattccgacggaagagccgcttgcgctcggcgcgttaagcgaaaaggaaagaaagctttacgatttgatcgcgaagcgcttcctcgctgttttaatgccgccgtttgaatatgaagaaacaaaagtgtttgccgaaatcggcggagaaacctttacggcaaaagggaaaacagttcagtcgcaaggctggaaagcggtgtacgatttcgcagacgaagatgatgacgaggaagaaaaggatcaaacccttccaaaactcgcaaaaggcgacacgctttccgtccggtctttgacagagacgaagggtgaaacaaaaccgccggcgcggtttaatgaaggaacattgctgtctgcgatggagaatccagccgcatttatgcagggagaagaaaaaaaccttgtgaaaaccctcggagagacgggcggacttgggacggtcgcgacacgcgccgatattatcgaaaagctgttcaacacgttcctgattgagaaaaaaggaaaagatatttacattacttcaaaaggaaaacagctccttgagcttgttccgtcagatttaaaatctccggccctcaccgccgaatgggagcagaagctgtcaggcattgcgaaaggaaagctgaaatcttcagccttcattaaagaaatgaaggagtacgcaaagcagacgatcagagaaatcaaaagcagcaatcaaaagtttaagcacgacaatatcacaggaacacattgccctgactgcggaaaactgatgctgaaagtaaacggcaaacgcggcacaatgctcgtctgccaggacagggagtgcggccatcggaaaacggtcgccaaacagacgaacgcccgctgcccggtttgccataagcgcatggagctgcgcggccacggggaaggccaaacctttgcctgtgtctgcggccaccgcgaaaagctctccgttttcgaaaagcgcagagccaaagacaaaaattcaaaagcgtcaaaacgcgatgtacactcttacatgaaaaagcaaaacaaggatgagccgatcaacaatgcgctcgccgaacagctgaagaagctgaagcttgatcaataa

SEQ ID NO: 614 - DNA, 153 bp, Bacillus licheniformis
gtgcgggacgattttccaaaggcggagtcggtctttatacaagagcggctgacaaggatttcaacattgatcagcatccagaatatcctcatgtttcaatccgattttcctgggcgcggctacatgaatttcccggttttttccgcgcagtga

SEQ ID NO: 615 - DNA, 114 bp, Bacillus licheniformis
ttgtggcaggggaattttagcgaagttgagcacagccggaaaacgaagcatgatatctcgattttctcttttgctctgccgggtttaagaaaagaattgatgtacaatcaatag

SEQ ID NO: 616 - DNA, 129 bp, Bacillus licheniformis
ttgtcttctccttctttgctgttttttcagtattttttcgcacaaaaaagcgcagaggcaaaagcccctgcggaatcggatttttattcccaggttatctccctctctcttaacgcttacgaggttagc

SEQ ID NO: 617 - DNA, 1821 bp, Bacillus licheniformis
atgtatagtgcaataaagcggtttttaatcgggaagccattgaaatcaaaagagcttagagaacaaaagattacaaaaacaaaagcattggctttgctttcctctgacgccctgtcttccgtcgcttacggaacagagcagattctgatcgttttggcggctgtcagttccgccgcattatggtattctctgccgattgccgcaggcgtcatgattttattgacggcattaattctttcataccggcagatcattttttcttatccgcacggaggaggagcttatgttgtatcaagggaaaaccttggagtgaacccggggctggtcgcaggagggtctcttcttgtcgattatattttgacagtagccgtcagcgtttccgcgggaaccgacgccattacatcggcagttcctatgttgcatccgtatcatcttctgatagcgattgtgctggtgcttttgattatggttttaaatttacgagggctgacagaatcggcttcaatattggcataccctgtgtatttatttgtggccgctctcttgattctgatcgcggcaggcagctacaaactgcttaccgggcaaatcgagccggcggagcatgctgcagtcggcacgcctgttgccgggctgtccctgtttctcctgcttaaagctttttcttcaggctgttcggcattaaccggcgtagaggcgatttccaatgcgatacctgcttttaaagatcccgcgccaaaaaatgccgcaaatacccttgcgatgatggggatattgctggctgtcctgttttcggggattacaatgcttgctttcggttacggcatcacgccgaaaagcgaagagacggttgtttcgcagattgcatcggaaacattcgggcggtctttcctttactttttcattcagggcacgacttcaatgattttagtgctggcggcaaataccgggttctcggccttcccgcagcttgcgtttaatttggcccgggataaatatatgccgagaatgtttacggtcagaggagaccgcttagggtattcaaacgggatcatctttctcggtattgcatcgattgtgctgattgtgctgtttaacggacagacggagcatctcattcctttatatgcggtcggcgtgtttataccgtttaccctttcgcagacggggatgtgcttgaaatggatgagggaaaagccggacggctggattgcaaaaatgatcattaatgcagcaggagccgccatctccgctgtcgtgctgctgattttattcattacaaagtttgcgcttgtttggccgattgtcatcttcatgccgattgtcatttgggccttttatgcggtgaaaaagcactatacagcggtgagcgagcagctgagaataacaggcaagcctttggagccgatcaaaggaaatatcgtcattgtacctgtcgcgggtgtgacaagcgtcgtcgaaaagtcggtccaatacgccaaaaccttgtcagatcaagtgattgcggttcatgtatcatttgacaaagaagaagagaaaaagattgagaagaaatgggaggctcttcaaaacggggtcaggcttgtaacgctttattcctcataccgaagcttgatccacccattggaaaagtttctggaaacagttgaagccaaagcggcgagctacaactactctgtgatggttctcgtaccccagttcattccgaaaaaaagctggcacaacattcttcacaatcagtccgcgcttttgctgcggctgaggctcctgtggaaaaaagacatagttgttgccacgcttccataccattttaaaaagtaa

SEQ ID NO: 618 - DNA, 120 bp, Bacillus licheniformis
atgtctctgcaggctgtttttttggcgggtacgctgcaaaacgtttcagcagaaatggaaggaggtatggaaaaaacaaaggaggacgtgatatggcaaacaaaaccgcaggaaaaatag

SEQ ID NO: 619 - DNA, 1722 bp, Bacillus licheniformis
atggcaaacaaaaccgcaggaaaaatagctgcagaactgctgaaggaatggaacattgatcatgtttacggcatgccgggcgacagcgtcaacgaatttatcgatgaattgcggcatgaagaaaacagcctccgcttcattcaagtgcgtcatgaagaaaccgctgctctcgctgccgcagccgatgcaaagctgacaggcaaaatcggcgtctgcctttcgatagcgggcccgggcgccgttcatctgctgaacggcttgtatgatgcgaaagctgacggggcgcctgtgcttgcgattacaggacaggtgtcttcggatgaaatcgggagagattattttcaggagatcggtcttgaacgaatgtttgaggatgtggctctctttaatcagcaggtgcattcggctgaagccctgccagatcttttgaatcaggcgatccgtaccgcatacagccaaaaaggggtcgccgttctgagcgtatccgatgatctgtttgcagaaaagattaagcggaagccggtttatacgtctgcgctttatatcgaaggcgatcttgaaccgaagaaaagccagctgatgcagtgtgcacaattgattaaccaggcaaaaaaaccggtgattttagcgggacggggaatgaaatcggcgagagacgagctgctcgagtttgcagataaagcggccgctccgatcattgtcacactcccagcgaaaggggtcgtacctgataggcacccgcatatgctcgggaacctcggacacatcggcacaaagcccgcatatgaagcgatggaggaaagcgatctgttgatcatgctagggacctcatttccgtaccgcgattatctgccggaagatgccccggctattcagcttgacaacaatccggcgaaaatcggcaaacggtatcctgtcaccgccggccttgtctgcgatgcgaaaaaagggctttttgaactgacgaaaaccattgaacggaaatcgaaccgcgcatttttggaaagctgtatacaacatatgaggaagtggcgttatgaagttgaaaaagacgaacaggtagcgacagcgccgctgaagcctcagcaggtgattgcaagacttgaggacgcggtcgcagataatgcggttctgtccgttgacgtcggaaatgtgacggtttggacggcgcgccattttaatatgaccaatcaggattttttgatatcaagctggcttggcacgatgggatgcggtcttccaggcgcgatttctgcaaagctttaccatccggaacgccaggttgtagccgtgtgcggggacggcggtttcagcatgtctatgcacgattttccgactgctgtcaaatacgaactgcccattgttgttgtgattttaaataatcagaacttgggaatgattcaatatgaacagcaggaaaaagggcatgttaattatgcgacggcgctcgaaaacgtcgattatgccaagtttgccgaagcctgcggcgggaagggcttcagcgtgacaaagcacgaagagcttattcctgctttgaaaagcgcctttcattcacaaaagccgtcgattatcgatgtggcaattgaagacgaaccgcctcttccgggaaaaatatcctatacacaagctgtaaactacagcaaatatatgatcaaaaaactagttgagaaaaaagagctcgacttgccgccgctgaaaaaaagtttaaaaaggattttttag

SEQ ID NO: 620 - DNA, 612 bp, Bacillus licheniformis
gtgtatcgtttgccaaaaaccaccttcagcaccgttttcatattagcagccggattgctgtggatgtccatcgttcctcagcaggccttcgctcatggttttatcgaaaaaccggggagcagagcggctctgtgcagtgaggctttcggatttctcaatctgaattgtggaagcgtgatgtatgagccgcaaagcctggaagcgaaaaaagggtttccgcatagcggcccggcagatggacaaattgcatccgcaggcgggctgttcggcggaattcttgatcagcagtcggaaaatcgctggtttaaacatatcatgaccggcggagaacacacctttacctggacatataccgccccccacaatacgagccaatggcactactatatcaccaaaaaaggctgggatcctgacaaaccgcttaagcgcgcagactttgaactgattggcgccgttccgcatgacggttcccctgcatctcgcaatttatctcaccacatttatattcctgaagaccgcctcgggtatcatgtcatacttgccgtttgggatgtggctgatactgaaaacgctttctatcaagtgattgatgttgatctagtgaacaaataa

SEQ ID NO: 621 - DNA, 120 bp, Bacillus licheniformis
atgttttggagagccggggtttttgatcgcttattttctctgtttgcaccaaaacccgctgattcacaaatcggttttccaaacagatcaagaaaagtccaggctttatttgttcactag

SEQ ID NO: 622 - DNA, 252 bp, Bacillus licheniformis
atgaaagtatttatactgttttatctatggattgtcccgctcgtcatcgggctgatatttttccgggttacccagcggacaagttttaaaaaaaggttttatccaggctacatcatgatcgttcttgctgcggctgtatttgccgtctgctacttgatcggacagccttacctcgggaatttcttcggcggtacgatgctgttcggcaccctgctgccgtttatggctgccgcaatgaagaaaaagaaataa

SEQ ID NO: 623 - DNA, 552 bp, Bacillus licheniformis
atgtttaaattaatggtacgtgatgatctgtatttaaaaatgctcgaaccaaaagatgccagggccgtttatatgcagatccaacagtctaaagatgtgttgcggaaatggctgttttgggtggacggcacaaagcagctggaagataccgaagcttttatcgaagaaagcatgaaacaggccgctgcaaacaacgggtttcaagcgggaatatggcatcaaggccaatttgccggaatcatcggactccattacattaactggatcaaccgcacgacttcgatcggctattggctcggggagccttttcaaggaaaaggaatgatgacggatgcctgccgggcgctgatcgatacgcttttcagcgaatacgatttaaaccggattgaaatcagggccgctgttcaaaacgtaaaaagccaggccattccggaaaggctcggcttcacgaaagaaggctgcctcagacaatgcgagtggctccacgaccacttctccgaccatttcgtatacgggcttctgaaagaggaatatgaggcccgcagcaaatga

SEQ ID NO: 624 - DNA, 1281 bp, Bacillus licheniformis
atggtcagtcacgatttgtccaaacactcgcaaatatcaaaagaagcccaagatgcactggatggaaaaagcaaaggcttcaaaaggctgctcccttttttgggtccggcgtttatcgcggctatagcctatattgatccaggcaatttcgccacaaatatcgcggctggttcgaaatacggctacttgcttttatgggtaatccttttttcaaatattatggctttgctgattcagtcattgtcagccaaactgggaattgcaacgggtaaaaacctgcccgaagtcgcccgggaagaattccccaaaccggtctccatcggcttgtggattcagggagagcttgtcgtgatcgcgacggacttggccgaatttatcggagctgctctcgggctctacttgctgttcggcataccgatgcttgaagcatcgattattgctgccgccggatctttcgccattttggaactgcaaaggcgcggcgtcagaccgcttgaagcggcgataacaggaatgcttttcatcgtcgtgatcgcatttgcctttcaaacgttttttgcaaaacctgatatcggatcggttttggagggcatgtttgtcccccgcttcgatggtgctgacagcatcctgctggcggcgggaatcttgggagcgacggtgatgccgcatgccatctatcttcattccgctctcacacagcgaagagtggtcggaaaaacggaagcggaaaagaaaaagatattccgctttgagttcatcgacattttgatcgccatgctgattgccggagcaatcaatgcgagcatgctgatcgtagccgctgcactgttttataagaacggcattttcgtcgaagaccttgatgtggccttcagccacttcagcagcatggtcagtccgctttccgccgtattgttcggcgtcggcctgttaacagccggtttatcaagttcgtctgtcggaacgctttcaggagatattatcatgcagggcttcattaatttcaggattccgctttatttaagacggttcattacgattttgccgccgatcgctattattgcttcaggggtgaatccgacaaccgctcttgtcttgagccaggtcgtcctgtcattcggcatcgcctttgcccttatcccgcttatcttatttacgagcaataaacgcattatggggagcctgaaaaatgcaaagtggataacagccgtctcatggctgatcgctgccttaatcgtcgccctcaatattttcctgatttacgatacattttctggttaa

SEQ ID NO: 625 - DNA, 261 bp, Bacillus licheniformis
atgttaggatttctcgtttctttaatcgtagccattgtcatcggattaatcggaggtgcaatcggaggccacggtgcaccgggaggaattatcggctccatggtcatcggctttatcggagcttggatcggccacgggctgtttggtacgtgggggcctgatattgcgggattcgccatctttccggcgattatcggagccgcaattctcgtcttcattttaaacctgatcttccgcggaagaatgggttctcaagcataa

SEQ ID NO: 626 - DNA, 1422 bp, Bacillus licheniformis
atggatacgaaagcaaccaggatcgagaaggattttctaggtgaaaaagaagttcccgttgacgcctattacggcgtacaaaccatgagagccgtggagaactttccgattacaggctatcagattgatgaagagctgattaaagctttggcaatggtcaaaaaagcggcggctctcgccaacatggatattaaacgtttatataaagagcttggcgaagtcatcgtaaaagctgccggcgaaatagcggaagggctctggcacgagcattttattgtcgatcccattcaaggcggcgccggcacttcaatgaatatgaatacgaatgaagttatcgcaaacagaggtttagaacttttagggaaagaaaaaggggattacttccatttaagtccgaacacacatgtcaatatggcccaatcaacgaatgatgtgtttccgacagccattcatctggccacattgaatcacttaaaacggctcttatcgacgatggagcatatgctggatgccttccgcaaaaaagcggcggaattcgattcagtcattaaaatgggccgcacccatcttcaggatgccgtcccgatcaggctcggccaggaattcgaagcctactcccgggtgatcgaacgcgatattcagcggatcaggcagtcgcagcatcatctctatgaagtcaatatgggggccacggccgtcggcacaggtttgaacgccgatccgagatatattcaaaacgttgtcgcgcacctctcagatattagcggctatcagctgaccggcgcagaccatcttgtcgatgccacacaaaacacggatgcctacacagaagtatcggctgctttgaaagtcggcatgatgaacatgtccaagatcgccaacgatttacgtttaatggcgtctggcccgagggcaggtctagccgagatccggctgccgccccgccagcccggctcctccatcatgcccggcaaagtaaatccggtgatgcctgagctgatgaaccagatcgcatttcaggtgatcggcaacgataataccatctgccttgcatcagaggcgggtcagcttgagttaaacgtgatggagcccgtgcttgtctttaatttgctgcagtcgattaaaatcatgaacaacggatttcgcgtatttaccgattactgcatcaccgggattgaagcgaatgagatcaggctgaaggaattcgttgaaaaaagcgtagggaccattacggctgtcaatccgcaccttggctatgaagccgccgcacgaattgcgaaagaagcgatcgccacaggacgatcagtgcgcgagctgtgtttgctccatgatgttttaacagaggaagaattggatctcattctggatccttatgaaatgacgcatccgggcatcgcaggcgcttcgcttctcgaggaatag

SEQ ID NO: 627 - DNA, 114 bp, Bacillus licheniformis
atgtcattagataaaacaggctttttattacttgacagccccatgtcggaagacgattttcctttttttaaaagcaaattaaaacatggcggatcgaggcacaatacatcataa

SEQ ID NO: 628 - DNA, 168 bp, Bacillus licheniformis
ttgcttttaaaaaaaggaaaatcgtcttccgacatggggctgtcaagtaataaaaagcctgttttatctaatgacatacgctcatttgcatgccaaaaaaatttaaaggaaagatatgaagaaacagacaaatggtcaaataattatgtttatttattattaacttaa

SEQ ID NO: 629 - DNA, 1185 bp, Bacillus licheniformis
atgggacatgtactgatgattaatttcccgggggaagggcacatcaatccttctatcggcgtcacaaaggagctgcaaaggcgaggggaaagcatcgtatattatgcagttgaggaatacgctgaaaaaattaaaaaaacaggcgcagaagtccgtttatacccggatttcagagaggttctatcacccgggaagaaaaaagaaaagatggactttgccgaagtggtttacaatatgtcaagtaaagtcaatgagatcgttcagttcatctaccgggaagtcaagagtgaatcttatgattatgtgatatatgaccatcacttcttagcggggaaaattattgctgaaatgcttgagctgccgagcgtttcgttatgcacgacatttgcaatggacgagcagtttgcaaaaacgtttaccccgcaaggcgaccttgaaagctcgccttattttgaaaaattgaaaggatccctcggcgaattaagtgagcggtatcctgtcagtctcgacaagccgtttgacgtattctcctgtccgggggatatcacgattgtctttacttccagagcgtttcagcctcatgccgaacgatttggaagtgactatttgtttgtagggccgtcgattgcgagcaggcaggatccgggaagcttcccgttcgccgagctggagggggaaaccgtcatcgtgatctcgatgggcacgatctttaatcagcaaaaagagctgtatcatatgtgtatcgaagcgctgaaagactttgacggcaaggtggtcatgtctgtcgggaaatcaacggatcctagggatctcggcagcataccggatcattttatcgtgaggccgtatatcccgcaattggaggttttgaaacaagctgatgtatttgtcacacacggcggtatgaacagtacaaatgaaggcctttactttgatacaccgctcatcgtcatcccgatgggggcagaccagtttttcgtcgctgatcaggtggaacgtacaggcgccgggatcaagctggacaaaaatgaactttccccggctgttttacaaaaaacgattaaagatatgcttgaaaaccgctcctataaagacgacgccgccaaaatcggccgctcgctccgcaatgccggcggctatcaaaaagcagcggatgccgtattggagttggcggggagaaagtaa

SEQ ID NO: 630 - DNA, 447 bp, Bacillus licheniformis
atgccatggtcaatggaagactatcctgcttcattgaaacatttggacaaaccggtgaaaaagaaagctattgaaattgcgaatgcgatggttgacgaaggatacgacgaaagccgggcaattccgattgcgacgagtcaggcgaaggaatgggcggataacagaagcaaaagcgagcttaaatcctatgcagaaaaagccgatgaaacaaaacgtggtgacagcggttcgagcagcaggccggagcttgcggaaaagtgcgagcatgtcatcaaacatgaaaaaggctgggcagtcaaagccgaagacgctaagcgggccagcgaagtaaaggatacaaaagcagaagccgtcgaacgggcgaaagaaatcgccgaaaataaaggaaccgccgtcgtcgtccataaaaaagacggcagtgttgagcggaagatcaggatgaactag

SEQ ID NO: 631 - DNA, 114 bp, Bacillus licheniformis
atgattcatctgatgaatccgtgttttttgatcggcatccagcgggtaaaactttatgaaaaaggaggaatggccaaatgccatggtcaatggaagactatcctgcttcattga

SEQ ID NO: 632 - DNA, 825 bp, Bacillus licheniformis
gtgcgctacgacaaaacagatttggaaaacgaactgaaaaaaattgaaaaatgggaaaaggaacagcagaaagcatggttttgggaaaggatcggccggctgccgttcaaagttctggacaagcttacgccggcattcattcaagataaaatcggcctgctgctagacgaaatcggcggctttattcaaaatggaggccaatatttgacgtccgaaaagcatctgatccgccagtttcaaaaaaagctgccggatgaaacgatcgaaacgattgaagatattcaatgggctcctttggaagtgatggatcaaatatgtgaaaatctcgggaaaaacagggcgaataccgcagcagtccaaggagcgacaaccggtgtgggcggcttgttcacgcttgccgtcgatattcccgcaatcctcggcctttctttaaagacattgcaggacatcgcggtatcttacggctacgatcctaaagaaaaaacggagcggatgtttattattaaatgtctgcagctcagcgctgctgatattgtcgggaaaagggcgatcattcaggaactcagccgataccatcaaccatcaggctcccgtgaaaatatgatttcgcaaattcaaggctggcgggaagttgtttatacataccgcgattctttcggatggaaaaagctgtttcaaatggtgccagtagcaggaatcctttttggtgcaatctcaaatcgttcgatggtgaacggtgttgccgaaacagggatgatgatgtataaaaagcggcgcatcatggaaaggcttgcggagctggacgcgacagaaacagagggataa

SEQ ID NO: 633 - DNA, 1290 bp, Bacillus licheniformis
atgcaaaatcaaaacggaaaagcctcagggcttttgccgctgtttttatttgtttgtttattcgttggatcaggcttgatcacaggcgacttttacagcctgccaatcgtggccgcggcgcttgcggcatcggttgtctcactggcgaagaacaggaaggagaagctcagccaaaagacggagtggtttgcgaagggcgccgggcaccccgacataatgatcatggtgatgatctttattttggccggagcgttttcatcagccgcaaaggcgatgggggccgtcgaatcaaccgttaatctcgcgctttcatttgtaccggggcagtttatggttgccggtttatttatcatcgctgcgtttatctctgtgtcgatgggcacgtcaaccggaacgattgctgcgctcgctccgatcgcagcggggattagcgctgaaatcggcgttccggcggcatattcggttgctgcggttgtggggggcgcgatgttcggcgataacttatcatttatttccgatacgaccattgccgctgtccgcactcaaaagacgaaaatgtcggacaagtttaaaacgaatttcctgatcgttctgcctgccgcggttgccacggtcattctgctgatggtgttctcagccggagggcatcccggagcacaagccgggacttacagctgggtgaaggtgctgccgtatctcggggttctgatatttgcccttctcggatttaatgttatggccgttattttcggcggcatcgtattagccggggtaatcggaatttccgacggaagcctgacgcttcatacgtatttgacggcgataaccgaaggcatcggcgggatgtctgaactgatcattttatcgcttctgattggcggaatggcggaaatgatgaagcgaaacggcgggatcgcgtttctccttcaatttgtatcgcggagaatccgttcaaaaaaaggagctgaagcgggcattgccggccttgtcagcgcggcaaacctggcgacggccaacaatacgattgccatcattacagcggggccgctggcaaaagatttatctgacaggtacggaatcgacaacaggaaatcggcgagcatccttgatattttttcctgtgcggttcaaggattgattccttacggtgcacaaatgctgtcagctgcacaaatcgcgaaaatatcgcctatcagcatccttccttattctttttatccgattttaatcggcgtctgcggcatttgcgcgattatcttcagactgcctcgctttacagaaaaagcgtaa

SEQ ID NO: 634 - DNA, 717 bp, Bacillus licheniformis
atggatcgcaaaacgaatcttcttgaattgacaaaggaagtcgcagaaaagcacgccaattttcttgtttcggaagtgaacgaccattgtatgcgaattgccgttttggagggcgaatacgtatggcatatccatcccggctcagatgaactgtttattgttttggaaggggagctgttgatcgattttcaggatcgccccacagaagttctgaaagcgaatgattccctgctgattccgaaaggcgtcattcaccggacacgcgctgatgtcaggtcggttaacctttgtatagaaaaaactaatgcggaaaccgtcccgttcgcggaagggaatgtgctgaagctgatacggtgcaaatcagccgaacaaaagcttcaagcattcagcgaggcgcaggccaaatgggctccgctgcaaaacgtcagcggattcatcaggcagtggggcggatggatggaaacagaagacgggccggaagccgtcgtcctggcgctttggaaatcgaagcacgattatttgaactttatggcggaacatcatgatgagatatatgaaagaacgcatcagaaaggcacattcgaatccatcaacattacgctgtttgaagatcctgccgagatatctgaaacgctgcagaacaatacgccggctccggtaccggaatggacggtaatgggcagcggacgattgcgcgatccacactctctttcgtga

SEQ ID NO: 635 - DNA, 141 bp, Bacillus licheniformis
atggcaaacaataatgacgacaacaaaatgagcagggaagaagcaggcagaaaaggcggagaagccacaagccgcaaccatgacaaggagttctatcaagaaaacggcgaaaaaggcggacgccaaagaagaagcggttaa

SEQ ID NO: 636 - DNA, 1041 bp, Bacillus licheniformis
atggcagcgttgattaaattttttcagcatcctggggtcaggcgtttttcagtttttgttgtattggcgggggttttatatctgttccgcagcatgatgaatctcatattgctcacatttatctttacgtttttgatgaaccgtctggaaaatgtgatccgcggttttttaaaccgctttattaaagtcagccagagactgattatttcttgtttgtatgcggctcttgccatcgcgctttcgatcggcggtgtggtctattaccccgtaatagtcacccagattcagcagctgatcaaacaaggaaagtatatcgcttctcaccctgacagcattccttttctcgatatgatcaccggtatgttcggcgatatcaatttgacatcctatttggaaaagggtcttaactttatctatacatatatcacggatatcagcacgtttggcctgcaggtggttatgtcattggttctcagcatgttcttattgatcgaaaaagacaaagtcatgagcttaatggataaatttaagacgagcaaaatagctattttctacgaggaaattgcttactttgggaaaaaattcacgagaacgttcggcaaggtgcttgaggctcagtttattatcgccaccatcaattgcgcactgacgaccattgccctcgccattatgggttttcctcagcttttcggccttgccgtcatggtgtttttcctcgggctggttccggtcgcaggcgttgtgctctcccttattccgttaagcattatcgcctacagcatcggcggaatcgcttatatcgtatcactggtattggtcatcatgatcgtccatgcgatagaggcctatttcctcaatccgaaattgatgtccgcaaagacggagctgccgattttcttcacgtttatcgtgctgattttttctgaacattttattgggatttggggtttaattatcggtattccaatatttgttttcctgcttgatatacttgatgttacaaatcaggagaaaaaccgaacagcaggcacacgaaaatag

SEQ ID NO: 637 - DNA, 1245 bp, Bacillus licheniformis
atgaagttagcaacaaaaattattatcgctctattgctcggtgcagtcgtcggtattatactgaacgtcacttcaccggatttattcagcaagcttaatacatttttattcgggccgctcggcacgatcttccttaacttaatcaagatgctcgttgtaccgattgttttcttttctctgactttaggggtagcaggacttggagatccaaagaaattgggcagaatcggtgtcaaaacgatttctttctttttaataactactgcaattgccattattatcggacttgttttagcgttggtcatcaaacctggaacgatcggaacatatgatacaagcgctgcggaatattcagcccagaaagcgccaagcatttctgacacgcttttgaatatcattccgacaaacccggttcaggcaatggctgaaggaaatatgctgcaaatcattgctttctccattttggtcggtctcggaattacgatgctgggcaaaaaagcggacgctcttctcaaagtggttgaacagggtaacgatctgatgatgtacctggtcaatcttgtcatgaagttcgcgccgtacggtacgttcggcttgattgccggggcaatcggaagccagggctgggacgccattaaagcaatggggctttatatgatcgtcgttattctggcgctgttcattcataccatcgtcacatacggcgcagcgattgcgcttctggcaaagcggaacccgctcacattctttaaagatttttcagaggttatgcttgttgccttcagtacgtccagcagcaacgcgacgcttccggtttcgatggatgtcgctcaaagaaagctgaaagttccagagccgatctcaagctttgtccagccgctcggagctacgatcaacatggacggaacggcgatcatgcaaggggtggcaacagtctttatcgctcaggtgtacggcaatgacctgtcgctcacacagctgttgatggttgttctcacggcagtgcttgccagcatcggaacagcgggtgttccgggtgtcggactcattatgctcgccatggttcttcaaacagttggccttccagttgagggaattgcgctaatattgggaattgaccgacttctggacatgattcgtacggctgtcaatacaacaggcgatgcagcatgtgcggtcatcgtcaccgagacggaaaagaaacacggcaaaatcgaagcccctcatagtgaagtgtccgtgtaa

SEQ ID NO: 638 - DNA, 927 bp, Bacillus licheniformis
atgacaaagcagcctgttttacatatagaaaatgttgataaaatcatagacggcaaaacgatattgaaagatatccgcttaacggcggatgaaggggagatcatcggtctgcttggtccgaacggatcaggaaaaacgaccctcatcaaattgatcaccggtttaatcaaaatgaagagcggatcaattgtcataaacggctttccgattgaccgccaatttgaaaaagcgatccagtccgtcggagccattgtagaaaatcctgaattctatccgtatctgacaggctatgaaaatctgaagcactatgcaaatatgcacgctggaatcggacgggaaagactggaggaagtcatcagcagagtcggccttgaagatgccgcagaagacaaggtcaaaacatactcgcttggaatgaaacagcgcctcggtattgcccaggcgattcttcaccggccaaaactgctgattttggacgagccgacgaacggattggacccggcgggaatgaaagatttccgcgaacacttgcgtgaactcgccgaagaagaaggaacggcgatcctgtttgcgactcacttgctgaaggaagtggaagatttatgcgaccgggtcgtcatccttcaaaaagggaaaatcaaatcaactgtcgtccttaatcaagcggacgagaaacaggaaaaggcgatgctggaggtacagcctcatgacaaagcgcttcagtggctgaaagaccaaggatacgaagctcgcaccgaaaaaggcctgcttgccgtaaaggtggagaaagcgcaaattccggctttaaatcaacagcttgtcgccaatgatattgacgtctattcgatcgctccgtttaagcagtctcttgaggatgaatatatggcgcggacgaatggaatagaagagaggaatgctgatgtttaa

SEQ ID NO: 639 - DNA, 768 bp, Bacillus licheniformis
atgtttaaactgattcaaaacgagcatgttaaattgctgaagcgcaaagtaacatttgtatcgctggcgctgattgtagtctttcaatttctcctcgcgctcatcaccaaaagaatcctgatgggcgccggggcagaggatcattttatcggctatttttcattcaccccaaacctgaatatcctcttgcaggggctttcgattgtggtggcggcttcaattatatcctttgaatatgataaaaagacgatcaagtttttgctgatccgccctgtcagaagagaaaagattctcgtttctaaatacgtgacgagcgtgctcgcaagcatttggctttttattatttactacggattttctatattgttcggcctgctctttttcggcgtgaagctcgacgaaaaagcggagccgctctttatcaatacggtgaaaatgatcgggacgcagtggtttgaagtatggatgatggtttcatttgcgtttttatgctcggcattattcaaaagcagcgcgctcagcatcatggtgtcgattgtcgtgctgtacggcgccaaaatgcttgtgacgattatggcgtatttggaaaagccgctcggcaagtttttattgttcgccaataccgatttaacgcagtacgccggagaggcaaagccgctttttgccgggatgacgcctttattctcgctcttcatcgtctttatccatctcgtgttttttctcggaacggcatggtggggcttttgcaaacgcgatatgaaggtataa

SEQ ID NO: 640 - DNA, 339 bp, Bacillus licheniformis
atgaaaaagtttattacggcgttgccgattgtattgctgctgtcattttcatttgtttcttttgcctttaactttgatcatctcgtatattttagacttgcgctcggactattttcgcttgcaggtttgtttctgttatataaattgaaaaacggcgtccgcctctttatggcatacctttatggaagctggatcgtgctggccggaatcgccgcatatgaagaaccgcttttttccgatttcttcttcggcggcctcacgatcacgatgggctacttaacctacatgctgatttatctcggtatgaaggttgaccgccgcggcggtcaagccgtttag

SEQ ID NO: 641 - DNA, 1148 bp, Bacillus licheniformis
gtgtgttcaatatttgtgaaaacggaaaggcagcaggaatggctcgataaaatcggaaaattggcggatgaatttgagaaaacagcagcgtactatgacgaacatgccaatttcccgcagaacatattcaaaagctgcgggattcaggctacacagcgctgacggtcggaaaagattacggaggagaaggcatttcgctctacgatatgcttttgtttcaggaacggcttgccaaaggagacggaccgacggctctcagcatcggctggcacttaagcgtgatgggggaactggcggagggaaacagctgggaccgggatgtgttttcatcgctttcccatgaagcattaaagggcgcgctgatcaacagagcggcaagtgaagcgcagacaggcagcccgacaagaggaggacgccccggaacccatgcagtcaaaaagaacggcggctggattgtaaacggccgtaaaacattcacaacgatgtctccggttctcgactattttcttgtcaccgcttggattgaagagaagcaaatgatcggcgttttcttgatccataaagatgcggaaggcttggcaatagaagaaacgtgggatatggcggcgatgaggggcacgggaagccacgatttggtgctgaccgatgtccgtctggacgaatccatgcttgttgaactgttggctggtaaaagaaccgataaaatcaacggctggctgcttcatataccggctgtctatttagggatcgcacaagcagcgagagactatgctgtccaatttgcaaaagactatcagccgaacagcttgaaaggtccgatcaaagaggtgcccgctgttcagcgccatatcggcgaaatcgatctggaactcatgaaagcccgccactttatgtatcatgttgcagagctttatgatgatccggagcgccgcgcccttttgacaggtgagcttggagcggttaagcacacggtaacgaatacggccattgctgtcgtagacaaggcgatgagagtcgtcggagcgaaaagtctcgcaagaacgaacccgctccaaagattctaccgcgatgtccgggcgggcctccacaacccgccgatggatgatgcgacaatcgccaagcttgcaggaattgcattcagcgaatag

SEQ ID NO: 642 - DNA, 156 bp, Bacillus licheniformis
atgtcaaaacggaagattaaaacctttcatcagcttgtcgaagaatataaaaaagaaatcgccaagaacccgaaagaaatggaagtcatttatgacaagatcgaccgcagacacgagaaccgccttttggccatttcaaaagcaaaacaaacataa

SEQ ID NO: 643 - DNA, 159 bp, Bacillus licheniformis
atggcccctcaattaaagaaagcggtggaaatgagaaagaaacaactcattcagcgtcttatccagcttggcatatataaaaaagaagagcgccacctctacgaattgtctttaagcgaacttgaaagcgaataccaatccatcaagaaaggcggataa

SEQ ID NO: 644 - DNA, 321 bp, Bacillus licheniformis
ttgaaaaaaatcacaacagaagcgcaatttaatgaattgatccaatccgataaagaaatcatcgtcaaattttacgctgactggtgcccggactgcacacgcatgaacatgttcatcggagacattcttgaggcttatcaggaaaatgactggtatgagctgaataaagacgaccttcctgaacttgccgacaagtaccaggtcatgggcattccaagcctgttgattttcaaaaacggcgaaaaaacgggacaccttcacagcgcaaatgccaaaacgcctgaagaagtgaatgaattcctggctgaacatattagctaa

SEQ ID NO: 645 - DNA, 1086 bp, Bacillus licheniformis
ttgaagacaagattaggattggtatacggcggaaaatcagcggagcataacgtttctctgcaaaccgcgctggccgtcacgaaagcattagatactgaaaaatttgatatacacccgatttatataacagaaaaaggcgagtgggtgagagggccgcaactgacagaaccggtttcaaatgtgaaaatgctgcaatttgaacagacgggccagacattttctccggctgtgttgaaccgcgatatgtttcctggcgaagctgatgcaaaagaagactctatcgatgttgttttcccgcttttgcacggaccgaatggggaagacggcaccattcaagggatgcttgaactattgaatgtgccatatgtgggcaacggagtcttggcttcctctgcgggcatggataaagtggtcatgaagcatctgtttgcacaggcaggtcttgaccaggcgaaatacgtttcatttttgaaaaaaacttggagtcagtctaaagaagaatgctatgctcaagtggaaggggaacttggctatccgtgctttgtaaaaccggccaaccttggatcaagcgtcgggatcagcaaatgcagaagccgtgaagagcttgaccaagcctttgagcttgcattccaatatgaccggaaaattgtcgttgaagagggcgtcatcggacgggaaatagaactcggcgttttagggaatgatgaacctgtctgctcagtcgcgggggaaatcgctccgaagaaagacttttatgactataaagcaaaatatgaagacggcgatactgatttgattattccggcttccctgacagaagacgaatacgaaacaatgcgcagcatggcggtcaaagcgtttcaggcgattgacggttcaggccttgtgagagcggactttttccttacaaatgaaggcagggtcctgatcaatgaagtcaatacgatgccgggattcaccccgttcagcatgtttccgcttctctggaagcaatcaggggttgagtacgctgaactgattgaaaagcttgtcgctttggcaatcgagcgccacgaagaaaaacagcagattaaacatacattttaa

SEQ ID NO: 646 - DNA, 1371 bp, Bacillus licheniformis
atgataacaagaacggtaaaagaaattgctgaaatgtcggaaggcgttttgacgaatgaagcttttgaagggcgtctcatcaaaggcgtctcaaccgattcgagaaaactggcgaaaggccaactgtttattccgcttgcaggcgagcggttcaacggacacgtttttgcagagcaggcttttcaggaaggcgttgcggccgtgctgtggaaccgaagtgaaccgaatcctccggaagggaagccggtcattttagttgacgatacgctggaagcgctgcagaagcttgcgaaggcatacaggaatcagctggacgtaaaagtcgtcggcgtgaccggttcaaacggaaaaacgacgacaaaagacatgattcatgctgttttgggcactgagtataaagtgcataagacagaaggaaactacaataaccatatcggcctgcccctgacgattctggcgatgcccgaagacacagaagtcgccattttggaaatggggatgagcgccaaaggagaaatcgattttctcactcgtctggcgcggcctgatattgcagtcattacaaacattggtgaatcacacctccttgaactcggatcaagagaaggaattgcagaggcgaagctcgaaattgtcaatggtctttcaaaagaaggcacactcatttatgtcggagatgaaccgctgctcaccgaaaggctgaaccagccgccttacgatacaaagacgtttggagaggatccggctttcgattatcagcttgaggatatgacacagactgaagaggggacggcattccgcgtgagaggaatcgaaaacgggttcttcatcccggtccttggaaagcataatgtgaaaaacgcattagccgcgattgcggccggagacctcttgaatgtcagccgcgctcacattgcagaagggctgactaaactgaaagtgaccggaatgcggcttgagctagtaaagacgccggacggcgttgcgatcattaatgacgcctataatgccagcccgacatcgatgaaagcggcgatcgagcttgtcgaacagatgaagggatacggcaagaagattcttgttctcggcgatatgctggagctcggagaaggagaaaaagcgtttcatgaagaaatcgggcaggcggtcaacccggactcgatcgactttttatttacgtatggagaactcggtgcatatattgcaaaaggggcgcttaaacatttcccggaacaccgcgtccttcatttcaacccggaagaaaaagacagtttgaaaaagacactgaaagaaaaagcgaatacaggggatttaatcctcgtcaaagcgtccagaggcatgcgccttgaggatgttataaaagatttgtaa

SEQ ID NO: 647 - DNA, 711 bp, Bacillus licheniformis
atgataggatgtttatgcattcacggatttaccggagcgccgtatgaattggaaccgctggcttctcatttaaaacaaacggcagattggcaagttgaaatgatcacgctccccgggcacggtgagatgccggttttaaaaggcgtctgttttcaggaatggatcgcttgtgctgaagtggagctcatccgcttgttgaaaacgtgtgatacggtatttttaatcggattttcaatgggcgggatgattgccggctatttagccggaaaatatccggtcagccgccttgtcctgttgagtgcggccgcccagtacatcagcccgggacagctgatccaggatttgaagaatgtgatcaaagattcactgcaaggcaagctagaggataatctgctttacaaaaggtacaaacaaaagctgacaagcactccggtgtcttctgcatttcagtttcgcaagctcgtcaagatgacaaagcctgcattgaaaaacctccggatccctgtgctcattgttcagggggagtgtgatgccatcgtgccggtgtcaagcgcgtattacttgtatgaaaccattccttccgaagaaaaagagctgtgcctcttgccggaatccaagcaccatgtctgccttgaagaaaactcctctatcctatttcaaaccgttgaggagttcctcaaaaaaacgccgattgaatctataaaaaaataa

SEQ ID NO: 648 - DNA, 1464 bp, Bacillus licheniformis
ttgacaataacgtttcaagattttcaattaagttctgatctcacaaaagcaatcaagcgtatgggatttgaagaggcaacaccgattcaggcacaaacgattccactcggccttgcaaataaagatgtgatcggacaagcgcaaacgggaacaggaaaaacggctgcatttggcatcccccttgttgagaaaatcaaccccgagtctcctaacattcaagccattgttatcgcacctactcgtgaactagccattcaagtttctgaagagctatataaaattggacaggataaacgcgctcgcgtgctgccgatttacggaggacaggatatcggacgccagattcgcgcgcttaagaaaaaccctcatattatcgtcggcacacctggtcgtctgcttgaccatatcaaccgccgcacaatgcgtcttcaaacagtgaacaccgttgtgcttgatgaagcggatgaaatgctgaacatgggattcatcgaagatatcgaatccatcctttccaatgtgcctgctgaacaccagacattgctgttttctgcaacaatgcctgctccgattaagcggattgcagaacgtttcatgaccaacccggagcacgtaaaagtgaaagcaaaagaaatgacagtatcaaacatccagcagttctacctagaagttcatgaacgcaaaaagtttgatacgctgacacgccttcttgacatccagtctccggaattggcgatcgtattcggccggacaaagcgccgtgtcgatgaactgacagaagcgcttaatctgcgcgggtatacagctgaaggaattcacggagatttgacccaggcgaagcggatggttgcactccggaaatttaagcaaggcgcgattgaagtgctcgttgcgacagacgttgcggctcgcggccttgatatttcaggtgtaacgcacgtctacaacttcgatgtgccgcaagatcctgagagctatgttcaccgcatcggaagaacgggacgcgcgggcaaaacaggaatggcgatgaccttcattacaccgcgtgaaaaggatatgctgcgcgccatcgagcagacgacaaaacgcaaaatggaccgcatgaaagcaccgactctcgatgaggccattgaaggacagcagcaggtgacggttgaccgcatccggacgatcatcgaggaaaataacctgaacttctatatgacggctgcagcggaattattggaagaccatgattctgtgacagttgttgcggctgccattaaaatgatgactaaagagccggacaacacacctgtccgtttgacggaagaggctccgctcagaacgaagcgaaacaaaaatcaccaccaccgttcatcaaaacgcagagacggcggcggctacagaggaaagaacaatcgttcatcttatgataaaaagcgttcttcgaatgacagacgccaaaaaaaatcatataattcataa

SEQ ID NO: 649 - DNA, 480 bp, Bacillus licheniformis
ttgagaagcgagccgaaaaatcaaatcagccgtgatggcgttaaagtctggagaatcacggcttgtatcacatcattcgttttaatgctggctgcagcaggcctgattgccgccggggagatatttaagtggccggtatggatcggcattttgtcagcggccgtttggctggggatttcatttgtcatcattatcatgattccgaatatccgccacagagtctggcgctacgaagtccatgagaacgaaattgatattcagcacggcatctttgtggtgacccgcgtgatcgttccgatggtcagagtccagcatgttgatacatcgcagggccccatcctcagaaaatataatctcgcctccgtgcaaatttcaacagcagcgacgacccattccattcccgctttggatgttgaagaggccgatcagctcagagattccatttccaggctggcaagggtgactgaagatgatgtctga

SEQ ID NO: 650 - DNA, 1482 bp, Bacillus licheniformis
atgatgtctgaaccgagacgcatgcaccctgccgccgtcattctcaactttatcaaaggccttgttgagacggttaaaaattttatcattccatttggcgtggtgatttttttaaatcaatcgcaaacagtcaaaatgatagcgatcgccgcggccgtgctgtttttcattgctttggttgtgacgagcatcatcaagtggagcaaatttacataccgtatcgaagaggatgaattgcgaatagaggaaggcttgatcaataagaaaaaaaggtatattccgatcgaacggattcaaacgatcaacacaagcgcaggcctcattcaacaaatgttcaagctggtgaagcttcaagtcgaaacggcaagcggaggaacggaagcggaagtttccctggtcgccattacccaggcagaagccgaacgtattcagcaagcgcttttcgaaaggaaaaaagcggcggaagacacggggaccgatgtcccggttccgctggaagaaactgctgaagaggcggaggaagcggaagagccggtaatgatgtacaaaatgaccggccaggagctcttaaccgccgcttcaacctcaagcggcatcggcgttattatttcaggggtattcgcttttttcactcaagtcgatgatttctttgatttggattggctgtatgaccgctttgcttttttgaacagcgcaggtgccgccgtcatcgcattggccgcctttgttgcccttttcatcgcatggctgctcagcatcgtcgggatgcttttgaaatatgcgaattttactgtcgtgcgtaaagagaaagaaatcgtcatttccagagggctgattgaaaagcaacaaatcacgattccgctccagcggattcaagcgattaaaatcaaggagagcctgatcaggcagccttttggacttgcagccgtcacgatcgtcagcgcaggcggaaacgtcctggaagaagataaatcagccatcttatttccaatcatcagcaaaaaaataatcaatcagcgtctcggcgaattcattccggattatgcgccggaagacgatttgaaccgattgccgaaacgcgcgctgcgccgctatatcctgcgcgcatcctggccggttctcgccgtcgttccgctttccattctgtttccgccatggggctatttgtccgctgtattgattcctttttactggatcatcggctatttctcataccgcgatgccggatggaagatcagcggcagcaaaatcatcatgtcatcgcgcttcatcggcagaacaaccgctgtcattcaacgcaggcgcatgcaggttttcgaagtcagccgctcgtatttccagcgcaaaaaacagcttgtttcgattcatacatcaacaaaatcgtctgttttaatggagaagttttcggtggctgatgttgaggagaaagattcggacgatatcattgcatggtattcatatgaaaaaagagtgaacggttaa

SEQ ID NO: 651 - DNA, 600 bp, Bacillus licheniformis
atgtttatcagaacagaaaattttcagacgtttatcaggctctacccggtcacatccgccatattggccctgcagcttgccatttggattctttttttatttccgtttacggccgtacagatgtggtctgatttattgattggctttaactggggaatagcgaacggagaatggtggaggtttgtgacgccgatctttattcacgccggtttcggccacctgctctttaattcgatgtcgatctttttgtttgcccccgggctggaacgaatgctcgggaaactcaagtttctcatcgtttatatcggagcaggagtgattggcaatatcggcacatatttcatcgaaccgctggagtatatgcatgtcggcgcttcgggagccattttcggcttgttcggcgtgtacctgtacatcgtgctgtttagaaaagagctgatggggagcgccaattcccaaatcatcgtcaccatcctcgccatttcggttttgatgacgtttgtaaaccaaaatatcaatatgatggcgcacatcttcggtctgctgggcggactcgccttggctccgccattgttaaacaaaagagtgaacggcttttaa

SEQ ID NO: 652 - DNA, 1008 bp, Bacillus licheniformis
gtgagaaaaagctttgttttgcttttaacggggctgcttgtaatccttatgctttctgcctgcggccaaaaatcgcaagaagatgttgtgacggggctcgacaagaaggcaaaagaatacacgtcctataaggcaaaagcgaaaatgaccattgaaacgggaaatgaaccgcaggagtacaacgtggaaatctggcataaaaaaccttctctttaccgggtctatttggaaaacccgaaaaaagaccagagccaggtgatcttgcgcaatgaaaacggcgtgtttgttttgactccgtcgctgaataaaagcttccgctttcacagcgactggcccaataacagcagccaggtatacttattcgaatcgctcgtaaaggatgtcaaaaatgatggggaagcttctttttccgcaaaggattcaaaatacatttttgaaacgaaaacgaattatcagcataatcagatgctgccgactcaggaaatcgttttccataaaaagaccatggctccttcatcggttaaagtgatggataccgaccgcaaaccgatggtaaaggttgagtttacaagctttgaattcgataagccgctcgataaagactcttttgatgaaaagaaaaatatgacgctgtctcaaattgacgtagcgacaagcgctgacgtgtcagactctttcgctgtcaaaacgccgctcgatgtgcctcagggcgtgaaaaagcttgaagagaaagagatggcgactgaagacggcaaacggatcgtcatcacatatggcggtgaaaaatcctttacattgattcaggaaaaagcacgcgtcgccaaaacatccacttccgtatccatgaacggagagcccgttgacctcggcttcacggtcggcgcactgacggataaatcgttgtcatggacatatgacggagtcgattacttcatctcatcagaagatctttctcaagatgaacttctgatggttgcaaaaagcatgcagggacagtcttcaaaatag

SEQ ID NO: 653 - DNA, 1170 bp, Bacillus licheniformis
atgagcttaaaaccattctatagaaagacatgggccgaaatcgatttaacggctttaaaagaaaacgtccgcaatatgaagcggcacatcggcgagcatgtccgcctgatggccgtcgttaaagcgaatgcctacggacacggggatgcacaggtagcgaaggcggctcttgcagaaggggcgtccattcttgctgtggctttattggatgaagcgctttcgctgagggcgcaggggattgaagaaccgattcttgtcctcggtgcagttccgcccgaatatgcaagcattgccgcggaaaagcgcattatcgtgacgggctattccgtcggctggctgaaagacgtgctcggttttctgaatgaggccgaagctcctcttgaatatcatttgaagatcgacacgggcatgggccgccttggctgcaaaacggaagaagagatcaaagaaatgatggagatgaccgaatcgagcgataagctcaattgtacgggcgtgttcactcatttcgccacggcggacgaaaaggacaccgattatttcaacatgcagcttgaccgctttaaagagctgatcagccccctcccgcttgaccgtttgatggtgcattcgtcaaacagcgccgcgggtctgcgcttcagggaacagctatttaatgccgtccgcttcggcatcggcatgtacggtttggcgccgtcaaccgaaataaaagacgagctgccgtttcgtctgcgggaagtgttttcgcttcataccgaactcacccatgtgaaaaaaattaaaaaaggcgagagcgtcagctacggggcgacatatacagctcagcgcgacgaatggatcgggacagtccccgtcgggtatgccgacggatggctgaggcgcctggccggaacggaagtgctgatcgacggaaaacgccaaaaaatagcagggagaatctgcatggaccagttcatgatttcccttgccgaagaataccctgtcggcacaaaggttaccttgatcggaaagcaaaaagacgaatggatctcagtcgacgaaatcgcccaaaatttgcagacgatcaattatgaaattacctgtatgataagttcaagggtgccccgtatgtttttggaaaatgggagtataatggaaataaggaatccgatcttgcctgatcaatcctga

SEQ ID NO: 654 - DNA, 282 bp, Bacillus licheniformis
ttgtctgaatccagcgcaacaactgaaatattgattcgcttgccagaagctttagtatcagaactggatggtgtcgtcatgcaagataacgggagcagaaatgaactgatttaccaagccacaaaaatgtatttacgcgaacgcaaaaatcgacaaattcgggaatcgatgagacgcggttatatggagatggccaagatcaatttgaacatctcttctgaggctcaatttgcagagtatgaggctgaaaacacagtagagcgcttagtaagcggaggataa

SEQ ID NO: 655 - DNA, 351 bp, Bacillus licheniformis
ttgattgttaaacgcggcgatgtttattttgctgacctatctcctgttgttggctcagaacaaggcggggtgcgcccggttttagtgattcaaaacaacatcggcaatcgcttcagcccaactgctattgttgcagccataacagcccaaatacagaaagcaaaattacctacccacgtcgaaattgatgcgaaacgctacggttttgaaagagactccgttatattgctcgaacaaattcggacgattgacaagcaaagattaacggacaaaatcacccatctcgatgatgaaatgatggaaaaggtcaacgaagccttacaaatcagtttggcactcattgatttttaa

SEQ ID NO: 656 - DNA, 828 bp, Bacillus licheniformis
atgtcgaatcaagcggtgttaaaatttatctcggaacaccaaaatgtactcgccgggaatttggcggatattctgaaagacttaaacagcaacatgacaaacgtgaagctgactgaacacatgtatgagacgatcagcaatgaatatattcatatcctcatgaatgagtccggggacgggaatgaaaaatcgatcgacaccatctaccagttctcttcaaaagccgtacagctcggcgttccgctgaagctgctgtcgtcgggattatcagctttttggaagcacctttactatgaaatgaacaaggatgtgccggaagatcagcagtgctatgatttgatttgggaaatcgataaatttatcgaaccgatcaacagcgaaatcttgaatcagtatgcgatctcctgggagaaaaccgttgctctgcaaaaggtcgcattacaggagctctcggcgccgctgatcccggtttttgaaaatattacggtgatgccgcttgtcggcacgatcgatacggagcgggccaaaaagattatggaaaacctgttgagcggcgtcgtcaaacaccggtctgaagtcgtgctcattgacattacgggcgtgcctgtcgtcgatacgatggtcgcacaccacatcatgcaggcttccgaagccgtcagacttgtcggagctaaatgcctgctcgtcggaatccgcccggaaatcgcgcagacgattgtgaatttgggaatcgatttaactcaggttattacaaaaaataccctgcaaaaaggaattcaaaccgcattagaaatgacagacagaaaaattgtttcattggaggaataa

SEQ ID NO: 657 - DNA, 366 bp, Bacillus licheniformis
ttgagggtacctaacattccaattttgaagctgtataactgtttattggtatccattcaagtagagctcgatgaccaaaccgctctgaaattccaagaggacctgctgaacaaaatatatgaaaccggttcgaacggagtggtgatcgatctgacttcagtggacatcatcgattcattcatcgccaaagtccttggcgatgtcattacaatgtcaaaactgatgggcgccaaagtcgttctgactggcatccagccggctgttgcggtgacattgattgaactcggcatttctttggacgagatcgagacggcgctcgatctcgaaaaggggctcgagacattgcagcgggaattgggggaataa

SEQ ID NO: 658 - DNA, 402 bp, Bacillus licheniformis
atggcagaccaatcctgtgtgaagattttgactgaatgggacatagtggccgccagacagcttgggcgaaatgtcgcaaaagaactggggttcggcacagtggaccaggccagaatcacgacagccatctcagagctggcgcgtaatatttatttgtatgccggaaaaggccgaatctgcatcgaacaggttcaggaagaaggaaaaaaggggttgaaaatcgtagcggaggatgaggggccgggaatcgctgacatcaaaaaagtgatggaagacggtttttcaacctcaggcggcctcggagcgggcctgccgggagtaaagcgtctgatggaccaatttgaattgcattcggacgcggaaaatggaacggatatacaagccgtaaaatggctgcggtag

SEQ ID NO: 659 - DNA, 1008 bp, Bacillus licheniformis
atggatttcagggaagtgattgagcagcgctatcgacagctgcttagccgttatatatctgaattaacagagacatccctttatcaggggcagaaattcagcagaaaaacgattgaacatcaagtgccgccggaagagattatcagcatacaccgaaaagttctgtctgaattatatccggatcttccagaccatgtgttccattctctcgattttttaattgaagtgatgattggatacggtttggcctatcaagaacatcaaacattaagaggaattcagcaggaaattaaatcggaaattgaaattgccgcgaatgtccagcaaacgctgcttgagacgacggttccgaaagttgaagcgctcgaaatcggtgcggtcagcgttccggccaagcaaatgagcggtgattattatcattttgtgcgcgacaaggaatcgattaatatcgccattgcggatgtaatcgggaaaggaataccggctgcgttatgcatgtcgatgatcaaatatgcgatggactctctgccggattcgggcacgtctccttcacaggtgctgaaaaacctgaacagggtcgtcgaacaaaatgtagacccaagcatgtttattacaatgttttatggcaactatcatcttcaaaaacacctatttacgttttcatctgccggtcatgaacctggcttttattattcttgcagggaaaataaattttacgatttaaacgcaaaaggcctcgttcttggcatttcatcaaattacgactatgagcagtacgagcaaaaactggatattggcgatatgatcgttcttttttcagatggtgtaactgaatgccggacagacagcgggtttttggagcggtctgacttgcagaacctgattactgtacatatggagaaaccggctcagcaaatggttgacaatatatacgaacatctgctcaagcttcaggattttcagcttcatgatgattttactctcattgttttaaaaagaaaggtttaa

SEQ ID NO: 660 - DNA, 327 bp, Bacillus licheniformis
gtgaatttggcagttgatacgaataaaaatgaccatgtgatagaagtaaaagttgcgggcgaaattgacgtgcacacggctccaacactgcgggatgagctgatgccgctcgcggaagaaggaaaagatctcaaagttagtctgaaagacgtttcatatatggacagcacagggctgggtgtattcgtcggcatttacaaagcggtaaacagaactgggggttctttagtgcttgaaaatctgtcagagcgtttgattcgtttgtttgatattacaggtttaaaggacatcattgacatttctggaaagtcagagggtggattataa

SEQ ID NO: 661 - DNA, 486 bp, Bacillus licheniformis
atgaagagagcagctgattacattgaaatgaagtcacctgccaaaccagaatacgtaggaatcattcgtttaaccctgtcggggattgcaagcaagatggggtattcttatgatgacatcgaagacttgaaaattgcggtcagcgaagcgtgcacaaacgctgtgcagcatgcttataaagcagacaacaacacaggagaggtctccgtcagattcggcgtgttcgaagaccgcctcgaaatcgtcgtcgccgatcagggagacagttttgatattcaggataaacagaaggagctcggaccatattcccctgagcatacggtagatcaattgtcagaaggagggctcggtttatatttaatggagacgctcatggatgaagtgcatgtccagattgactcaggcgtaaccgtctcgatgacaaagttcttaaacagggagcgagttgatgatggcacaaccgtccaaaactacgaaactaactaa

SEQ ID NO: 662 - DNA, 792 bp, Bacillus licheniformis
atggcacaaccgtccaaaactacgaaactaactaaaaccgaagtcgacacgctgattaaaaaatatcaggagaaccaggatgaagacgctcagctgacccttgttcaaacatataaaaatctggtggaaacactcgccaaaaaatattcaaaaggaaaaagctttcacgaagatctatgccaggttgggatgctcggattgcttggagccatcaaacgctatgaccccgatgtgggaaaatcgtttgaagcgtttgccattccgaccatcatcggagaaatcaaacggtttctccgagataagacctggagcgtccacgttccgagaaggatcaaggagctcgggccgagaatcaaaatggcggtggatcatttaacgactgaaacgcaaaggtctccaagagtcgatgagattgccgagtttcttgacgttacagaagaagaagtgctggaaacgatggagatgggcaaaagctatcaggcgctttccgtcgaccacagcattgaagctgatgcagacggcagcacggtgacgatcttggacatcgtcggctcgcaggaggaaggctatgaaaaggtgaaccaaaagctgatgcttgaaagcgtattacacgtactatccgaccgtgaaaagcaaatcattgagctgacttacattcaaaacaaaagccaaaaagaaaccggcgaaatgctgggcatatcgcaaatgcacgtctcacggctgcagcgcaaagctgtcaaaaggctgagggaagcattggctgaagatccgtatatggagcttaaaccatga

SEQ ID NO: 663 - DNA, 600 bp, Bacillus licheniformis
atgatttggactgagtcgaatgaacacatgcaagcgcttgtttatcagcttcctaaagaaggaaaagccgtctgcggtgacagtttttatttccatgcgactgacgaaaccatggtgtgcgcactggctgacgggcttggcagcggtgcgttggcacgcgaatcctcttcggtcatcagcgaagttgtcgaagagcacggccatgaagatgtcgaaagcttgatggaacggtgcaatcaagcgctgaaacataagcgcggtgcgaccgtttcaattttaaaagtcgattttcgaacaaggacgatcgcttacagctctgtaggcaatattcgctttatcttatacgctccttcggacaaatatatccaccctctccctgtgacgggatacatgtcgggaaaaccgcaaacatacaaaacattcacctatacgtatgaaaaaggatcaagattcatcatttattcagacggtttggaagtacccgccctccggacttatttaaaacagcaccatacaccgggagatatatcgaatcagcttgaatcatacacacgaatgggaaaagacgatctcacctatatcattggacagcttttttaa

SEQ ID NO: 664 - DNA, 2163 bp, Bacillus licheniformis
atggatactttagcgtcaatcgtcaaacaaatcgcaaaagaaacggggcttgcgcccaagcatgtcgagagtgtcattcaattattagaggacggcaacaccgtcccctttattgcgagataccgaaaagaacaaacgggctccatggatgaagtccaaatacaaactatctccgaacgctggggatacattcagcatttaaatcagcggaaagacgaagtcatcaggctgatcgatgaacagggcaagctgaccggacagctgaagctggatatagaaaaagcagacaagctccaggaagttgaagacttatacagaccgtttaaacaaaaacgaaaaaccaaggcgacgatcgccaaaagcaaagggcttgaacctttggctgatttcatcatctcgctcccgcgtaatgaagatgtagcagccgaagcccgcaagtacataaatgaagaaaaggaagtcatgagcgccgaagaagcgcttgaaggagcaaagaacatactggctgaacggatctcagacgaaccggaatacaggaagtggatcaggcaggagacttttaaaagaggaacgctgaagtccgcggcaaaagatgccgaagcggatgagaagaaaatctatgaaatgtattatgaatacgaagagccgattcaaaaaatcgttcctcatcgcgtactcgcagttaaccgcggcgaaaaagaggagattttgagagcgtcggtcgagccgccggcagaccgcatccaagcttacttggaaaaacggattttacaacaaaagcaaacaagtgctcaagatgtcctgaaaagcgcgatcgaagacggctataagcgcctgattcagctgtcaatcgagagggaaatcagaaaagaattgacggaaaaggcggaagaccaagcgattcacatatttgccgaaaatctgcgcaagctgctgctgcagccgccgatgaaaggaaagctcgttctcggcgtcgacccggcattccgcacaggctgcaagctggcagtcgtggatgagacgggaaagatgctcaagatcgacgtcatatacccgcaccctcccgtcaataagaaaagcgccgccatcgaaaaagtaaaacgcatcatcgaagactttcaaatcgaggtcatcgcaatcgggaacggaacggcatcaagagagacggaacagtttatcgccgatctcttgaaggacatcgacagaaaggtgtactatctgatcgtcaatgaagcgggagccagcgtctattcggcatcagagcttgcgagggaagaattccccgatctgcaggttgaagaacggagcgccgtgtcgatcgcacgcagactccaagacccgctcgccgaactcgtcaaaatcgatcccaagtcggtcggggtcggccagtaccagcacgatgtcagccagaaaaaactaaacgattcgctccgctttgtcgtggaaaccgtcgtcaaccaggtcggcgtcaacgtgaatactgcatcagccgcgctcttgcaatatgtggccggactatcgaaaacagtcgcggccaacatcgtcaaaaaacgggatgagatcggaaaattcacgagccggaaagagctgaaagacattccgcgcctgggcgcgaaaacgtatgagcaatgcatcggctttttaagggtgcctgacggcgatgaaccgctcgaccggacaggcatccacccggagagctataaagagacgagagagctcctgaaaaagctgggcctttcaacagcccaaatcggcacaaaagagcttcaggacaaaatcaacgaactgaatatttccgaagcagctgaacagctggggatcggggaaatcaccctgaaagacatttgcgcccagctgacgaggcctgagcgcgatccgagggatgaagtccctaaaccgctcttaaaaaccgatgtgcttcaattggaggacttaaaagaggggatggaacttcaggggacagtgcggaacgtcgttgacttcggggcgtttgtcgacatcggcgtgaaacaggacgggctcgtccacatttccaagctcagccattccttcgtcaagcatccgctcgacgttgtgtcggtcggggacatcgtcaccgtatgggtggaagatgtcgacgctgcaaaaggaagggtctccttatcgatggtaaaagatcgatag

SEQ ID NO: 665 - DNA, 558 bp, Bacillus licheniformis
atggaggacagaaggtcaattaaaacaaaaagagcgataaaagaggcttttttaaagctgctccatgagaaagaaatcaataaaattaccgtttccgatttatcgaggcgcgctgatttagggcgcgggactttttatcttcattatcgggatgtttttgatttgtatgaacaaatcgagaatgagttgtttgatcagctggggaaattttacgatgattattttccaagcgaagatccgcaccatctgctcaccttcatcgaaaaaacgactgaatatatttatcaaaacgctgcaatcttcactttattgacgaaaccgaaaggaaacattttgaccatcaataaatttaaagattttttcaagcagaagattttcgaagaattgagcatgatgcagcaatcaggtaatgagatggcatgcgatgaaatggaaattacatttctagtatccggagcggtcggcatttttgaagagtggatcaacggcggcatggttcagacgccggcacatattgcaggcgtcgtccaccgcatcctgttgaaaatcgcgatgtaa

SEQ ID NO: 666 - DNA, 117 bp, Bacillus licheniformis
atgaactttgcaggtagattgatttctttgtattttaagaaagtcggcagaaaaagccgcctgctagccttgtccttgctgtttttcattacttcaccactttattcgcaaaagtga

SEQ ID NO: 667 - DNA, 3120 bp, Bacillus licheniformis
atgagaacgattataaaggcgagatggatcattgcggcgctctggattgcaatggccgccgtcttattcatcacggcgcccgatatggggcaattaacaaaggagaagggccagatagcggttcctgaaggctatccgtcttcttatgcgaacaagcttctcgaacaaatgtcaaaagacggggatacgaacaaatcggttgtcgtcgtatttcaggacaaacacctcctgccgaatcgggaggcggctttaaaaaaagcgatcaccactttagagaaggattcctcccttcacgtctcagatattacatcgtactttaacgcggatgaggatattcaaaagcagctgttgtcaaaggatcgaacgacgctgctcgtgcctgtcacatttgatgcaaacaaaatcagtgcggccgaatttaaagcaaaggtcaatgaaaagcttaaaactttaaaacttgactacgagatgaccgggcagccgctcatcgatgatgatgtcatgacaagctcgcaggaaggcttgaagaagaccgaatatatcacggtcggttttattttaatcgtgctgattctcgtattccgttctgcggttgcgccttttgttccgcttttggcggtcgcgctttcataccttgtgagccagtccgtcgtcgcctatctagtcaaatacgctgattttccgctgtccacgtttacgcaaatctttatggtggcgatcatgttcggaatcggcacggattactgcattcttcttttaagccgttttaaggaagagatcgcccgcgggaaagacaagatcgaagccattctgacaacgtataaaacggcggggagaaccgttctgttcagcggaatcgccgttttgatcggttttacttgcatcggctttgccgaattccagctttacaagtctgcggtcgcagtagcggtgggtgtcgcggtcttgattttggcgcttctgtcgatcgtgccgtttttcatggctgttttggggaaagtgctgttttggcctgtcagaggaaatatcgggcacccgcagtcaaagctatgggaaaccgccggccgtttcgctttcagtaagccgctgatcagcctgttgatcgtagcggccgtggccgtgccgccgatcttgatgtataaaggaacgctttcctacaacagccttgacgaaatcggagatcaatacgaatccgtcagcgcatttaacaccatttccgacaagttcgggccgggagaatctttgccggtcacggtcgtgctcaaaacatcggatgcgctcgataccaatgacgggctgatcgcgattgaaaaaatcagccgcgccattgaacagacaaacggcgtcagcaaagttcgcagtgcgacccggccggtcggaaaagggctgagcgacctgtacgtcaaaacacaggcgaacgagctgaataaaggccttgaaagcggcaataaaggtctgaaaaagattaaagacgggcttgcagaagcgagcaagtcaatcgcggatcaaaagccgcaaatcgaagcgtccggaaaaggaatcaaccagctgatcaaaggaaccgaatcgatccaagccggaatcagcgacgttgaagccaacatgagaaagctgaaggaaggaacagaccaaagcaaacaaggcgtcgcccaggcgaaaaaagaaatccaaactgcgaaaaaacagctgacggcgcaagtcgatcaattaaatggacaaatcgaaacctacaaagaaatatcgaaaatcttaaaagcggcattgtctcaagccgaaaatgcccaaggcataacggctgacgtgcaaaagatgattgagcagacaaatcaaaatttcaaaaatcttgaaagcgaaattcccgaagtgaaggagaatccttcttatttggcgatcaaaggctcttacacagagcttgcatcggcaatcaagcagggatcacagaaagcggccgtttacacgaagcaggcggcaaacgcgaaaaagcagcttgaagcagcagatgcatttatcgcaaaagcgcaggaagagcaaaaagtgtacacaagcaaaatcgatgctctgataaacggcctcggccaaatcgaaaaagggcttgaagagacatcgaaggggcagggacagctcgccgattcgctgcctaagctcgaatcaggcgcaggtgaggtcgctgaaggccaaaagcagatgaaggaaaaagtcggagaattcgccggccagctcgatcaattaacaaaagggctgaattcaagcgtggacggcctcgaaaaaatttcaagcggtctgatgggagcaggcgactacctggatcagctgaaaaacgcatcggatcaagaaatgtccggctggtttgtccctaaagaagtgctgaaaaacaagcaatttcagcaggtgtttaattcctatatatcagacgaccgccatatcacgacgatcgatgtgatattggaagacaatccgtatggaaacggagcgattgccaaggtcaaagacattgaagcatcagtaaaacgggctcttcccgacacgcatttacgcgatgcatcgtttggcgtcggcggcgtttccagcatcaacgccgatttgaagcagctgtcagaccaggacttcagcaacacggtgatctatatgatgatcggaatcttcctgatcctcgtcctgctgttccgttcaatcgtcatgccggtgtatttggtcggatcgctggtcttgacgtactttgcatccatcggtgtaaccgaatttattttcacggcgtttttcggctatcccggcctcaactgggcggtgcctttctttggctttgtgattttaatggcgcttggtgtggactattcgatcttcctgatggaacggtttaacgaataccggggaacggatattaagacggcgatgacggaatcgatgaaaaatatgggatcggttattatttcagccgctgtcatcttggcgggaaccttcgcggcgatgctgccgtccggcgttttatcgcttctgcaaatcgccacccttgtgctgacgggtcttttgctgtatgcattcgtcatgctgccgctgttcgtccctgtaatggttcggatcttcggctcagccaactggtttccgtttaaaagaaaagaataa

SEQ ID NO: 668 - DNA, 462 bp, Bacillus licheniformis
atggatgaacaacaactgcagcagctgacagaacagctttcgctcacatactttaaaaaaccgttccggcaccgcgcttacttcaacagccgcctgaaaacgacaggaggcaggtatttgctcaattcccacaatatcgagctgaataaaaaatacctcacagaacacgggcaaaaagagcttgaaggcatcatcaagcatgaattgtgccattaccacctccatcttgaaggaaaaggctacaagcaccgcgacaaggattttagaacgctattaaaggaagtcggtgcgccgcggttctgcacgccgctcgaaaaagagaaaaagccgcaaagaaaagtacgcacatacaagtgtgaagcatgcggacaaacgtttctccgaaagcggaaaatggatacaagccgttacgtttgcggcaagtgcggagggaaaataaaagaaatcataaaaaagggttga

SEQ ID NO: 669 - DNA, 351 bp, Bacillus licheniformis
atgataagtaagtttttctcaggtatccataacgcaattttttcccctttaaggtcctgggctgaacaatctccgggaaattggaatattctcatcgttgttggttttttattggtttatggtagcgggattttggtctatgtattttataaaaagcttggaaaagacgacgaacggacaaataaaatctatttgaaaagtagttcctatatgctgttggtcattattctatgtgacatgatttttcctaaagatgatatgtggaccatctttttcttgtacaaatatgcgctggcatttttagctgctgggatttacctatccgtccaatataaaaaggatttttcataa

SEQ ID NO: 670 - DNA, 240 bp, Bacillus licheniformis
gtgaagaaagactttggtgattcgatatcaaataaggtttatgaatatcgtgtacttgccagaatgtctcagcaagaattagcggagaaagtcggggtttccaaacaaaccattttcgtaatggaaaaaggaaattatgttccgactctgctgttggcttttcgaattgctgaattttttaatattgatgtaaacgaaatttttacttatgtgaaaggaaatgatcaaaatgataagtaa

SEQ ID NO: 671 - DNA, 981 bp, Bacillus licheniformis
atgaatgaccaaaatctaaagactttgagaaaactagttacaccttatgaaaagtccgatttacaaaaaagcatttaccaaatcattaacacattgataccatttttcctgttatggtgtttagcatataagagcttgtcgatttcttatttccttacattagcgatttctatcgttgcggcaggttttttagtgagaaccttcatcatctttcatgattgctgccactattccttttttaagaacaaaaaggcgaatcgaatccttggaacaatcacaggaattctaactttgcatccttttgatcattggggacgcgaccattctatccaccatgcgacaagcagcaacctggacaaacgaggtacaggcgatatttggttgctgaccgttgaagaatataaggaagcctcaactaagacaaaaataatgtaccgtttatacagaaatccgtttgttatgtttatgattgggccgatttacgtcttcgggattaccaatcgttttaatcgtaaaggggcaaaacgcaaagaacggatgaatacgtatgcaacgaacttgggaatcgccgctttgacagcacttttatgctgggctattggctggcaaaacttcctgctggttcaggcgccaatttttatgatatcgggatctctcggaatttggatgttttatattcagcatacgtttgaggattcttattttgaagaagatgagcattgggaatatgtaaaagcagcagttgaaggaagctctttttataagcttccaaaagtcatgcaatggctaacaggcaatatcggtttccatcatgttcatcatttaagcccgagagtcccaaactataagcttgaagaagtgcataacaacattgaaccattgcaaaacgttccaaccattacactggcaacaagtcttaagtcgttaaagttccgactatgggatgagaaagcaaaaaatttgttggttttagccacttaa

SEQ ID NO: 672 - DNA, 111 bp, Bacillus licheniformis
atgaataaaacaataataggaattgcaattatttccgtttcctgttatgataaagaagaattatttttgttcggtgtaaaggatagtatgaatattgacttttcgtcttga

SEQ ID NO: 673 - DNA, 204 bp, Bacillus licheniformis
atggaacaaggtacagttaaatggtttaatgcagaaaaaggttttggatttatcgaacgtgaaaatggagacgatgtattcgtacacttttctgcaatccaaagcgacggattcaaatcattagacgaaggtcaaaaagtaacatttgacgttgagcaaggtcctcgcggagctcaagctgctaacgttcaaaaaactgcttaa

SEQ ID NO: 674 - DNA, 987 bp, Bacillus licheniformis
atgaataatgtttcattaatatataaggaattcggtgatccgcttcaaaaattacagctacatgccggagaaaagcttcctcttcagccaaatgaaattcttgtcaaaatgattgccagtccaattaatccatcagatttgcttccaattagaggagcctattctcatagaattaagctgccggctgttgcaggatatgatggtgtggggattgtcatagatcagggcaaagatgtatcaccatcattgattggaaaaagggtcctccctgtaagaggagagggaacttggcaacaatatgtaaccacaaaagctgattatgctatagaactgcctccatcaataagtgataacgacgccagtcaactgtatattaatccattaacagcctggctaatttgtacggaatcattgcgtgttcagccgaatgaaattgttttaatgaatggcggaggtacatctattgcaggtttgtttgcgcaaatttccaaaatactgggattccgtttaattgtcatgacaagaaacagccgcaagatagaaaaacttcaaaaactcggggcatggagagccatcgacgcttccaaaggttctatatatgaaaagatttctgatggttgcgacatcggtgttgaccatgcaattgactctgtgggaggagaaagcggcgaactgctggcgagggcattaaaacctgaagggacgtttgtcagttatggtctattgtcaggtataccaaacgattggcgaaagctacacgatgtataccatgtgtcaccgcaattattcgccttaagactttggaatgagagacattctgtttctgaataccgcaatcgcttctcggaggtgattaagcttgttgagagcggaagaatggtcatcaatgccccagaaaaaatatatgattttgaagatttttatgatgccttgaagcattatgaacagccgggtttgaatggaaaaatactgttgaactttgcatga

SEQ ID NO: 675 - DNA, 606 bp, Bacillus licheniformis
gtgaaatatcttttttatgtaataggaattttaatcttaacccttggtattgctttcacgattcaatcagatctcggcgcttcgccttttgacgcacttttggtgggactggccgtacatgcggggcttactgtgggaagttgggaagtcatcattgctctgctattaataggctgcaattcgtttttaaaaagacaaagaccggaagtttcggggctgctaacggcgtttataaccggtatcggcattgacatgtggctttttttgctgcatttttttgtgacaccagaacaatggtacagcaaagcggtttgttttgggatcggcttggttgttacaggattaggaaccgcgacatacttatacacaaattttgcttcgatgccaattgaccgtctaacattcatcataaaagaattaacaggaaccaatatatttttttcgagaaccatcatttaccttgtcttcttgacagcggccgtcatgttaaaaggaccgattggcatcggaactttattaaccgtttgtttaggagggctggcccttcatttgtttatgccgtttgctggaaaagtgttgggtcgctttacagacgctcgtacatga

SEQ ID NO: 676 - DNA, 453 bp, Bacillus licheniformis
atgaaggatattctgcgtgaaattggaatgattgcccgagcattggattctataagcaatatcgaatttaaagaacatgacctgacaaaagggcaatatttgtaccttgtccgaatatgcgaaaacccgggaatcattcaggagaagctggctgagatgattaaagtagacaggaccaccgcagcccgtgcaataaaaaaacttgaaatgaagggctttattgaacggagagatgatgaacataacaaaaaaataaaaaaactttttccgacggaaaagggaaatgaggtatttccttttataaaaagagaaaatgaccattcgaatcgtgtggcattagagggattttccgagggggaagcggagatcatcttcaatcttcttcaaagagtaagaaaaaatgtagaaaaggactgggaattcgtgaaaaaggggaacaagagaaattattga

SEQ ID NO: 677 - DNA, 520 bp, Bacillus licheniformis
atgacagtaaatataaaaaggtgtacccttgaagacttacacaagcttcaggaaattggttatgaaacatttaatgagacatttaagcatcagaattcgccagaaaatatgaaagcctacttggacaaggcatttaacttaaaacaattagaaaaagaattatccaatagctcttcgcaattcttttttgtttattttaacaacgaaatcgctggatatttaaaggtcaacaccgatgaggcccagtctgaaaaaatgggtgatgaatcacttgaaatcgagagaatttatatcaagaacaactttcaaaaacacggcctgggcaaatatctgttcaataaagctgtggaaattgcaaaggaactgaataaaaaagaaaatctggctgggcgtatgggaaaaaaacgaaaatgcgattgctttttataagaaaatggggtttgtacaaaccggcgcccactctttttatatgggagatgaagagcaaacggactttatcatggccaaaacaatcctataa

SEQ ID NO: 678 - DNA, 618 bp, Bacillus licheniformis
atgtatattccaaaatattttaaagtcgaaaatgctgatgaaattttggattttgtccaaaaaaactcttttggcacgattgttacgacagaacaagggaagccaatcgcgactcatttgcctttagggctcaataaaaaaggcgatgattactatatcactggccatatcgcttatggaaacccgcaggtgggaactttggaaacctgtaaagatgtgcttgtcatgtttcaggggccgcacgcatatatttcttcttcctggtatgggcatgaggatgttccaacatggaattatcaagccgtccatatatacggtaaagcaagcattctagagagagatgaattaatagaagaattaacaatcatgatggaaaaatacgagaagcatcgggaaaatccaattttatgggataacctttctcctcaacttttggagagacaactgaaagcgattgtcgggtttaagattaaggtggaagacattcaggctgcatataaattaagtcagaaccgaaatgatacagactacatgaacatcattgatcaattgcaaaatgaaggagatccagattcggagcaattggcagcagcgatgaaaaagaggctggaaaattag

SEQ ID NO: 679 - DNA, 915 bp, Bacillus licheniformis
atggctaaaaaaacaattcgtctgttaatgccgcaatggcaagggggaaacaatcccaactactcttttggagcagaactgcttgcttggctggctcctgaaaatgatcagccccttattcatgttccggttcaaccttatgatggaactccgcttgaaaacgaaaacgggataaacgggagaaaacaactgctggaacaattggaggctgctcagcatatcattcatgctcataagccggatcgcattgtcatgtttggcggtgactgcttagtcgaacaagcaccatttgcttatttaaacgaacgatacggcggggacttaggtttaatttggattgacgctcatagcgatttagttagatatgccggttatgacaacggtcatacattaccgctcgggaatcttttgggagaaggagatgaagagttcgcaaaacatgtgaaaattcccctgaaacctgaaaatgtctttattgcgggattagcagctcctacagaagaagaaacaaaagtgatatcaaatgaacttcaaagacaaggtatagctcccacagaaccagacactgaagtgattcaaagacttgggattagaactgccggaactaaaaagttaatgaccagtaccgaacctataaaagaatggataaaagaaagcaacatcaagtatctggcaatacaccttgatttagacgtgcttgatccgaaggcgtttcgttctttattattcgccaatcctgaagcacctgtaaatttttctcctgagggaacaatgcaaatgccgtacctgcttcatcttctgaaagaactctcttccgaaacggatgtggttggattaggtataaccgagcatttgccgtgggattctattcatttgaagaaattgcttagtgaaatccctattttaacccaataa

SEQ ID NO: 680 - DNA, 336 bp, Bacillus licheniformis
atgagtatggcagaatataaaggtaaagtgaaaaatattcaagatacaccttttggatacacattgtctgttatcggcggtaaatggaaaatggttattatttacctcctggcagaaaatcaaccaattcgcttcaatgagttgaaaagacaaataggggctattacttataaaacattgagttcacaacttaaagaattggaagcggatggactggtgaaacggaaagagtaccctcaagttccccctaaggtcgagtacagtctcacggataaagcggaatccctattgccggttttagaagggttatgtgaattgggtttaaaaaaccaataa

SEQ ID NO: 681 - DNA, 873 bp, Bacillus licheniformis
atgaataaaatcgaaaaacataggaaatttagagcgaagatgattttcaaagtcataatggtcatgatcggaggaatcatagcggcatatggattggaaacagtgctgattccaaacagtgtatctgatggcggagtgacaggacttagcattgttggttcacaactgtttgatttgccgcttgggattcttatcgcggttttaaacataccgtttgtctggctgggatataagcaaatcgggaaaagctttgcgctattgtccattatcggaatcgcatcacttgcagcagggacaagttttatgcaccacactccagctataatcgaaggggataccttgctagtcactgttgtcggggggatcatccttggatttggaatggggctggcgctccgcaatggcggagcattggacggaattgatatgcttgctgttttgttatcgcgaaaattgccatttggaacgagcgatcttattctattctttaacctttttgtgtttatttttgtttccgctgtatttggcttgcagggggcattgctgtcagtcattgcctactacatcgcgtccaaagtcattcatgttgtcgaggaagggttaagcggatctaaaacttttcaaatcattacaagcgaacctgaattaatggttgagacaattcgtgatcaattgggccgaagtgctacatataaagaagcttacgggggtttttcccacgagaaatttaaagaaatcacctgtgtcatcaaccgcttagaagacaccaaattaaaagaaatcattaatgaagttgataaaaatgcttttgttactgtatatgacgtagctgaagttaagggcagtaattttagaaaacctaatattcattag

SEQ ID NO: 682 - DNA, 579 bp, Bacillus licheniformis
atgagtattatagcttttctttcgtatgtaattatgacatccattacgcccggcccgagcaatattttaatgatgaatgaagcgcaaaggttcggctttacaggttcatggcgttttagcagcggtatcttggcggggtttgcagtacttgggattctcagcggtgcctttacaatcagcctgtacaattggattcccgttgtagagccttattttaaacttgccggcgcgtgttatttgatttatttggctttgcaagtcggctttaccaaaaataaaaaacaggattccacagaagcccgctcctcttttatatccggctttatatttcagctgatcaatattaaaagcattttgttcttcttaaccgtaatgagcgcgttcgttttgccgttcaaccattccttgaaatcgacaatctattatttggcattagccattgttctcgggtggctggcgctgctattatggtcgggattcggctccgtttttaaaagggtatttgcaaagcacgaccgggtatttcgagtccttatgtgcctgctgctcatgtattctgcggtgtctattttccgatga

SEQ ID NO: 683 - DNA, 882 bp, Bacillus licheniformis
atggaaatcagacatttaatcacgtttcagaccatcgttgaaatgggaagttatacgggggcggcttcgaaattaggctatactcaatccacgatcaccactcatatccaggctcttgagcatgagatcggcggggctttatttacgtatgaaaaaaggaatttaaaactgactcagttaggaagggagttaatgcctttagccgaagaattgctgtcaacccataatcagatcaagaatttgcagagcgctcacgaagtgaagggggtattgaaagtggctgcgcccgagtctttaaccatttctaggctggggccaataataagggagtattcgttgaaatatcctcatgtcaaattgaaactgagcaacggtacatgcggacaaaaccaagtcgacttattaagcgggaatgtggatgtcgctttaatggtttatcccgaaatcgagctggacaaatgcattcgctacacgttggctgaggagaagatcgtccttgtcggcagcagtgaagggcctgaggatttagaagaatatcaaaaacatttttttataacgaatgaagaagactgcagctatcgaaccatgtttgaaaaatatctcttgaaaaacgatattcattactttccaacgatggagttgtggagcatcgaagcaataaaacaaacggtcatgagcggactcggattttctgttttgccttacattacggtgaaagacgaagtggaaagcggtaaactgaaaatccttcctcattctcaatacctcgacccgctttattcccagatgcttatcaaaaagaaaaagtggcagctgcctgctgtggatgcttttgcggatctggtattgcattcgtttcgtgaacctcgattaataggataa

SEQ ID NO: 684 - DNA, 222 bp, Bacillus licheniformis
ttgcgcgaatttgcacctaaagtttttcaaacgacagggattattggttttattttagcttttgtccaaattccaatcggctggtttatcggatttttcttttccggtttgttcttcatgatgttgaaatcaaacaatgaaaaatcgggaaccttcaacatgatggctgggattgcgtgtttattgtattcattctattgtttgtttacgcaagtgttgtga

SEQ ID NO: 685 - DNA, 1222 bp, Bacillus licheniformis
ttgcgaaagttgaaactgttgcttgccgctaatttgatttccaccgtaggtaccggcatcacttcctatttgattgtctggctgctgattgatcaattgaaacaatccgttttatatgggttattgacgatggcaacgatgattttagtgttttttgcctcaccctatttagggagtttggtggatcgatattctcgaaaagcgacattcctctatctggaaattacaggaatagtggtcttgggcgttttttctgttctatgcaatgtttccgccgagttggacatcacccttgttgtgatgctgattttttatcatacagcttacgattcgataaagtatcctgctttagccgctttaactcaggaaatgttcaaaaaagaggactatagtaaagtgaacagcagtcttgaagttcaggggcaggcggcgctgatgattagttcggggctggctgccatgatgatcggcaagatggatgcggcagttattttggttatgaacatctctacatttatagcagcttccatcctcatctaccaacttccttatcaacgaaatgctgaagcggaagagcattccaatacaatgaaaaatgaatcttactggaaaaacttcagatcctcactccaatatttatgttatcgaaaagttttgtttgttcttttattgacttcttttataccaagcatcgtgattattgtcgcaaactacttggatccggttttcatttacgactatttaaacgaaggtccgtcagttatcggcattgccaatattgtttacgccattggagctatgggtgcgggctttgtcgcatatcaaatatcaaagaaatggtctgatatgcaaggtgttatattgtttatggcagtatttgctctagcaacaattgcgatcttcttcgttccgaatgacatttatagtggcaagcctcttttgggggcattcaaatgctgcgatcagagtatttagaaaaagctatatgttccatcatgtcgataatgcatatatgggacgtgtcaattcgttgtttaatgcggtaaagctgttgggacaagttgctttaataggcatcttgacgattacagtagtgccggcgggtcaaactgtttacggatacttcgttttattcatcattgtaattgctgctcttttaacaacaacttatttatttaacagaacttataacaaagataaagaaaagcgggtatctttatag

SEQ ID NO: 686 - DNA, 783 bp, Bacillus licheniformis
atgaaaatcaatcaaattgtagatttgtcggtatcgctaagaggcgatattccgtctgacccgccggggtttatccatgaaatcgaatatgcggatcataagcaaggagccaaacagatggtccagagctttcccggcctctcttcgcaagatcttcccgggggagaaggctggtcgctggaaaaagtgaaaatgtcaacgcatgccggaacgcatatagacgctccataccattaccgttctgttactgatgacggcaagcggatgatgacgattgacgaagttccgcttgactggtttcatggccccggcgttaagctggatttcagacatctgaaagacgggcatatcgtaacccctgaagaaatcgaacaagaacttcaccgcatcaatcataaactcgcgcccggggatattgttcttgtgaatacgtcggccggtgccaaatacgggcaaagcgattacctggacagcggctgcgggatggggcgcgaagcaacgctttttttaacggaacggggcgtgcgccttgtcggaactgacgcttggagctgggacgctccattcagcatgaccgccaagcgctttgaacaggaaaaagacccgtcgattatttgggaaggtcattattcaggaagcaccattccttactgccaaattgaaaagctcgccaacctggatcaattgccttccaccggattttatgtcatggcttttcccgtaaaagttgaaaaagcgtcggccggctgggcgcgtccggttgcaattcttagcggtgaatga

SEQ ID NO: 687 - DNA, 1383 bp, Bacillus licheniformis
gtgacagaagatgtaactgacaacgatatacacgaacaaaaattatcgagaggcctgaaaaacaggcatattcagctcatcgccatcggcggggcgatcggaacggggctgtttcttggttcggggaaatcaatccattttgcaggaccgtcgattttatttgcttatctgattacgggaatcatttgttttttcattatgcgttctcttggagaactgctcttatccaatttggaataccattcgtttgtcgactttgtaagagactacttaggcgacatggcggcatttataacggggtggacatactggttttgctggatttcgctcgcaatggccgatttaaccgcggtcgggctttatacccaatactggctgcctgatgtaccgcaatggctgcccggattgatcgccctgatcattttgctgatcatgaacctggccaccgtcaagctttttggagaattggagttctggttcgcgttaatcaaagtcattgcgatattggcgctgatcgcgatcggacttttcatgatcttcaaaggattttctacccattcgggcactgccgcctttcacaacctttggagccacggcggcatgtttcctaatggactgcacggatttctcctttcattccagatggttgtctttgcgtttgtaggcatcgaacttgtggggctgacagcgggggaaacgaaagatcccgaaaaggtcattcctaaagcgatcaacaatatccccgttcgggttttgcttttttatatcggtgcgctccttgtaatcatgagcatctatccgtggaatgtcatcaatcctaatgagagtccgttcgtccaagtcttcgcagcggtcggcatcattgcggctgcaagcatcatcaactttgtggtgctgacatcggcggcttcggcaagcaacagcgcagtcttcagcacaagccggatgatatactcgctcgcgaaagaacataatgcgcccggcgctatgaccaaactgacctcccgcaaagtgccgagcaatgcattgtttttctcagcggtcgttattctgattggcatcatgctgaactatatcatgcctgagcaagtgtttacgctcattacaagcatctcgacgatatgcttcatctttatttggggaataaccgtcatctgccatttgaaataccgcagaactagaccggatttagcgaaaagaaacaaattcaagatgccgctttacccgttttcaaattatgtggttctcggttttcttgcgtttatcctcattgtgctcgcactggcgcaggacacccgtgtttccttatttgtcacgccggtttggtttatcatgctgatcgcgatttacaagctgagaaaacctaagtcacggcaagtgtag

SEQ ID NO: 688 - DNA, 132 bp, Bacillus licheniformis
ttgtatcacgaaagcggacgagcgcagcagcttggcgttttaggacctctcaatgacaaaaccattaaaaacaagccgtgtactgtttcttccctttgttcggatctgagttttcctgggaaaccggtataa

SEQ ID NO: 689 - DNA, 636 bp, Bacillus licheniformis
atgctgatcctaatcgcggtgtatgttctgtatacattgtttgaaaatttaattcttgatccgcaatcaacgtcctttctgagccataaatctcacctccgagactcctttcacctcccgatctggctaaaggtgatgtatgttcatgtcattgccgcttgtttggcgatggtttcgggagctgtcaacttctccagcggcttgttggccaaaagccgcaaaatccaccggcttaacggctttatttacgtcgtctcggtgatggtagttacgctatcatcaggctatatggcaccccattctacgggaggtagagccgtcagcatagcctttaacatggtgaacatgtattggccggcggccactgttatttccgtcatcaaagcacggcgaaatcagtttacaaagcatcggaattggatgattcgcagctatctattctgttttaccaatctgtttattcatttcatcacgtttgtgtgccgaagcggattcggtttgccatacgatatcagctacacgataggcgtttacggggcgattgcactgaacgtggcggcagctgagtgcgtcattcattttacacgcagaaaagcggtggacattttgcatacagctggattcgataaggtatag

SEQ ID NO: 690 - DNA, 636 bp, Bacillus licheniformis
atggatgacagaattgaaacaaaagagccgatgccttcattaatcggcttgatcacgaacccggcattgcagtttgaaagaatgaaaaggcggccggcggttgctctgccgatgtttattgtattcgttttatcggttttatctgcttatctttatatttcaaaagattttcccgatacgtatacctactttggaatgatcatatttttatgggagtttttaaagacggggatctatttgtttgtatcagctttaatattatggctgatcgcgacaatagggggcggaaaaacaaactttgtgacgatgttttcgttggcgtcttttgtaggctttgccaaaatcattggcgacgtgataaacaatacagtttatcgttttgcgaatgtgccggaagggacttcgtttacatctttgcacgatgttttttcggccgtcgagccttataaaagcatattgggcgtgtttgatatctttatggtttgggcgcttgtgttagcggctgaaggtcttcagaaagcgggtggagcttcgaaacgggcttcatggatcgccgttgcagttttatttattctcaagtttttgttcgcttgtttttttggtttgtttgccgcattgtttgaggatattttttag

SEQ ID NO: 691 - DNA, 120 bp, Bacillus licheniformis
gtgatgttttcttttaaaaaaacacgtctttccgcaaactatttttcgcactcccgcgtctatcctaatgtaacagccgtatatacgtatattcgaaaaaggagttctttattgcaatga

SEQ ID NO: 692 - DNA, 498 bp, Bacillus licheniformis
atgaagaaacaagcagccagagcgtctcttgtcgcttgcataacagaccggaaagaagacttttaccggctggcatacagctatgtgaaaaatcaagaagacgccttagatattgtccaggaatcaatcaaaaaagcgctcgattccgtcgattccgttcgcaatccggatacgatcaaaagctggttttataaaattttggtgcggacggcaatcgattttttgcgcaaacagaaaaaactaaaggttatggatgatcaaacgattgagtttttaagccagggcaaggaagatacctaccgggatacagatctccatgaggcgcttgatgagttgccgcaaccctaccataccattattgttctgcggtttttcgaggatctcaaactggaagagatagcggaaatcacaggcgaaaacttgaatacgatcaaaacgcgcctttacagaggattgaagcttatgcgcatccaattgacgaaggaggatctttcttaa

SEQ ID NO: 693 - DNA, 861 bp, Bacillus licheniformis
atggataagaaattggaacagctgagaaaagcatatcaaaacgtccccattccgaaggagctggatcaggttgtcgagactgcgcttcagcataaaccgaagaagaagagaaggatagtggtatggcccgcatcaacgctggtcgcggcggctgtactattggctgccgtcgtgaatatcaatcccggagcagcgcaggccatgtcgcagatacctgtcatcggcaaggtcgttaaagccatcacattcaccgagatcaaacagaaagatggagaatcgagcattgacgtgaaaacaccggctctttccggcttgaataaccgggagctcgaaaatggcatcaacgagaaatatgtaaaggaaagccatcagctttaccgggaattcatgaaggagacgtcccggaataaaaaagggcatctcagcatctacagcgattatgagacagtcacggatacgaaagatttgatttcgattcggcgaagcgtcgaaagaacggaagcgtccagctataccgaacggcgctatatcaccattgacaaaaagaatgaagtcctgctcaccttgaaaagcttgtttaaagacgaccggtatatcaccgccatcagcgaaaacattaaagagcaaatgaaacagcaaatgaaagatgatcctgataaaatatattggatcggtgacgaagaagtcgagccattcaaacgaatcaaggccgaccaaaatttttacattacagagaatcataaactggtgatttcgtttgatgattatgaagtcgctcccggctatatgggcgcggtggagtttgaaattccgactaaggcgatttcgaacctgctgatcggcgaccgctatatccgctag

SEQ ID NO: 694 - DNA, 1881 bp, Bacillus licheniformis
atgcgagatcagacacaacaacaccgttacataccggggttagacggccttcgggctttgtccgttttggcggttatcgcttaccacctcaacatgagctgggccgacggaggcttcattggggttgatatcttttttgttttatcaggatatttgattacatcgattatcctgccggcgtatggaaatgacatttccctcacattccgcgatttttgggtgcgccggatacggcggctgcttccagcggcgacgctcatgattttcgcaaccgtcatatgggtcgctttgtttaacagagagctgatgcataccgtacggggagatgcgatctcctctcttttgtatgtcagcaattggtggtttatctttcacgacctgtcatattttgatagttttggatcgccgtctcctttaaaaaacttgtggtcactggcgattgaagaacagttttattttatctggccgatcattttgctgttgggcatctacatatttaaaaagcgggagaggtttgcagcggcggttgtgctgtgtgcgctttgttcagccatatggatgagcatcctgtacgtcccgggcggcgatccgagccgtgtatattacgggacggatacacgcgctttcgagctgttgatcggatgcgcattagcccttgtgtggccgatgaaaaggctgtctgggaacaggctccccaacagcctcaagcatgcattgcacggaactgagcttgccgctttcgcgctgcttatgatgtgcatttattttgtcgatgaattcagcccgtttctctatcacggcggaatgcttataatcagcataatcgcagctattttgattgcatgcgtcagtcatccgagcagcttcctgggctttgccctttccgtgaagccgctgcgctggatcgggaaaaggtcgtacggcatttatctttggcactatcccgttatcgtgctgagcacgcctgttcaggagattggaaatccggtgtactggcatgttgcgatgaaggtcgccgttacatttattctggcggaactttcgtatcgctttattgagaagccgatccgaaaagacggttttaaaccgtttgtcagccgggtttttctggataagatcacggaatggaaaacggcttccgttccaagcaaaatatcaatcggcctgatgtttgccgcgctcctcgtttttgcagggggtctgtcgggattggccgacgaaaagaaacagccgcagcaggcctattcaaaatcttatgaggaaacaagcgcctcagcggatcagccggctgacaaaagtgaagaacggcaggacgataagaaagcacaaactgagagcggaaatgagagtaaaaccggaaacggggaggaatcgtcagatacgaaagatgagcagtctgcggaaaaagagccggatcgcatcgaaaaagaagtattggctgtcggggattcggtcatgctggacatcgcttcaagcctgcgccggaagattccgggaatcacaatcgacggacaggttggaaggcaagtgagggaagcgcttcaattgacatcaacctacgcctcctttaatcatccggacaaagccgtcgtcattgaattgggaacaaacggctattttacggacggccaattggacgctttgcttgatgctttctcaaaagcggatgtctatctcgtgaatacgcgcgtcccccgacaatgggagagcaaggtgaatgaatcgcttcggaagcatgcggacagccgtcaaaatgtgacattggtcgattggcacgctgaagcactgcaacatcccgaatatttcaccgccgacggcgtccacctgatgccgaaaggtgctgaagccttggcatcgcttatcgtcaaagcgatgaaataa

SEQ ID NO: 695 - DNA, 1206 bp, Bacillus licheniformis
atgcttcataatccagttggtaaagagaggttggcattggcttttctgctcggaatgcttgccatacttggacctcttaatatcgatatgtatttgccgagcttccctgaaatagcggatgacctgggagccggtgcgtcgcttgtgcagctcagcttaacggcttgcttgatcggccttaccatcggccagctcgtgattgggcctgtgagcgatgcgaagggaaggcgaaaacctttattaatttcgatttcgctgtttgcgctgtcttcactgttttgcgcgctgtcgcctaatatcgcgacattagtgcttgcccgttttttacagggatttaccgcttcggctggaattgtgctgtcgcgcgccattgtacgggacgtgtttacagggagagagctttctaaatttttctcgcttctaatggttatcaccgcggttgcgccgatggtcgcgccgatgacggggggagccatcctgcttttgccgttcgctacttggcatacgattttttatacgctggcattgatcggattgttactagtactcgttatctcgatgaaattgactgaaacattgccgcccgaaaaacggattccaagctcaatcggttcgtctctcaaaacgatggggagcttgttgaaggatcggtcttttatcggctatgcgctgactgtcggtttcattcacggaggcagctttgcctacgtatccggaacgccttttgtatatcaggatatctatggggtttctcctcaggtgttcagcgtgctgttcggcattaacggcctcgccattatttcgggaagctttatcatcgggcgattcgggggaatcattcatgagaggaagctcttgcggatcgcggtcattaccgctgtcatcgcgacatccgttctcctgacgatgacgattttgaaaggaccgcttgcagcgattgtcatttcaatctttatctacatgataaccatcggaatgacgttgacaagcacatttacgctggcgatggaaaaccaggggcaccgtgcgggcagtgcaagcgcaatgctgggcatgcttccgctgctgctcggttcgatcgtttcgcctctcgttggaatgaatgaaacaacggccgttccaatgggtgcgatcatgttcatcactgctgtgatcggctctttcgctttttttgctttaacgcgggaaaaccagggggagcggtaa

SEQ ID NO: 696 - DNA, 3094 bp, Bacillus licheniformis
atgttgaaaaagctatttgttttcatttcgattattctcggctatgccggcttcttttttattttcttattcattaacaaccaattgtccgaacaaaactaccctgaagcgaagcaaggaatcatcaatctggaaacatgggattttcagaaagacgggaacatcgcgctcaccggagaatgggcactataccgaaaccagcttctctccccaaaggacattcatgcaggcaaaggaaaagcccccatttattccgatgtgcctaacaatgtcaaacttaccgattcaggaaaaaacgtggattacggtacatacagactgatgatccggtcaaagcaagacaatgagatgttcggaatcagcacctcttttataaacagcgcaaaccgagtttatttctacggcaaattgatcgggcagagcggaaccccttcaaacaaagcgaatttcacggcgcaaaacaagccttatacgagttttttcgaggttcgccgcggagacaacgagttgattgtacaattttcgaacttcaaaaaaacaccttcatgggggatagaaaaaccgattgcctttgggatgcagcagcacattttacaccaaagcaaaatctcttttttaaatgaaaccagcatgatcacagcattctttattaccggtttatactttctcggcttttttctgcatcgaagaaaggataagcacttattctttttttccacgatgtgtcttcttttttcggtcatagtgcttttaatcggaagagaacgaatgatctttcttctctttccgtctatctcattctcagctttaagcgtcgtgagggcgaccacaatggtgcttgtcagtatggcggtttttctctatctatatttcgcttacaaagaaatcgtttcgaaaaaatggataatcgccgcgactgcattttctgtactggttttgatgattgattttattacctggggttacacagaccgtctcgcatatatattgcactctgttcttgccgtcacgactttgatttatattacgtatgtgtttgcgatttctgctgttcggaaaatgaaaggcagcctttatcttacgattgcagcgatctcgatgagcgcattcgtcattttaacgaccgtttctgcttacagcggcaaaagaggcttttcattcaattcgctctatgccgtgccgtcgatcatcgctttgctggcggctgtactgatgatggcgcagcaattcgcaggcgcattccgcgagaacgaaatcctgtccttgaaattgctcagaatgaatcgattaaaagacgagtttatcgccaaaacatcacatgaatttaaaacgccgctgaacagcatgattaatatatgccagacccttttggcaaggaagagaaaaaggacgttagaggaagaaaaagaaaatctgcagctggtcatccgcatgggatacagactatccagtctggtgaacgacattctcgatttggaaaaaatgaagcagggcatgctgcagattcaggccgttcctgtcgatgcccattcggcgaagcacggaaatggacttctatcggctgttgtcaaaaaataaaaatgtccggattgtaaaccgtgttccatccggactgccgctcgtcttggccgacgaaaaccgcttccggcaaatcatgaccaacctggttgataacgcgatcaagtatacgccggaggggcagattacgctctccgccgaaaggctcgaccaagagaaggtcaaaattacagtagcagatacaggagtcggcataccaaaagccgtgcgtcaattgatattcgaagcttttcaacaagcaaaaaaccataaagacgacggagccgggcttggtttaagcatcgtcagacagctcgttcagcttcaaaatggagagatctgggtagaatcggaagaagggaaaggatcggcatttcatttcacactgcctgttgcaaaaaatgaccctcttcctgacgcgaagaaggagaacatgcctcaacagcaagccgtcagagatctgcccgatgtttctatcagcacgccgtactactcaaagaaaatggatgcttcaactgttttgatcgtcgatgataacatcgaaagcttaaaaattttggccgatatgcttgaaggcgttccttatcaagtcatcgcagcaaaaagcggccatgaggctctcgaagtcgtctcccgttcaaagcttgacttggtgattttggacctgatgatgccggatatgacagggtttgaagtctgcatgaaaatccgcgaaaggttcacaatggtggaacttccggttctgatcattacggcagccatcatcgaccatgataaatacaaggcttttcacgctggggcaaatgacattttgcagaaaccgtacaactacactgaatttgcagcccgcgttaaaaacctgatcatgatgaaagatacggcagcccaagcgacaaatatggagatggcattcctccaatcgcagatcaagccgcactttcttttcaatgtattaaataccattatcgcgctcagtcatttggatattgaaaaggcgcgcgaagtgacggctgattttacaaactacttgagaatgagttttgactttcaaaatacatcagggatgagttctttcaagcatgaactgtcgattgtgaattcgtatctttccattgaaaaaacgcgcttcggcgatcggctggacgtcatttacgatattgaggaagacatcgactttacccttccgcctttaatgattcagcctcttgtcgagaatgccgtccaccatggcatcagcaagaaaagaggcggaggctggatcaagctgacggcaaaaaaagaaagcgaaaaccgctattatatcaagatagaggacaacggaatcggcatgccgccggagaaacaacaagatatcttttcttctcatttcactcatagtgtcggtatgaaaaatatcaaccgcaggctgaaacacttctgcggaagtgaactgaatatcgaaagtacgcctgatagcgggaccgctgtctcaatggtcatttctatcaatgaatccgcggacgtctcagactccgccatccagcgggcgcctctataa

SEQ ID NO: 697 - DNA, 1021 bp, Bacillus licheniformis
atgcttgaacgaacaaattgctttcgattcattgaaatgtttcaagatccggctgatgttctggaatatccggatattcgggatatagacacggtgtttcttgacattgaaatgccggggataaacgggattgagctcgctgaagcgattcccgatgaatgaaaacattcaggttgtttttatcacggcttataacgattttgccataaaagcgtttgaattaaatgcggtggattatttgcttaaacccgtcgattacgtccggctcgtgaagacggttgaacggatcagggaaaacagcttgctaaaggcttcagcggtaaatgccggaggggactatttcatccaatgttttgggaatttgcaattttacaaagcagagaagggcgtcaaaacatatatacctgttaagtggagaacatccaaggcccgtgaaatttacgcgtatttgcttcatcatcacggccatgtgatcagcaaagacgtgctgatcgacctgttctggcaggatcatgatgtctctaaagcaagcactcagctatattcagcgatttatcaaatcaggaaattaatcgataggcttcctttcggtcaatccatcgagaagactgacacaggatatgtcctccggatttccggtgtgaaagtggatgctgacgaatgggaaaagtcgctgaaagaggctcctcccatccatatggcgacgatcaacaggcacatggaattgctgcttgcatacgaaaaccattactttatggaacacggttatttgtgggccgaacccgaaaagacgcggcttgcccggatctggcttggaaaagcttatgaactggtcgattttcttattcatgaaaaagactaccgccgggggcttgatatatgtctgctggtcgagaaaatcgaaccgtgcgatcataaaatcatccaatacaagatgcagctgtttaataaaaccgggaatgtagaagaagcgatcaaggaatatgagcgctataaacttatgaaggacaaaatgaattaa

SEQ ID NO: 698 - DNA, 5781 bp, Bacillus licheniformis
ttgagatcgaaaaaatattcgttcagcctcagcaaaaaaagagggctgaaatcatttttggtcacttgcctggcattgtatttgatcttcagtcaagttgtcggctttacgctgacggcagtggctgccggcacatcaacaggcggcagcgtgttttttgattcagtgacaatcaaaaacagcgaagatcaaacggttgacggctcaaagggagacgaaccagcattaaagccgggagacaaagtgacactcacatacgagtggtcgttaaaaaacgatgaagaagccggcgccgaaaacagtttcactgtagaggtacctaaaagcttcgaattcgctcaggattccgagggagaagtgaaatcggcagatcagcagatcatcggcagctatcaagtgaaagcggacagcaacatttttaccgtaactctaaaaagccctgccgagggctctgccggagcaaaaggggccattgcgctgtcagcaaagtttgccgcagatgtgaaaggcgatacaaaaacggtcacagctctctttcaactcggagcaggcaagacacagcaagtgatcatacccgtgaatacaggctccgaatcggaaacggcgaaaaatgatcctccgtcatctgaggacgatcagtcagacgatcaatcaaaatcttcaggaggacaggaccaagaggaaacgaagaaaaaagctgccgacgctgagaacagcgattcaaaaccggcggcatcttccagactggcggcagccggaagccttgcgtccggtggcaatcaaatcacccaaaataatttaaccggcgtgacgctgacggatgagcacggaaagccttatgacaaaagcaatcgagccgacacgaattctccggcgaaaatctcaattacttgggacatcccaaatgagctcggaaagacgataaacgacggcgaccgctatgaatttgatctgcctgaagcttttatcatgtacaacgacattacgaatcagccattaagctcagacggcatcacgtacggctatttttcaattgatacaaaaggccacgttgtgatgacgtttaacggcgaagtgaaagaagattcgaatgtcaaagggacgttgtttgtcaacacccagttcaacgcacaaaaaataaaaggctcgacgactcaaaagattccttttccggtgaaatcagacactccagaagtaacggtttatttcaaaccaaaagtaagcaaaaccattgataaatcaggaactttcgataaaggcatcaaccccgggcaggtcacatggacagtcgacctcaacaaaaaattggatcaggtgaaaaatgccaagctgaccgagaactttccagaggggctgacctatcgttctgtcaaagtttatcagctggatgtcaacatagatggttcagtcagccagggagatgaagttctttcaggctacaccgtagacgcagatggaaatgtcacattcgacggtgagatagattcggcttaccgcctcatctatgtgacggacatcgatgactccgcaaaaccgaacgaaggcggaaacgctgcatttacgaacaaggcaacgttcggcggagacaatctggaaccggcttctgcagaggcctctgtcacggccaaatacgggaaaatgatcgaaaaatcgtcgacaggttataaaagcgattcacagacgttcagctggacgattttatataactatggagagaaaaaaatcgacgaatccaaagcgagcataacagactcgtttggttccgctgatttgcatcttgtttcagattccttaaaggtgattccgattactttcaatcagaacggcagtgagcaggctggaacgcctctaacggaaggcaaggattatacgctctctgataatggaagcgggtttgaaatcaaatttaaccaagatgttaccggagcttacaaaatcacgtatcaaaccgaggtcaacagcggagtaatcatcgataaatcaacaacctatacgaacactgcagtgaccggaacaggagaatcaaagaaagcttcaggtacagccgttcagcagaatttgataaaaggctactcaaacattgattacaagaagaaaacggtcgattggacgatcgcaatcaacaaaaacaactacacgatgaacaattggaagttggatgacaatttcgaaagcggcgggctcacgctcctcgacggatcattccgccttcaggatgtgacgaataacaaaacgcttgaagaaggcaaagactatacattgataataaaaccggatcatgaaggttttctcctggaactcatcggagattatgcgacaacgaacagccagcttaagatcacgtataccacgaatatgaatgccgacttttccaacgaaaatgtcaaaaacacggcagaatcaacgtggactgatcacagcagcactgaacgcaaaaataaggaagcgagcagttttacgccgaatcgccagacatcccacaacggcttcaaacacggcttatacaacgctgtttcaaaagaaatcacgtggaaaatcggcatcaactataatggagagccgtcggctgccaataaacaaactttgaccgtccatttgaaaacggacgattccgtcccgtatcttattgaatttaaaacatcgctaaaaggacaggtcattaagcacgatccttacaccaataaggccacgtaccataatgccggatattcagagcgtgagttgacggcatccgtttcggtcgcagacggaggaagcctcgttttcaaaggaggcaaacaaaacggaggttatgtcgattggagcatcaatgtcaacgcgagccagtcggtattggaggatgtaaaagtcaccgatactccggataccaaccaaattttagctgaagattcttttaaagtttatcaagctaaatacgatgaaaaaggtgcagtcaaagacagcggaggaaatcttgtcccggatgatgttcagcttaagaaaggcgaggactatacactggatatcaagaccgacaatgcaaccggcgaacaatcatttgtcctgaaatttacaggcgattacaaaaaaatcgaccgcgcctatgtgattcaataccaatcattaatcaatattgccggcacgagcggccatgttcacaacaaagtgtcgatttcgggaacgaatgtccaggaacagacccaggaaaacaacagctcggtctttgttgccgtttcaagcggcggcggttcaggctcaggggaaagaggaagcctgacaatccttaaaacgggagaagacgggacgccgctttccggagcagattttcaattgcggacaaaagataatgagcagctcctgcggacaggaacgactgacgacaacggcaagctgacattcggcaatattcgctatggcacttacattttaaaagaaatcaaggcgcctgacggatatacgatcagcgacgcctatgcagacggggtctccgttgagattaacagcagctcttcaagtgccggagcgctttacaaagtcgtgaatgagaagaataaggtgacgcttatcaaacaagacgaacaaaagaatccgttggaaggagccgtgttcaagctggagaaaaaatccggcgatggcacctttacaacaatacgtacgagtattaagagcaatgaaaacggaaaagtagaaatcaacggtttaccgcccggcgattatcgtttgctggaaacgaaagcgcctgaaggttatctcttaaatacaaaagaactcggcttctccgtcaaaacgaatgataagaatcaagtgcctgacgttgatttaggagcattgatcaactataaaggcagagcgcatttaacgaaagaggatgcagaaggccgtcaattagaaggggctgaattcaagctcgtcgatcatgaaggcaaaaccattcatgaaaagctcacctcagatcaagacgggaaaaccgcggtatctgaccttgcgcctggccgctatgcctttgttgaaaccaaagcgcccgagggctatgtgataaacagcaaggcaatcgagtttaccatatctgaatcggcaaaagaaaaaccggaatccgtggacgcaggcaaagccgtcaactataaaggttcggtttatttgacaaaagaggatgcggaaggccgtacgctgaagggcgctgagtttaagatcgttgatcatgaaggcaaaaccgttcatgaaaagctcacttccgatgaagacggaaaaatcgcagtttcaggcctggcgcctgggcgctatgctttcgtggaaacgaaggcgcccgagggctttatgttaaacaacgatcaaatagaattcaccatcccgggctcagctgaagggaaaccggagccggttgatgcaggcgccgctgttaattataaaggctcggttcatttaacaaaagaagatgcgaaaggccacaagcttgaaggagccgtttttaagatcgcagatcaaaacgggaataccgtacaggaggaactggtttcagatcgaaatggaactgttacggcttcaggcctggcgcctgggcgctatgctttcgtagaaacgaaagcgcctgatggatttgtattgaacagcgggaaaatagagtttgtcatcccggatgccgctgaaggaaaacctgcgcatgtagatgcgggtaaagccatcaactacaaaggttcggtttatttgcagaaagaagatgaagacggcaatggattagaaggagccgtgtttaaaatcattgacagcgaaggcaaaacggtcaaagacgatttgatctctaaagaaggcggcaaaatcgaggctggcgatttggcgccgggaagctatcaatttgttgaaaaacatgcgcctgacggctacctgctgtcaacagatccgatcccattttccattaccgggaaacacgaaggtgagccgaaacaggttaaactgacggctctcaacaagaaaaacagcgttgtgctcacaaaagtcggccaggatgacaagagcgccggacttcagggagcgcagttcgatttgacagatgaaaccggcaaggtgctgaaaaccggtttggcaacagacgcagacggccggatcacagtgtacggtcttaagcccggtaactaccaatttgtcgaaacaaaagcgcctaagcattatcaattggataagacgccaatatcgttcacagtcaaaaatactgatacaaagcaaatcgaactgactgcagagaaccaattgacacctggcgatgtgaaactgacgaaagtggacagcaacaataaaaaggctgttttaaaaggagccgaattcaaactgctcgatgccgatggaaagccagttaaagccggaggcaacagcaaaaagctgccggcagtctggactacagaccaaaacgggcagttcacagcggagggattggcacctggacgctatcaatttgtcgaaacgaaggctcctgacggttacaagctggatgaaacaccgattccttttgaaattaaaaaaggacagacaaaaccggtcgaggtgatcgcgtccaatgaaaaactgaaaacgccggctgttgataaaggcgcaccggacccgaattcgggagaccctaaaacagataacaaaggcacaccggaccgaaattcgaaaggagatcctaaaacaaatgacaacggtcatttgaaagatacgcttccgaaaaccggtgacacagacagcatcattccgatcatgatcggcatcctgctgattctgtctggaggagccttcgctttcttcacaagaaagaaacaaagaaaggcgtaa

SEQ ID NO: 699 - DNA, 129 bp, Bacillus licheniformis
atgaaaggagacaagacgaagagtattcctgatatgacaagcacggcaacgatcatttttttatacatgcctcacagtcctttctttaaaaaagcacctgaccggttcaatgatcaggtgcttcaatga

SEQ ID NO: 700 - DNA, 633 bp, Bacillus licheniformis
atgtataaaaaaatgatcgttgccgtgcttgtcatatcaggaatactcttcgtcttgtctcctttcattaaagaaagcatcatcatcaatctcaacaagaataaaaattttgatttgactgctgaacaggcggaacaaaacaatgcacaaaaggcttcatttgattttgaggcgattcagccgccttctattttggaaacaataaaagccagcctcgatcgtgaatcaaaagcggtcatcggccggatcaccataagcagcgtcaatctcaagcttccgatattgaagggcacaaccaatcaaaatcttctttacggagcgacaacaatgcgacccgatcagaaaatgggcgaaggcaactacccgctggcaggccatcatatgaagcgggagagcctcttattcggtccccttctcaacattgaaaaaggagataccgttaaaatcacagactttaaaaaagactatatatacgctgtgacgtcgaaacaattcatttctgaaatggacacagatgtgattcaagagacgaaaaaaaaggaaattacactgattacatgtgacaaagctgtgagaaccgaaggacgccttgctgtcaaaggaaagctgattcatgttgctgtacacagataa

SEQ ID NO: 701 - DNA, 135 bp, Bacillus licheniformis
ttgagtaaaatcgccgccaaccccggtatgaaagaaaaatatccaatccgcatcgtttcattttcttttttgttatttctcattacttttttactcttgtcatttcatagtgatctttttgtcatttttttgtga

SEQ ID NO: 702 - DNA, 132 bp, Bacillus licheniformis
ttggggcgaaactttcaaaagttagatatgaagcttttaggaaaaagaaatgagctactattaaggatgtttcgaaaacctttggaaataaatcaattttcatttaaacaaaggcgggggaaatcaatatga

SEQ ID NO: 703 - DNA, 1422 bp, Bacillus licheniformis
atgaatgaacagggaaatcagaaatcatttttgcgtactattattttagtctcgacgttcggcgggcttctattcgggtatgataccggagtaatcaacggagccttgccttatatgtctgaaggagatcagctgaacctgacagcatttacagaaggattggtcgcgagttcgcttctcctgggagccgcattgggagcggtgttcggcggaaggctatccgattatatcggacgccgcaagaacatcatttttctagctgtacttttctttttctcgacgcttggatgtacgcttgcgcctgatgtgacggttatggttatctcacggttcctgctcggagttgccgtaggaggagcatctgttacagtcccgacttacttggctgaaatgtctccttcagaaaaaaggggacgaatggttacccaaaatgaattaatgattgtctccggacagcttttggcatttaccttcaatgccatcctcggaaccacaatgggcgattcctcacatgtttggcgttacatgctggccattgccgcagtcccggctgtattcttgttctttggtatgctgagaatgcccgaaagtccgcgatggcttgtctctaaagggaaaaatgaagcggcgctgggtgttctgaaaagaatccgcaaggaaaaaagggcgcattcggaagttgctgaaatcgaagctgcagtcatgaaagaatcggaaatgaaaaaagcgaattataaggacctggctgttccttgggtgcgccgaatcgtatttcttggaatcggtatcgctgtcgttcagcagattaccggtgtaaactctattatgtattacggaacagaaattcttaaaaatgccgggtttgaaactaaagctgcactcatcggcaatattgcaaacggtgtcatttcagtattggcgacgttcgtggggatttggcttttaggaaaagtgggacgcagaccgatgctgttgaccggtttaataggaacgacatcagctttgctgcttatcggcatcttctcaaacgtccttcaaggttcagctgctcttccttatgtcgtacttacgctgactgtaaccttccttgcattccaacaaggcgccatttctcctgtaacatggctcatgctttctgaaatattcccgcttcgcgtacgcggcctcgggatgggcgtcaccgtgttttgtttgtggatcgccaatttctttgtcggattctcgtttccgatactgcttgaatcgattgggctgtcctcgacattctacatttttgtcggacttggacttctttccattgcattcgtgaaaaaattccttcctgaaacaaaaggcctcacgcttgaacagcttgagcataatttccgcaactataaatcggaaacagcacaaagcggtgcaagcgctaaaatcagcgggtga

SEQ ID NO: 704 - DNA, 984 bp, Bacillus licheniformis
atggacgaatttgaattaattcaaaggattacgccccgttcgctttctcatcgggaaatagaaatcggtattggagacgatgccgctgtttatcatacgaagaacaattatcaggagatcgttgcagtcgatacgatggtcgacggtattcattttttatcatcccattcatcgcctgccgatatcggatataaagcattggctgtgaatattagcgatattgccgcaatgggaggccgacccaagtactatcttgtgtcaatcgccgttccttccggttggggcgcgacggatattgaagccatgtatgaagaaatgaataaactggcgacactatatgaaatggatttaatcggcggggacaccgtatctgcaaacgggccgctcgttttgaccgtaacagcaatcggcgaaattgaaaagggcagatcttgtttaaggagccatgccgagcccggtgatgtcgtttttgtgacgggagaacttggctcatcagctgccggcctgtcttttatattgggccaaacatcggcgagagacgagacgcagtctcaatactttattgagcggcacaagaggcctgagccgagggtggaagcaggtttgatctgttcacgctatcaccatgtggcgcttaatgatatcagcgacgggcttgccagtgaattaaatgaaattgctgaagcgagccgtgtttccattgacatatataaagagttgattccggtccattcggatttacatatattgcacacaaaatgggaagagtgggtccttttcggcggcgaggattttgaactcgtcggtacgatttctaatgatcaatgggaacgttttagtcaggaatgctccgagcatgatgtgcgggttcatcaaatcggccgcgtcacaaaacaaggacaggcggaagtgttttatcatgacggacaggaccgcgttcttctcgaaaaaaaaggatataaccattttaaacaagacaggtga

SEQ ID NO: 705 - DNA, 477 bp, Bacillus licheniformis
gtgaaaacgttagagtggaaaacgacagagcctgaagagacaaaaaacattgccaggctggcggcaaaatatgttcagcccggtgatgtcatcacattggagggcgatcttggagcaggcaaaacgacttttacgaaagggtttgccgaagggatcggcatcaagcgggttgtcagcagcccgacttttaccatcatcaaagaataccgtgacggctctcttccgctgtttcatatggatgtgtacaggatggaagacgagacggaagatctcggattagatgaatattttgagggagacggcgtctgccttgtggaatgggcgcatttgattgaagagcagcttccaaaagaacgccttgaggtggtcattaagcggcttggtgatgacaagcgaaagctgacctttacacctaaaggcaggcgctacgaaaatctttgcgaggagatcagcaaacatgacgatacttgcgattga

SEQ ID NO: 706 - DNA, 690 bp, Bacillus licheniformis
atgacgatacttgcgattgatacatccaatttaacgctcggagtggcattaatcaaagacggaaaagtgatagccgagcatatatcccacttaaagaaaaaccattcggtcagagccatgccggcaatcgacgaactccttaaagagtgcggtttaaagcctagtgacctgacccaaattgcagttgccaaaggcccgggttcatatacaggcgtgcggatcggcgtgacgattgccaaaacgcttgcatggtcattaaatattccggttaaaaccgtttcaagccttgaagtgcttgcggcaaacggccgttttttccaaggcttgatttgtccgttgtttgatgctaggcgcggtcaggtttatacgggactgtaccagtatagggacggcaaactccatggattggaagaggaccagaacattctgcttgaagattggctaaaaaagctgaaagccatggatcagcaagtccttttcataggaagcgacaccgggattcacagggaaatgatcgaacggattctcgatgaacaagcggttattgcagaccctgccctgcagcttccaagaccttcagaattggctttaatcggagaacttaaagaggacgagccagtgcacagcattgttccaaactatattcgtctggccgaagccgaggccgtctggcttgaaaaacaaaagtaa

SEQ ID NO: 707 - DNA, 459 bp, Bacillus licheniformis
atgaacacgcaaatggtcatacgcgatatgaatccaaaggatttggaccaggtttttgaaattgaaaaaagctctttttcttctccgtggaaaaaagaatcttttcatcatgagctttttcacaatatgtatgctcattatctcgttctcgaagttgaggagcaagtcgtcggctactgcgggatttggatcgtaatggatgacgcccagatcaccaatattgccgtttcacctgcataccggggccgccgcttcggtgaagctcttttgaaggcggccatgaagctttgccggatgaaaagggcggttcagctttctttagaggtgagggtatcgaatcatattgcacagagcttatacaaaaagctcggctttgagccgggaggaattcgcaaaaattattataccgataatggggaagatgcattattaatgtgggtgagactaaatgaatcataa

SEQ ID NO: 708 - DNA, 1026 bp, Bacillus licheniformis
atgaatcataaaaaagatctgtatgtattaggaatcgaaacaagctgtgatgagactgccgctgcgattgtcaaaaacgggacggacatcatctcaaatgtcgtagcgtcgcaaatcgagagtcataaacggtttgggggcgtcgttcccgagatcgcatcaaggcatcacgtggaacagatcacgatcgtgcttgaggaagcctttgcacaagcggacatgacgtttgatgacattgatgccattgcagtaacggaaggaccggggcttgtaggcgctctattgatcggcgtgaatgctgcgaaagcgctcagttttgcccggggcataccgctcgtaggcgtgcatcatattgccggtcacatctatgccaacaggcttgttcaggacattcaatttccggcgattgcccttgtcgtctcaggcggccacaccgaactcgtatatatgaaagagcacggctcatttgaagtaatcggagagacgctcgacgatgctgcaggcgaagcctatgacaaagtggcgagaacgatggggcttccttatccgggtggacctcacattgacaaacttgcgcaaaaaggcgaggcaaatgtgccgctgccgcgcgcatggcttgaagaagggtcttatcatttcagcttcagcggattgaagtctgcagtcatcaacacgcttcacaacgcttcacaaaaaggcgaaacgatagctccggaagatttgtcagccagctttcaggaaagcgtcatagatgtcctcgtgacaaaaacggaacgcgctgcggaagcttatggcgtcaaacaggtgctgcttgccggaggagttgctgcaaacaaagggctgagagccgcgctcgaaaaaacgttcagcagccgtccggagatcgagcttttgatcccgccgctctcgctgtgtacggacaatgccgccatgattgccgccgcaggtacggttgcttttgaaaaaggaatcagaggaaaatatgatatgaatggtcagcctggcttagatctgacgtcttattga

SEQ ID NO: 709 - DNA, 1926 bp, Bacillus licheniformis
atgatgattttacaagtaaatcagctttcaaaatcgtttggagccgatacgattttaacgaatataaaactcgaagtcaggtctcgggaccggattgcggtcgtcggacgcaacggcgccggaaaatcgactcttctaaagattatcgcaggaaagctctcatacgaaaagggggacatcatcaaacctaaagatttgacgatgggctaccttgaccagcattccggcctcgattccaagctgacgcttaaagaggaattgctgtcggtatttgattttcttaaaaaaatggaaaaagaaatgcgcgcgatcgaggaaaagatggcgcaagccggaccggacaagcttgaatcattaatgaagacatatgacaggcttcagcaggagttcaaggacaaaggcggctaccaatatgaggcagaggtcagatccgtcatgcacgggctcggctttgcgggatttgacgactccgtccgcgttcaggatttaagcggaggccaaaaaacaagacttgccctcggaaaaatgcttttgacaaaacccgacctcctcattttggacgaaccgacaaaccacttggatatcgacaccctgacatggctcgaacaatatttgcaaagctacagcggagcgattttaatcgtttcccatgacaggtactttcttgacaaagtggttacccaagtttacgagattaccaggtcccaaagcaaaaaatatatcgggaactacagctcttatctccaattaaaagccgagcagctggaaagggaaacaaagctttacgaaaagcagcaggacgaaatcgccaagctgcaggatttcgtcgatcggaacttggcaagggcttcgacgacgaaacgggcgcagagcagacgaaagcagcttgaacggatggagatcatggacaaaccgcttggagatgaaaagtcggcgtcattccgctttgaaattacaaggcaaagcggaaacgatgtactgcgagtggaagacctgacggtaagctatcaggaccagcccccgcttctccgttcactggattttcgcattacccgcggggaaagcgttgcactagtcgggccgaacggaatcggcaagtcgacccttttgaaagcattgatccaaaagctgcagccggtgtcgggaacaatcgcgacgggctctcacgtctcaatcggatactacgaccaggaacaggctgaattgacgtcgtcaaaacgcgtgcttgacgagctttgggacgattatccggagatgaatgaaaaggatatcaggacctgcctcggcaacttcttgttctcgggagaagatgtattaaagcctgtacatgcattaagcggtggcgaaaaagccaggcttgccctcgccaagctgatgttgcaaaaagcgaacttccttattcttgatgagccgacaaaccatctcgacctggacagcaaggaagtcttggagaacgctttaatcgattacccgggaacgatattatttgtgtcccatgaccgctattttatcaaccggattgcgacaaaagtactggagctttctcgcgacaaagccgaagaatatttaggcgactacgattattacacggaaaaaaaagcgcagcagcttgaactgaaagaactagaaaaacagacggaagagcgtcagaaagccgcttccgaaaaaccgggcgcaaaaaagagctatgaagaagaaaaagagctgaaaagaaaagaacgccagcggcagcgcaggattgaagacatcgaaacaagaattacggccattgaagaacaaattgaaaagaatgaagagctcctatgcaatcccgacgtcttccaagaccacgagaaggttcaggaaatccactctgaaaatgaacagctgaatgaggagcttgaacagctgttatcagaatgggaaacactatctacaaatgaataa

SEQ ID NO: 710 - DNA, 144 bp, Bacillus licheniformis
atgatctttcacctcttgtctgctattttaagtgtagcctatcaccgcgcagtcagcaaacaattaagtgaagtctggaagattttagccaaagaaaaagacagattgaaaaaaatagtgtatgatcattataaggagagttaa

SEQ ID NO: 711 - DNA, 507 bp, Bacillus licheniformis
atgaatgagtttacacattttaatgaacaaggcagagccaagatggttgatataagcgaaaaggaagcttcagtgcgcacagctgcggctgtttcaagcgtgtccatgaatcgagaagtacatgaaaaaatcaaaaaccgcgaaatcggaaaaggcgatgtgttggcggtggcgcaagtggccggaatcatggctgcaaaacagacatccgccatcatcccgatgtgtcatccgatcgctctgaaaggagtcgacatcgccttttgctgggagaagaaagagcagaagagcatcctgcatatacaatctaacgtcaagaccaaagggagcacaggtgtggaaatggaagcgttaacgtcggcctccgtatgtgcgctgaccgtttatgacatgtgcaaagcggcggataagggaatggtgataggaccgacctttcttctcgaaaagacaggcgggaaaaacggtgactataaaagggaaaaagctgatgtagacatggaggattag

SEQ ID NO: 712 - DNA, 648 bp, Bacillus licheniformis
atgaacatggatcattcaaaaattccgcaagcgacagcgaaacggctgccattatattatcgttttttaaaaaaccttcatgcatccgggaaacagcgtgtatcttccgctgagctgagcgatgccgtcaaagtcgattccgcgaccatccgaagggatttctcgtacttcggcgcgctcgggaaaaaaggatacggctacaatgtcaattatttgctgtcctttttcagaaagacgcttgatcaggatgaaacgacgaacgtaacgcttattggcgtggggaatttggggacagcctttctccattacaattttatcaaaaacaataatacaaaaatcgccatggcgtttgacatcaatgaagaaaaaatcggaaccgaggtcggcggcgttcccgtctatgacctgaataagcttgaagagcatatgacggatgatgatatcccggtcgccattttgacggttccagctcaagccgcacagtcgattacagacaggctggtggcgcttggcattaaaggcattcttaatttcacgccggctcgcttgaatgtgccggaacacattcgcattcatcatatagatttggcagtggaacttcagtcgctggtgtattttctgaaacattattcaatgcaggaaaagtaa

SEQ ID NO: 713 - DNA, 180 bp, Bacillus licheniformis
atgccaacaatcggtcctggaagctttattttaattgtcgtggtggcgcttttgatattcggcccgaaaaaacttcccgagctgggaagagcggcgggaaacacgctgcgggagtttaaaaatgcgacaaaaggtttggctgacgacgattccgataataaaaagaaagaagatcagtag

SEQ ID NO: 714 - DNA, 768 bp, Bacillus licheniformis
atgaagggaaaagaaatgtcgctgttagaacatatcacagaactgcgcagacggcttgtgatcacttttttcttttttgttttgtttgttgcggcaggcttttttttggcgaagccgctcataatctacctgcagcagacggatgaagcgaagctgctgactctcaatgcgttcaagctgaccgatcctttatttgtgtacgtgcagttcgcgttcatcatcggcgctgtcttgacttcgccgcttgttctataccagctgtgggctttcatcagcccggggctgtatgaaaaagaacgaaaagtgacgctcagctatattccaatatcgatcattctttttttaggcggcattgccttttcttactttattttatttccgtttgtcgtggactttatgacgagagtctcagatgatctgaatgtcaaccaggtcatcggaatacacgaatattttcagtttctgcttcagttgacgcttccttttggcttgttgtttcagatgcctgtggtcatcatgtttatcacaaggctcggtctcgtgacgccgatgtttttggcgaaaatccgaaaatatgcatattttgtgttgttcgtcattgcggcgctcattacaccgcctgagttattgtcgcatttaatggtctccgtgccattgctcattctttatgaaatcagtatcgtgatttcaagaatatcctacaggcaggcgcaaaaaacaatgattcaagaggaaaatcaatcgtttttgaacgaccatacaaaataa

SEQ ID NO: 715 - DNA, 192 bp, Bacillus licheniformis
atgagaagccctaaaatctggggagtgatttatttattaacgggtgtgctgtttacgtatctcgcggcaacctcgcccggaagcatgtggtctttttatacgatcctgctgatgcttttcgcagcctataatatcagcatctcctttaaaatgttcgccctggccggcaggatgaagcgaaaagatcaatag

SEQ ID NO: 716 - DNA, 735 bp, Bacillus licheniformis
ttgagaaaacaatactggtttattatattggcatacgttctcatgcaattgtcggcggttgtcggcttgcctcttctctactttttgggagtgggcagaggacagcccaaggctgaagctcagcttacattgacgggcgtctggtctgtcatcgcgtttaccctctgtctcgtcatcgtgctgctgattttgcggacggtgccgaagacgacgcttcgcaatcgtccaaaagcatcggttgcagcgtcaatcggatgggcggtagccggcgtttttctcgctttgtttgcgcagtcaattgccgcttcgatcgaaatgaacttgttcggggtcaacccggaatccgaaaatacgcagcggattatgaaaatcatcaccgcattgccgctgatggtgtttgtctcttctgtattcggtccgattcttgaagaaatcattttcagaaagatcattttcggtgcgatctatgagaaaacgaattttttcgttgccgctctgttcagttcggtgctcttctcggtcgtccatttggatttcagccatctgctcatttatacggcaatgggattcacattcgcctttttatatgtcaggaccaaccggattatcgtcccgattttcgcccatgtcgccatgaatacgctcgtcgtcttgctgcagacattccgggagcctattgaagaatatttgaaaaacgtcgagaaaatgcaaatgattattggaggatttctatga

SEQ ID NO: 717 - DNA, 285 bp, Bacillus licheniformis
ttgttaaagccattaggtgatcgcgttgtcattgagctcgttgagtctgaagaaaaaactgctagcggaatcgtacttcctgactccgcaaaagaaaaaccacaagagggtaaagtggttgcagccggttcaggccgtgtgttagagagcggagagcgcgttgcattagaagttaaaacaggcgaccgcatcatcttctcaaaatatgcaggtaccgaagtgaaatatgaaggtactgactacttaatcttgcgtgaaagcgacattttagctgttatcggctaa

SEQ ID NO: 718 - DNA, 1635 bp, Bacillus licheniformis
atggcaaaagatattaagtttagcgaagaagcccgccgttcaatgctgcgcggtgtagatgcattggcggatgctgtaaaggtaactttgggacctaaaggacgcaacgtcgttcttgagaaaaaattcggttctccattaatcacaaacgacggtgtaaccatcgcgaaagaaatcgagcttgaagacgcgttcgaaaacatgggcgcaaagcttgttgctgaagttgcgagcaaaacaaacgatgttgccggtgacggtacaacaacagcgacagttctagctcaggcgatgattcgcgaaggtcttaaaaacgtaactgccggcgctaaccctgtaggcgtgcgcaaaggtatcgagcaggctgtggctgtagctgttgaaagcctgaaagaaatctctaaaccaatcgaaggcaaagaatcaatcgcacaagttgcttcaatctccgctgcagacgaagaagtcggaagcctgatcgctgaagcaatggagcgcgtcggcaacgacggtgttatcacgattgaagaatccaaaggattcacaacagagcttgaagtggttgaaggtatgcagttcgaccgcggatatgcgtctccttacatggtgacggattccgataagatggaagcggttcttgagaatccgtacatcttagtaacagacaaaaaaatcacaaacattcaagaaatcctgccggtgcttgagcaagtcgtgcaacaaggcaaaccgttgcttctgattgctgaagacgttgaaggtgaagctcttgcaacattggttgtcaacaagcttcgcggaacattcaacgcagtggctgttaaagcgcctggattcggcgaccgccgcaaagcgatgctcgaagacatctctatcctgacaggcgccgaagtgatcacagaagatttaggtcttgaccttaaatcaactcaaatcaatcaattgggacgcgcttctaaagttgttgttacaaaagaaaacacaacaattgttgaaggtgcgggagatacagagcaaatcgcggcacgcgtcaaccaaatccgcgctcaagttgaagaaacaacttctgagttcgataaagaaaaattacaagaacgccttgctaagcttgcaggcggcgtagctgtcatcaaagtcggagctgcgactgaaacagaattgaaagaacgcaagcttcgcatcgaagacgccctgaactctactcgcgctgcggtagaagaaggaatcgtatccggcggtggtacagctcttgtcaatgtttacaataaagtagctgcccttgaagctgaaggcgacgaactgactggtatcaacatcgttcttcgcgctcttgaagaaccaatccgtcaaatcgcgcacaacgcgggtcttgaaggatctgtcatcgttgagcgcctgaaaaatgaagaaatcggcgtcggctacaacgctgcaacaggcgaatgggtgaacatgatcgacaaaggtatcgttgaccctacaaaagtaacacgctcagctctgcaaaacgcagcatctgtagcggctatgttcctgacaactgaagcagttgttgccgacaaaccggaagaaaacaaaggcggcgcaggaatgcctgacatgggcggcatgggcggcatgggcggcatgatgtaa

SEQ ID NO: 719 - DNA, 117 bp, Bacillus licheniformis
atgagagccataattgaaattcatactcacataacaaacaagatgaagaaagaaacatttaataaaatgaaatgtttcctacaaggtatcacaagttttaaaaccgaaaaaatgtga

SEQ ID NO: 720 - DNA, 234 bp, Bacillus licheniformis
atgaaacaagaaccatttaaagcaggcggtggagcaacctctggtcttgctttaatatcaagggttatacccgtacctcctacacaattagcaagcgtaatttccggagtaatcggaggcggactagttggttttggtcaaatgattcaagacgaacatgaaggtcatggtgttagaatacgttttactggactcggatatgcagctgttccaactggggtttttccacaataa

SEQ ID NO: 721 - DNA, 342 bp, Bacillus licheniformis
atgaatgatgtaaagaaattagaagcttatcttaaattaaacgcagatggaactcttaccttagatccatcttatactaaactagatatttcacgttctgtcaccaacgaagttcaagactggattaaatacttgaacgatttagtgaaacaaaaagaagctgtcattaactccgattttagtgtgaaaattttagacaaagacggtagtgtattgacactggagaatggaaacaatcataaaatgaaagtagcgaaaaaaggctgcggtcgatctggtcatgatctctactggtggggatataatctttattttgactgtaatgaaacaagaaccatttaa

SEQ ID NO: 722 - DNA, 195 bp, Bacillus licheniformis
atggaatttaatttaacagttctgttctctgtatttaaaccgctgccctttttaaatagagcagaatcaggagagactattaacatagaaggaaaaattcattacataaatcatatccgtaaggtttttcatattgtggaaggagacaccaatttcattaaatttgaggatgctgtttttagagaaataaagtaa

SEQ ID NO: 723 - DNA, 210 bp, Bacillus licheniformis
atggtcaaaaaaattgtaaatggattcaattcattttcactactggggacaatcttttttatcggcagttattttacgtacaaatttaatggcgtggagctggtcgggttcctgtacttaggtattatttttttgacagctctgatcgcaaccaccgtaatgttaatcaggctaaaaagaaaaggaatcaataaagataaacaggcttaa

SEQ ID NO: 724 - DNA, 918 bp, Bacillus licheniformis
atgttgaaaatttggatgactggacttttactattagcgcagcccgcggggcattctgacagcttaacgatcactcagcaagggaagaaagtggccgttgtgaaccgcgaagattttacaatgccgcttcccggaacaccgatgattgatgataaaaaatacaacgaattcgttgacaggcttgaacggaaagtacacaaggatcctgtcaacgccgtgatcaacgatcagggaaggatcgttcccggcaaggttggctacagcctttcccggaaggggtttaaggagcagttttacgcgtatttttatggggatggcccgtccacaatagaagtgcctgaattgaatgtttacccgaaagttgacagcgaactgctttcccatatccggacacagcggatcggccagtatgtgacgtactttaattccgggaataaaagcaggacgcacaatatttctctcgcggcaaaggcaatcgacaatcatgttgtttttcctaatgagacgttttcatttaacaaagttgtcggaatgaggacgccggacaagggatatatgaaggctcccgtgattgtgagaggcgaattgtctgaaggagtgggcggaggcatttgccaggtttcgtcgacattgtttaatgctgttgaccgggcaggactcgaaatcgtccagcgctattcccacagccggcgtgtcccttatgttccgccggggcgcgacgcgacggtcagctggggcggacctgatttgcgctttcaaaacaaatataaccagccggtcttgatccgggcgaaacggcacgggggaacgatggttgtgacgctttattcttctgttgtggtcaatcatcagctgcgaaaagtcccgaaggctccggcccaaattccaaaagaagagcatcaaagcggggatcactaa

SEQ ID NO: 725 - DNA, 450 bp, Bacillus licheniformis
gtgacatggctttttgtaacctttttggtgatcttcagtctttttaaaatattggtcacttgccttccgagcggtgtcgtagagtggctgaccggcaaatttcaagttcatgtgaagcttgaggaatcgaatgttcaagtgacattcggcggaaaacgtttagagggatctgacaagagtcgatttattcaaaactttaatgaagcggtatttatggagcggtactacatatacccgggagatgagccgctgtatgtcaatccgaaaaacgccgggacaccgtttgtgatcgaaacaactaaaggaaaaaacgctgtgaagctgtttgtatacagatacgatgatcatatagacgtcgttaaacaatataagaaaaagacggccgcttattgtctgcgttctgacagtctgcaaacatgcggggggatgaaaacggcggatttgatttaa

SEQ ID NO: 726 - DNA, 93 bp, Bacillus licheniformis
atggacagccgtacagcacgtcaaaaagaaagaatcgctgcctggttatttttgatcggttacggcgctgtcaggctctatttcatatcataa

SEQ ID NO: 727 - DNA, 461 bp, Bacillus licheniformis
atgaccatacatattcaacagcttgaatcccctctgaatcgtgagtttgttgatgaactgatcaatttgtggaatgataatacgttggaaacggctgattgtgcattagatgatcaagatagagaaatgatacaccagcagctggaacaatatgttcaatccgcatacggagcggtttttgccgtcgtgaatgagaagcaagaagcggtcggatacgggctggcctctattaagaaagatttggtcagcgattgtctgagcgggcaaatcgatgaagtgtacatagccccggactatcgaagaaatagctggggaagcttgttgcagaccgtatgatggattggtttgaacaacatcaagtctctcacgttcaagtatcggtcgatatcgataatcaatcggcgctgcatttttgggaaggcatcggcttcagcagtgatttttatcttctgacaaattag

SEQ ID NO: 728 - DNA, 675 bp, Bacillus licheniformis
atgtgcggcaggtttacgctcttttctgaatttgatgagattattgaccgtttcgagattgatcaaatggcgattgaagattacagccccagttataacatcgcgccttcccagtatattctcgccgtcatcaacgacggttcgcataaccggctagggcggctgcggtggggattgattccgccgtggtcaaaggatgagaaaatcggttataaaatgatcaatgcgcgcgctgagactttggcggagaagccgagctttcgaaagccgctgatcagacaaaggtgcctcattccggcagacagtttttatgagtggaagcggaccgatgcaaggacaaagcggccgatgaggatcaagctcaaaacaaatcgactgttttcatttgctgggctttgggagaagtggcagcctgcaggcggcaagcccgtctatacatgcacaatcattacgacaacgcccaacgatttaatgaaagacattcatgagcgcatgcccgtcattcttgatcgccaggctgaaaaagaatggctgaatccgaagaatcaaaaccttgcatacttagaaagccttttaaaaccatatgcgtcaaaagagatggaagcgtatgaagtcgcgcctctcgtcaattcaccgcatcataattctcctgagctcatcaaaaaagccccttaa

SEQ ID NO: 729 - DNA, 231 bp, Bacillus licheniformis
atgctggtgttgatggtaaagtttattttgctctttattttatgttccatttcgttttctttatttaaagcatgtgtttacacagcgggtaaaaaactgattgaccggaccgcggaaggatcggcactcaactggacctgcagtgtattcatcaaaaacggcgtggccatgacgggcgatgactgctttatcatggctgtttcagcggccttgttggccatttatatataa

SEQ ID NO: 730 - DNA, 615 bp, Bacillus licheniformis
atgcctttacagctttatgaaaaagagcaaatactcgatgcctgtttggaggtttttgcccggcatggctttgcaaagacttcgaccggaatgctggcggaagcggccggcatttcaaaggcgctgatttttcatcattttaaaagcaaaaaagatctgtacttaactgtgctcgattattgtattgagaaggtaaagtcgcgcctttcccttgatgacctggcgtcttatgatgatttctttgaagcgaaagaaaaaataagcatggctaagcttgagtttttcgcggattatccaaatgtatacaagctcacaaaagatgccttttattcaccgccttccgaattaaaaaaagaaatcgctgcaaagtatggggagcaatttgccgttagaaatcgtattctaaaacagctttttgcgaaagttccgttgagggaaggagtggatcgtgaagaggcgttcgaacttatcatggtcatgatggggcattttgaacaaaagtttctagcggaagtaacggctgaggacgattttgatccagcctggagcagacgtcttcttgaagaacgaaaacggtttttggatatgattcgtttcggcattgaaggcgaataa

SEQ ID NO: 731 - DNA, 2622 bp, Bacillus licheniformis
atgggacactatgtattgggctttcatgagatcgatcgaaccgatttgccgcttgtcggaggaaaagggctgaacttgggcgaattgtcaaaaatggacggcatccaagtgcctcccggtttttgtataacaacaaaagcatatgaaaagatgatcggtgaaaacgataaggtcagtgaactgattgatcagctgtctcttttaaaagtgaaggacagagaacagattaacgatcttgcccttcagatccgcaatggtattgaaagggccgaaatcgccgaagagatcaaagaagcggttaaaagcgctcactcaaatgctggcggcgatgcatatgcggtccgatcaagcgctacggcagaagatttgcctcatgcctctttcgccgggcagcaagatacgtatttaaatataaaaggaatagaggcgatcttgaagcatatcagcaaatgctgggcttcactgtttacagagcgggccgtgatctaccggattcaaaacggttttgaccaccgcaaagttcaattatcggtcgtcgtccagcagatggtgttcccggatgcgtccggcattttgtttacggcagatcctattacatccaaccggaaggtcacctcgattgatgcaagctttgctttgggagaggcgcttgtatctggtacagtttcagcagacaactacaaggttcgtgaaggcgcgatcattcaaaaaacgatttccgagaaaaagacggcagtctattctttggaaagcggcggcactgaggcgcgcgaagtcgaagcgggctgccggaaagagcaaacattaacagatgaacagatcatccggcttgaaaaactgggaaggagaatcgaagcccatttcagttttccgcaggatattgaatggtgtctggctgatggcgaatttttctttgtccagagccggcctataacgacattgtttcctcttccgaaacagagcgatgacaagcttcgcgtctatatgtctgtcgggcatcagcaaatgatgacagaaccgatcaagccgcttggaatatcgtttttcgggttgatctcggattatgagctgacttgtgccggcggaaggctttttattgatttatcacacgatttggcatcttttgcagggcggaaagtcgtcctcagtacggcggggaaaaatgatcctttcatgcatagcgctcttgtgaattttttgaaaagaaaggagcttgtcaaaaccctgccgaaagggaagcggatgtttagattaggggctgaagggctgtcatggtcgctgccgggtgatgcgcttaagatttaccggaaaaacgacacaggtgtagtcaaacggctcatgtcgaaagcggaagcatccattcaagaggctgaacagcgattgaaaaacgcatcgggtgaaacgttatttgcacagatagaagaggatcaaaaaagcttgaaaaaagttctctatgattcagagagcatggctgtaattatggttggtttatatgccgtttactggctcaatcgaaaaatggagaaatggcttggcgaaaaaaatgtcgccgataccctttctcaatcggtattgtacaatgtcacatctgaaatgggattggcgcttttggatgtatcagatgctgccagaggataccccgaggttcagaagtatttagcatatgccaataatgaaaccttttttgaagatctcaaacagcttgacggcggtcccgcctttatcggcgcattgcgggcattccttgagaagtacggcatgcgctgcaccggtgagatcgatataaccaagacccgctggagcgaacgtccttccattcttgctccaatcattttaagcaacatcaagaattttgagcccggcgcgcgaacggctaagtttgaacaggggcgattggaagcggagaaaaaggagagggatttgttaagccgtctgcaacaactaaagggaggcagacaaaaggcaaaaaggacaaagaagatgatcagcgtgctgcggaattttatcggctatcgggaatatcccaaatatgctctgatcaaacgctatttcatatataaggaagcgttgatgaaagaagccgctgttttacagcaaaagaagctgatacaagcgaaggaggatatttattatttgtcctttgatgaattgaaagaagccgtgtgcacaaaccgtctcgatgtgaagaagatcgaggaaagaaaagcggaatatcggcattatgaaaaattgacgcctccgcgaatcatgacttcagaaggcgaggtcatcaccggagaagccttgggggatcacattccggcaggagcgttggcgggcgttcctgtttcatcggggatcatcgaaggaagggcaagagtgattctgaaattggaggaagccgatatcgaagagggggatatccttgtcacgccttttacagatccgagctggacaccgttatttgtctcaatcaaaggtttggtgactgaagtgggcggcctcatgacacacggcgctgttattgcgcgggaatacgggcttccggcggtggtgggggttgagcatgcgacgaaagaaattaaagacggacagaagatcaggattaacggatcggaaggatatgttgaaatactcgaatga

SEQ ID NO: 732 - DNA, 279 bp, Bacillus licheniformis
atgaacctgttttggatcggacttggtttagcggctttaggctattttatcggtgacggcttgaaaaactttaaaaacccaaagggaatttattcaggctatccctatttaatcaaagaagacgatttacattattatttaggcttgagcaaagtagaaacgaaagaaatgctgcgtaaatatcctgacatacctaaaattgaattaaatggcacgacctattatccgtatcagcaattgatggattggatgttgtccgccgacctttataaaaattaa

SEQ ID NO: 733 - DNA, 363 bp, Bacillus licheniformis
atgccgtttattctccagcgcatttatcaagaaaaccagcaaacagaaggacgccgcattttaatcgatcgtgtgtggccgcgcggcatatcaaaagaaaaagcgaaccccgactgctggatgaaagaaatcgctccaagccccgaattaagaaaatggttcggtcatgatccgaaaaaattcgaatcgtttaaagaagcctatcaaaacgaaattaaacaaaacgctgaaaaacagaaaagcttcagggaattaaaaaaaatggcggcggacgaaaccgttattctgctttacggggccaaagatgagcgccataaccatgccgtcgttctttatgagatgctgaaccggcaaagcctttga

SEQ ID NO: 734 - DNA, 126 bp, Bacillus licheniformis
atgcggatcactccttctcattttatgataaaacggcaggctggaaggaacaaccctattgaaaaagacaatgccaacattccgtttattcgatggaatgttttaaagaactgtacaattggctga

SEQ ID NO: 735 - DNA, 765 bp, Bacillus licheniformis
atggaactgtcgggaaacacagtgctgatcacaggcggcgcatcgggaatcggctttgcttttgccgaacgatttataaaagcgggaaataccgttatcgtctgcgggagaagggaaagcaagcttaaagaagcaaaggaaaaacatccggagctgatcacgcgtgtatgcgatgtggccgttgaaacggaacgactggcattatttgaatggatcaaagaacatcatccgggagtaaacgtacttgtgaataatgcgggcatacagcagcgctaccacattttaaaagccgatgttatagacaattgggctgactacaataaagaaatcaccgtcaatatggaggcgcctatccatctggccatgctctttagccgatactttgccgaaaaagccgggaaaactgcgatcatcaatgtgtcatcagggctggcgtttacaccgatggcggtcgcaccaatctactcatcgacaaaagccgctctccactcctttacgatgagtttaagacaccagctttccgaggccggcgttgaggtcatagaagtcgctcctcctgcggtcaatacggatctgggcggtgtcggactgcatgattccggagctcctttggatgaatttgccgatgcgatctttaaagggctggaagaaggccggttggaaatcggctatgccgtatcggaaaaagccttgcggatgtcaagagatgaaatcgatgaaagcgtcagccaattgtacagttctttaaaacattccatcgaataa

SEQ ID NO: 736 - DNA, 1473 bp, Bacillus licheniformis
atgtatgatacaactgtcgaaacacgcttcggaaagctgaaaggcagagcggaaaacggagtccgtatctttaaaggcgttccatacgcaaaacctcccgtcggcgacctaaggtttcgggaaccgcagcgaatggaggcctgggaaggtgagctggatgcttttcaatttggcccggtttgtccgcagcctgatggggtattgcctgagtcagcgggggttcaaaagtctgaggattgcctttatttaaatgtgtacgcacccgaagaggcggacggggatctgcctgttatggtgtggattcatgggggcgctttttatctcggcgccggaagtgaaccgctctatgacgggactcagcttgcaaagcagggaaaggtgatcgtggtcaccatcaattatcgcctcggtccgttcggttttttgcatctatcctcaattgatgattcctacagcagcaatcttggcctgctggatcaaatcgcggctctcgagtgggtgaaagacaatatcgctttctttggcggagaccgtcatcacattacggtttttggagagtcggcgggatcgatgagcatcgcttcgcttttggcgatgccgaaagcaaaggggctttttcaacaggccattatggaaagcggggcttccgcaactatgtccgataagcttgcgaaagctgcagcagaaagattcttaaggattctcgatattgatcatcatcatctggagcgccttcatgatgtatctgatcaagaacttcttgaagccgccgatcagctgcgcactttaatgggagaaaatatttttgaattgatttttctgcctgcgcttgacgaaaaaaccttgccgctgaagccggaggtcgccgtcgcaaaaggcgcggcaaaagagatcaatctattaatcggaacaaaccgtgatgaaggcgtcttgttttttccctctgattcggatcttttgcctgagagcaagatcaacgagattttagaagaatacatgggtaaagaggccgccgaagccgcctcctctctgtatccgaggtcattggaaggccatgttgatatgatgacagatctgatcttttggcatccgtctgttgtgttcgcttcggctcaatcacgatatgcatctgtctttatgtaccggtttgactggcatgcggattcagagcagccgccgttcaacaaagctgcgcacggcttagagattccgtttgtatttggaaatatggacattttggaacagctgacaggtacgaaggccggtgaagaagcgcagctgcttgctgaacagatccaggctgcctgggtgtcttttgcccgatccggaaatccgagcaccgatgatgtcagctggcctgattatgatgaagattcacggaaaacgctgatttttgatcaagaggtcgcagttgaaagcgatccttattcagataagagaaagatgttgacagccccgaacccgcagatttag

SEQ ID NO: 737 - DNA, 1278 bp, Bacillus licheniformis
atgccagggagaaaaaaaggcagtttgaagtcgacgattacggtcgccatgtccaactatttggaggcgggatccatcgtcgcgggggccggcgggctttcgttatgggttgaatatttaggattggacgacgcccgggtcggacttctcggcgccttaagcgcaaatggtttcggcgcggcgatcggcgcttttctcggcggttttttagtcgaccgttacgggagaaaattcatatataaatacgatctattagtctatatgcttggcgttttactgatcgccgcgtcgtttaattttcccatgcttttaaccggatacatcgtgacgggaattgcggtgggcgcagcaattccggctgcttggacttacattgccgaggaggcccctgaccatgaacgggccggacgcgtcggctgggggcagctggcatggtcggtcggaccggcgcttacgctgctgttatcagttgccttggcgccgctcggtttaatgggaagccggttgatttttgcccaattattcgtcgtcgcagtcatcacctggattttgcagcagcagattcacgaatcgtccatctgggaggagcaaaagcgaaaagaagccgaagacaaagcaaaaggagttgaagaaaaggcgtcgatcaaagagctgttgaccaacaaagcgaaccttcgcgcgatgattctcctcatcggaatttatgcgttttggaaccttgttgccgggacgatgggatatttcatgccgtatatctatgagacggtcggcggcctaacagcggcacaagccaacctgctgcaggcatttttatggattttgactgtggcgtccacatacttcgtctttatccgtctcggcgataaagtcaatcggaagttgctttttggcataggagcagctatggcaaccgccgcatgggtcatcctcaccttcggcacgatgaacatcacggagcttttattattcgtatgcctgtggggcatttctgcgggttttggagcgcaggcgttttacggactgtgggcggcagagctgtttcatacgaaatacagggcgctcgctcaaggcttcatgttcttcatcgtccgcatcggcgtcggactcatctcattggtcgttccggcgatgattacgggcttgggcttcaaaacagccggcgccgtcatgattgcatttctcgtcattcatatgatcatcgggctccgtatggcgccggaaacgcgcggcaaatcgcttgaagccattcaaagcgaacgctatcatcaaagcggctga

SEQ ID NO: 738 - DNA, 681 bp, Bacillus licheniformis
atgagtatattaagcaggttcaaagacattatggccagcaatattaacgctttgctggataaagcggagaacacggaaaaaatggtggatcagtatgtcaggaacttaaacagcgacttaaacaaagtaaaggcggaaacggcgtccgtcatggcggccgagcaaagggcaaaaagagaactggcggattgccgggcggaaatcgacaagcttgagcgctatgcaatgaaggctttggaagccggcagcgaggcggatgcccgaacatttttagaaaagaaagcggtgcttgaaacgaaggcatccgagttagaaaccgcgtttcaaacggcgtcatccaatgcgaatcaaatgaaaaaaatgcacgataagctcgtttccgatatcggggagcttgaagcacgccgcgccgcgatcaaagcgaaatggacagcggcgaaaacacaggaaagaatgaataaactcggtgcatctgcagcgaatgccaaccattcaatgtccgctttcggcagaatggaagaaaaggcaaaccgggcgcttgatgaagcgaatgcgatggctgaattgaacgccgctcctcaagatgacatagaagacctgaaggctaaatatgacagcccttctaatgtggatgatgcgcttgccgcattgaaagcgaaaatggcgggtcaaaagtcatag

SEQ ID NO: 739 - DNA, 1026 bp, Bacillus licheniformis
atggtaatttcttataaatgtccgggctgcggggatgacatggcctttgacgctgaatcgggcacgctcgcctgccgcagctgcgggagacaggacaagattgaaaacattccggaagaattgaaaactgcgagatttactgaagatgaagcaacagaatatcattgccaaaactgcggcgctattttgatcactgagaaagaaacgacggctacatcctgcagcttttgcggaggagcggcagtgatcgccgaccgcctgtccggaagccttgctccggcaaaggtcattccttttacgatcagcaaagaggaggcggcggacgcgtttcgcaagtggtgcagaaaagggctgctcacaccaaagggctttatgtcggctgaccggattaaaagcattacaggcatgtacgtccctttctggatgtacgatttaaacagcaaagtgcaggtcagcgcccgctgcacaaaggtacataggtatatacagggcgactatatctacacggagaccgaacattatgatgcgtttcgcgatatcaatctcgactacatcaaagtcccggtggatgcctcagaaaagatgaacgatcaattgatggacaaattggagccatatccatatgatcagctgaaagattttaaaacggcctatttggcaggctacatcgctgaaaaatataattacgatgatgaagagctttttccgcgggcgaaaagcaaaatcagcggctacatcgagtcatatatcgattccaccctgtccgggtacagctcagtcgatgtgaaaacgaaacacgtcgatacacaaaaagtgaaaagcttgtatgtgcttttgcccgtctggatggtcaattacaactacaaacaaaaggattacatctttgccatgaacggacaaacgggaaaagtcgtcggcaagccgccgatcagctcatttaaagaaaaaatgtggttcagcgggctggccgtctccatatttgcactctggaaaatcattgctgctgtaatgggaggcggggcgtga

SEQ ID NO: 740 - DNA, 768 bp, Bacillus licheniformis
atgagaagtttattgagaagcgcgatgatcttatgtatgattttccttgtcttcatccctatagcctccggtgcggcagcctctgaacagaagcggtttgtttatgatgaagccgggcttctgaccaaacaggaaatcgagaagctggaaacgctggcagccaaattgggcgccgaacgggagaccgactttatcattgtgacgaccaatgatacaaacggccgcgatgtaaagaaatatgcggaggacttctatgacgaaaaagcgcccggctaccagaagaagcacggaaatgcagccgtattaacggtagatatggagcatagagaagtctatcttgccggctttaaaaaggctgaagaatatttgaatgacgccaggctggacaaaattagagaaaaaatcacgccggatatatcccacaagcattatgaggccgcattcgaaatgtttatgaaggcggcgcatgatgatatggagaagaaaccgtgggcggacagcatcttttttaagacgtggtttcaattgcttgtttcggcagtcatcgcgggaattgccgtcgccattatgaaatacaattcaggcggcaaagtgacagtaagtgcaagcacttatatgaacggtgatacgtccggagtgatcagaaataatgacgaatacatcagaacgaccgtcacaaaacagagaaaaccgtccaataataaaagctcaggcggcggaacgacgagcggaggccattcgcacagcggcagccggggaagcttttag

SEQ ID NO: 741 - DNA, 975 bp, Bacillus licheniformis
atggtgttttttagaaatcaatttgcaaatgtagtagagtgggatgaatttcgcgatgatatgattttctataaatggaacaaccgcgaaatcaaaaaggggagccggctgatcattcgccccggtcaggatgccgtctttttaaacaacggaaaaattgaaggcattttccaggatgagggcgactatgatattgaatccgaaattattccttttttatccactttaaaaggttttaaatttggctttaacagcgggatgcgcgccgaagtcctgtttgtcaacacgaaggaatttaccgtcaagtgggggacgaagaatgccatcaatatcccggctgcaggacttccgggcggcatgccgatcagggcgaacggaacatttaactttaaggtgaatgattatgtcgcattaatcgataaaattgccggtgtgaaagatcagtatgttgtggaagatatcaaaatacggatcacatccattctcgatcagcttctgatgaagtggatcacaaaagaaggaaaagatatgttcaaccttcaagccaacgcctttgatatcgcaaagggaatcaaggaagatcttgatatggagattgtcggcgacggcatgacgataacaggctttaacatcatgagtttcaattatccgaaagaagtccaggacatgatcacgaaaaacgcttcccacggcatggtcggcgatctgaacagatatcagcagatttcaatgacagacggcatggcttcaggaaagatgacaggcggcggtgccgcatctgacatggccggcatgatgatggggatgaacgtggcgaaccaaatgatgaatcagatgaaccaaaatcagcaggcgcaaacacagacgccaccaagcgcgccgcagccagcggcaaaaccgaacttctgtccaaactgcggaacgaaaacgggcgaagccaatttctgtccgaactgcggtcagaagctagtgtaa

SEQ ID NO: 742 - DNA, 1056 bp, Bacillus licheniformis
atggaattaggcatcagcacctttgtagaaacgacccctgatatcaaaaccggaaaagtcatcagccatgcggagcggctgcgcgaagtagtggaggagatcgtccttgccgatcaggtgggcttggatgtattcggagttggagagcatcatcgtcaagattacgcagcttcttctcctgccgtcgtcctggccgcagcagcttcacagacgaagcgcatcagattaacgagcgcggtcaccgtgctgtcgtcggctgatcccgtccgtgtttttcaggattttgcgacgctcgacgggatttcaaacggcagggcggaaatcatggcgggcagggggtctttcatcgaatcctttccgctgtttggatatgatttagacgattatgatgagctctttgaagaaaagcttgatttgctgctcgaactgcaaaagtcggaaagggtcacatggagcggcaagcatcgcccggctattcacaatacaggcgtttacccgcgtcccgtgcagaagccgctgcctgtatggatcggaagcggcggaaaccaggaatccgtcgttcgcgccggcctgctcggcctgccgctggttctcgcgatcatcggcgggagtccgcagcactttgccccgcttgttgagctttattacaaagcagcggaacatgcagggcatgacgcctcaaagctgattgtcgcttcccattcccacggctttatcgcggaggataccgagacggccgccgatcgttttttcccttccacccagcaggccatgaatacgctcgcaagagagcggggctgggggccgtacagccggtcgagcttcgatgcagccagaagctttgaaggggcgctctatgtaggcgatcctgagacggtggcggaaaaaattattcatctgcgcaagaatgtcgggatcacccgatttttgcttcacgttccggtcggttcgatgccgcacgaagatgtcatgaaggcgattgaactttttggaacaaaaacggcgccgctcgtcagggaagaagtatcccgctgggaggcatccgaaaggtcataa

SEQ ID NO: 743 - DNA, 828 bp, Bacillus licheniformis
atgaaggaaaacatattagacgtactgaaaaacctgaatttcaccgagtatgaatcgaaagcatacttggcgctcttggaagaatcgccgctgacaggctatgcggtggcaaaaaaatcgggtgttccccggtcgaaaatatacgaagtgctggagagccttgtaatccgcggcgatatatttgtcagctacggcaacacaccgcagtacattcccgttcccgccaaggacctgattaaaaaccggcggatgaaagcggaagagacttttgaacaggcagaaaaatatttcgagaagtttgagcgcactgcaaatgaccgggaaaatatttggaacatcaccgggcgaagcgagattctcgataaagtaaaggcgtgcatatcatcggccggaaaaaggattctcctggaaatttggaaagaggattttcctgaattggagcctgagctcaagcgggccgcaaaaaaaggcgtcattgtgaccattattgcatacggcgacattgaagcggatttcgccaatgtctatctacatgacaacagcaggcaaattacagaagagtatgacggacgctggctcgtattcagcgtcgacgattcagaagttgtggccggcattgtctcgcatgggaaagacagccgcgcagcctggacgatgcatgtaggcttggtgatgccgattaccgaagtgatgattcatgatttgtacctgatggaaatcatggagaagcacagagaggtattggaggaaagtttcggcgaaaacctgatccatttgcgccgcaaattttcgatacatccggattttaaaaagcattatatgaaataa

SEQ ID NO: 744 - DNA, 633 bp, Bacillus licheniformis
atggatagcctgctgtcatacatatcgattgcagccatgatggtggtgatacccggagccgatacgatgcttgtggtgaaaaacacgcttcgatacggtccgaacgccgggcgctgcaatgttctcggcttggcgacggggctttctttctggacgctgattgccgttctcggcttagcggtggtgattgcgaaatcggtgattctgttcaatacgatcaaatacttgggggcggcctatttaatatatttaggcattaaaagctttttcgcgaaaaaaatgttttctttggaagagatacaagccgagaagaacaaaaacgaaaacgcatcaagccggcattataaggattcttttatgcaaggattgttcagcaacattctgaatccgaaaactgttttggtctatatcacgattatgcctcaatttattaacttaagagaaagcgtcaaccagcagttgatcatcctcgctttaatccttacttttcttgctgtgttttggttcctcatcctcgtatatttgatcgatttcgcaaagaaatggctgagaagcgtgaaattccagaagatctttcaaaaagctgcgggtctggtgcttgtcggatttggcgttaaaacgggtttagattga

SEQ ID NO: 745 - DNA, 645 bp, Bacillus licheniformis
gtggatgaacaaaagaaaaatcagctgggagtgctgctgaaagagcagttgcgaaaacgatcattatctttaagagaattgagcgaacgcactcaaatcgataaagcgaccatctcaagaatcatcaatggcaaaagaaaagcaaacctgaaccatttgcaaaggttttcagaaagcttcggcgtttcttttgatgagctgatgacagcggccggctatgcgatggagaagacgcaggaaagcgaacgtccggatattcactcgtcagttgccgaaattgaagatgttttgcaaacctcaaatgtctatgatcggccatttaccatggaagaactgaaaaacaaattgaatgagtgcgaacaatattctcagacggaggaaggaaagcgtaccattctggctgagtttgaatctaaaatcgagaaagttgccggcattggtccttttctgacccgtctgcacgacatgtacagcagatttacctcggggcgggggacgccgcgtgaattgctgctgatgggcggcgctttgctgtatttcatcgtttctgttgatgtcataccggattatatttttccgatcggctatatcgatgatgcggcagcggttcatttcgttttcaaccagctgtcatataaatcatga

SEQ ID NO: 746 - DNA, 1158 bp, Bacillus licheniformis
atgaaaagaaagcatatcaacattgacatcagtctgctgctcattctattttgtttgtttatcatcagcctgctggccgtttacagcgggtcgggccagtatgaaacacaggaccctttttattttgccaaacggcaggtcttttggtatcttgtcgggtttggcgtcatggcgggaacggcctacatcgactatgagctgcttgaacgattggcgcttcgtttatttgtgggagccgtttttcttctgattctcgttcatttttttggaacttacaaaaacggttcgcaaaggtggatcagcttcggggtcatcgaaatccagccttcagaatttatgaagatcattttgattcttctgctggcttcgatactcaatcaatttcagcataaaaggttctccttcgccgagagcatcattccgacgggaaaaatcatgatgtacacggtgattccgtttttctttatattggttcagccagatttagggtccgcattggtgattttatcgatcgcattcacgttgatgctggtctcggggatttcgggcaggatgatcgtgtccctgtcacttggattcatggcattggttgcctttttgacgtatttgcacaatcattactttgagatattttcaaagattattaagcctcaccagcttgaccggatatatggctggctcagtcctcatgaacatgcctctacatatggataccagctgacgcaggcgttattggggatcggatcaggccagctgtcagggagcggctttactcaaggaatccaagttcagggagggaaaattccggaggctcatactgattttattttcgccgtgattggtgaggaattcggttttttgggtgccgtaacattagtctgtctgtattttctgatgatctacagaatcatcaggattgcgctttcgtccaacagtctgttcggtctttatatatgtgcgggggttgcagggttgattgtattccaagtgttccaaaatatcgggatgacgatcgggttaatgccgatcacggggctcgctcttccgtttatcagctatggcggcagcgcgctgttgaccaacatgatcgctttaggtctcgttttcagtgtgaatatcagatctaaacattacatgtttgggaatgattggggatga

SEQ ID NO: 747 - DNA, 1134 bp, Bacillus licheniformis
atgattctttcccatctaaagaaacttgattatgtattgattgccgcggttctgtttttatctgcgtttggcttgctgatggtatacagcgccggctaccccctcggatatatgaagtatcatgatggcagctatttttttatgaagcagctgcaatggctgctcatcggtttggcctttttttcggctgccgccattttcccatacaaagcttacagcaaactcattcggtttttggtgaagctttcttttttaatgctgattctcgttttgctgccgggaatcgggatggagaaaaacaattcccaaaggtggattcaattcggttcgctcatgattcagccgtctgaggctgtgaagcttgtgatggttatttatttcgcctatgtgtatgcaaaaaagcagaaatacatcgccgatttcggaaagggcgtcatgccgccgctgctgattttggcggctgtgttttttttgattttaaaacagcctgacttgggcaccgccgtttccatcctgttaagctgcggagcggttctgttgtgcgccggcctcagaatgcggcacttgctgcttctcggaacaatggcaggggctggcatcgcatattttgcaataacagcgccgtaccggttaaaaaggctgacatcgttcagcgatccttttcaaaatgaaaacggagacggctaccagttgatcaattcctaccttgccattgattcgggcgggttatgggggaatggattggggaacagcgttcaaaagctgggatttcttcccgaagcccatacggactttatcatggcggtcatcactgaagaactcggcggtatcgggctggcggtgatcatctgggcttacctgttgatcatgttcagaggggttcggatcgctgtgaaaatcgatgatccgtttggaaagctgctggcggtcggccttactttccagatcatgattcaagcgttatttaacctgggcgctgttttcggccttcttcccattaccggaattcctcttccgtttgtcagctacggaggttcttcgttattgttcatgctgacgacagccgggatattggtcaacctctcatcacatgttaagcggggagttaaaaaagatgtggcctttcttttgtag

SEQ ID NO: 748 - DNA, 171 bp, Bacillus licheniformis
ttgccgcatcttccggtcttttttagtttatgcattcatataaagagattattctgtttcatacaccttgaatatatcatgatttcctttatttatcaatatgaacgcatttatatgtataaacacgtcccggtcaaattcgatatgagaagacaagatcaacaatcgtaa

SEQ ID NO: 749 - DNA, 426 bp, Bacillus licheniformis
atgaaaacgcgattcacaccttatatcctgatgaatggaagagcaaaggaagcgattgattattaccgtgatgtactcgatgccgaagtaaagttcagtcagacgattggtgaaggccccgcagatgaggcagcgaactttaaggaagacgaattggatttcatcgcacatgccgttttgacaatcggcgacgctgtcctgatgatcgccgacattattcctgaactgcctttccaaagcggaaaccaattgtccatttgcgtaacggcagccgatgtttcttcggccaagcggcttttcggcaagctgagcgagcggggcgaggtcaagcttgagctgaaggaaacttatttcagtcccgcatacggcattgtcactgatccgttcggcgttgccttccaaatttttgccgcgcgtcccgcataa

SEQ ID NO: 750 - DNA, 948 bp, Bacillus licheniformis
atgtctaaagcgaaacgattgaatgaaatgatcatgatggtaaaccggaaaaaacgatttacggtcggggagctggcgcgggaattcggggtttcaaagagaacggttttaagggatttgcaagagctcagcgaaatgggggtgcccctctattctgaaaccggcccccacggaggatatcaggtgttaaatgaaaggattcttcctcccatcgccttcagcgagaacgaagcgatctcaatcttctttgcgatcgatgcactgaagcattatatatccctgccgtttgatgcccagtacgcatccatcaaaaagaaattttatttaaacctttcaggagatatccgggatgcgattgacagtatgaaggaccgcgttgctttttatacgccttatgagcaaacagacgacattccggttttaaaggtgctgcttgaggcagcggttcagcaaaaggtgttgatcatcgagtatgaagcaaatggcgcatcaagcaagaggagcattcagccgatcggaatctatgccaatcaagggaagtggtattgcccggcttactgttttttaagaaaggattaccgcatattcaggtgcgaccggatcaagcgggccgagcttgatgaacataaggcaccgattgatttgtccggcctcaatttaaagaaccgtttttcggctttgtcccggccaagggagacattggaattatccgccgagctgacaaaaaagggagtagagcggcacggttcactcaaatggccgcaccttgaactgcatgtaagagaagatgggtccggcgtgctgaaaggcgaaatcgcgccgaaggatatcgatttttttgcggattatttcatttcgttcggccgggaagcggttattcagaagccttccaaattaattgaaaggatgaaacggacattatccgacatgctgaaacaatacggctga

SEQ ID NO: 751 - DNA, 234 bp, Bacillus licheniformis
atgaagactccggtataccgcagcctgcgtttttctgcatttaaagttccgcaaaaaacgcgtgaagacgcatgtcttcttcatcctccagttaaagacactctcaggaatcgagagtgtcttatttttgccgtcagaagaaatttttacccaaaaaagttgacggcagatttaaaagtgagtatcattacaaatatgatattaatattacatttttgttacaaaagaaaatga

SEQ ID NO: 752 - DNA, 678 bp, Bacillus licheniformis
atgaaaaaagcgatggctattttaggattccttgtactcacagcatcgctgctatttatcatcaataaaggaacatctcaaataaacgcttcacaaaatagaaaagccgcggttcacacggagtattacaaagacatcagttcgctttcttttccggtattcagcgatttgaaggaagaggatgccaagctggccaacgatgcggtaaaacttcatttaaaaaattcctataaagaatttcaaaaaatcgttaatgatgccgaaaagaaggataaggatgaagaaaacgtttatgaaacgtcctacaaagtcaaatacaacgaggaaggcaaactgagctttttaatctatgactatcagttctccggcggtgcgcacggcatgtacaccgtaacatcctacaactttgactttgacaagcataaacaagtcgtgctgactgacgtattaaacaatcaggcgaaaatcgaaaaggcaaaaaactatattttcagctatatcaacgaacatccggaacagttttattctgatcttaaaaagagcgatatccgtttggatgaacatacggcattctattatacaagcagcggaatttcaattgtatttcagcagtatgatatcgccccgtatgcagccggaaaccaggaaataaagcttccgtcgacgcttttatattag

SEQ ID NO: 753 - DNA, 1380 bp, Bacillus licheniformis
atgtctggcaaaccatcatttcgatgggttaaaatgttgatttttttaacgatattaataggtttggcagggtactcttacaataaagtgtcaagcaacagccaagagccccctcagccaaaaaaagaccgcggacaatccggcctcggcgtcgaatccatggtcaatgacagcaaacaagagaggtatgccatccattatccggtgtttcacataaaagaaatcgatgaacaaataaaagattatgtgaatcaagaattggccggttttaaagaggataacgcaaaggcccaggctcaggatgaagacgggccttttgaactgaacattaaatataaggttgtctattatacaaaggatacggccagtgttgtgctgaatcaatacatagaggccggcggcgtatcgggtacaacatctgtcaagacgtttaacgctgatttaaagcagaaaaagctgctgtcccttcaagatctgtttgaagagaattcagattttctgaacaggatttcaagcattgcctatcaggaattgaaaaatcggaatccgtctgctgacatggctttattaaaagaagggacgagccctcaggaagaacatttcagccgcttcgcgcttcttgaaaacgaggtggaattttattttgagaaaaaacaaaccggtcttgaacagtctgtaaaaataaaaaaagaatgggtaaaagatattttaaaagaccgatatcaggatatgaaaaagaatcgtcttcaggccaaacctgatcaggagcctgttccgcttccgaagcaagcgaaaattaatcccgatgaaaaagtgattgccctcacatttgatgacggtccgaatcccgctacaacgaataaaatattaaacgctttacagaagcatgaagggcatgcgaccttctttgtgcttggaagcagagcgcaatattatcccgaaacgataaaacggatgctgaaggaaggaaacgaagtcggcaaccattcctgggaccatccgttattgacaaggctgtcaaacgaaaaagcgtatcaggagattaacgacacgcaagaaatgatcgaaaaaatcagcggacacctgcctgtacacttgcgtcctccatacggcgggatcaatgattccgtccgctcgctttccaatctgaaggtttcattgtgggatgttgatccggaagattggaagtacaaaaataagcaaaagattgtcaatcatgtcatgagccatgcgggagacggaaaaatcgtcttaatgcacgatatttatgcaacgtccgcagatgctgctgaagagattattaaaaagctgaaagcaaaaggctatcaattggtaactgtatctcagcttgaagaagtgaagaagcagagaggctattga

SEQ ID NO: 754 - DNA, 1539 bp, Bacillus licheniformis
atgaaacaacaaaaacggctttacgcccgattgctgacgctgttatttgcgctcatcttcttgctgcctcattctgcagcagcggcggcaaatcttaatgggacgctgatgcagtattttgaatggtacatgcccaatgacggccaacattggaggcgtttgcaaaacgactcggcatatttggctgaacacggtattactgccgtctggattcccccggcatataagggaacgagccaagcggatgtgggctacggtgcttacgacctttatgatttaggggagtttcatcaaaaagggacggttcggacaaagtacggcacaaaaggagagctgcaatctgcgatcaaaagtcttcattcccgcgacattaacgtttacggggatgtggtcatcaaccacaaaggcggcgctgatgcgaccgaagatgtaaccgcggttgaagtcgatcccgctgaccgcaaccgcgtaatttcaggagaacacctaattaaagcctggacacattttcattttccggggcgcggcagcacatacagcgattttaaatggcattggtaccattttgacggaaccgattgggacgagtcccgaaagctgaaccgcatctataagtttcaaggaaaggcttgggattgggaagtttccaatgaaaacggcaactatgattatttgatgtatgccgacatcgattatgaccatcctgatgtcgcagcagaaattaagagatggggcacttggtatgccaatgaactgcaattggacggtttccgtcttgatgctgtcaaacacattaaattttcttttttgcgggattgggttaatcatgtcagggaaaaaacggggaaggaaatgtttacggtagctgaatattggcagaatgacttgggcgcgctggaaaactatttgaacaaaacaaattttaatcattcagtgtttgacgtgccgcttcattatcagttccatgctgcatcgacacagggaggcggctatgatatgaggaaattgctgaacggtacggtcgtttccaagcatccgttgaaatcggttacatttgtcgataaccatgatacacagccggggcaatcgcttgagtcgactgtccaaacatggtttaagccgcttgcttacgcttttattctcacaagggaatctggataccctcaggttttctacggggatatgtacgggacgaaaggagactcccagcgcgaaattcctgccttgaaacacaaaattgaaccgatcttaaaagcgagaaaacagtatgcgtacggagcacagcatgattatttcgaccaccatgacattgtcggctggacaagggaaggcgacagctcggttgcaaattcaggtttggcggcattaataacagacggacccggtggggcaaagcgaatgtatgtcggccggcaaaacgccggtgagacatggcatgacattaccggaaaccgttcggagccggttgtcatcaattcggaaggctggggagagtttcacgtaaacggcgggtcggtttcaatttatgttcaaagatag

SEQ ID NO: 755 - DNA, 951 bp, Bacillus licheniformis
atggcaacgttatctgatgtagcaaagaaagcaaatgtgtcgaaaatgacggtatcgcgggtgatcaatcatcctgagactgtgacggatgaattgaaaaagcttgttcattccgcaatgaaggagctcaattatataccgaactatgcagcaagagcgctcgttcaaaacagaacacaggtcgtcaagctgctcatactggaagaaatggatacaacagaaccttattatatgaatctgttaacgggaatcagccgcgagctggaccgtcatcattatgctttgcagcttgtcacaaggaaatctctcaatatcggccagtgcgacggcattattgcgacggggttgagaaaagccgattttgaagggctcatcaaggtttttgaaaagcctgtcgttgtattcgggcaaaatgaaatgggctacgattttattgatgttaacaatgaaaaaggaacctatatggcaacacgtcacgtcattggtctgggcgtccgcaatgtcgtcttttttgggatcgatttggatgagccctttgaacggtcaagggaaaaaggctaccttcaggcgatggaaggcagtctgaaaaaagcagcgattttccggatggaaaacagttcaaaaaaaagtgaagcacgcgcgcgggaagtgcttgcatcctttgacgcacctgcagcggttgtttgcgcttcggaccgaatcgcgctcggggttatccgcgcggtgcaatcgcttggtaaaagaattccggaagatgtcgcggtcaccggctatgacggggtgtttctcgaccggatcgcttcgcctcgcctgacaaccgtcagacagcctgttgttgaaatgggagaggcttgcgcgagaatcctgctgaaaaaaatcaatgaagacggagcgccgcaaggcaatcaattttttgagccggagcttattgtccgcgaatcgactttgtag

SEQ ID NO: 756 - DNA, 1761 bp, Bacillus licheniformis
atggaatatgcagcgatacatcatcagcctttcagctctgatgcctattcttacaatggacggacattgcacatcaagatccgtacaaaaaaggatgatgccgaacacgtccgcttggtttggggcgatccttacgaatacaccggcggcacatggaaagcgaacgagcttgcgatggcgaaaattgccgcaacaagcacccatgattactggtttgccgaagtggcgcctccattcaggcgtctgcaatacggatttatcctgacaggcgctgatgatcgagacactttttacggaagcaatggtgcatgtccgtttgccgggaaagcggcggatataggcaaacactgttttaaatttccgtttgttcatgaggcagacacgtttgatgcacctgactgggtcaaatcaaccgtctggtatcaaatttttccggagcgctttgccagcgggcgggaagatttgtctccggaaaacgctttgccatggggaagcaaagatcctgaggcgcacgattttttcggaggggatttgcaggggatcatggacaagctggactatttggaagacttgggggtaggcggaatctatttgacgccgatctttgccgcgccttccaaccataaatacgacacattggactattgctccatcgatccgcattttggcgatgaggagctctttcgcacgctggtcagccggattcacgagcggggaatgaaaatcatgcttgatgctgtttttaaccacattggcagcgcttcgcaagagtggcaggatgttgtcaaaaacggtgaaacgtcccgctataaagactggttccatattcattctttccctgttaaagaaggcagctatgatacatttgcgtttactcccgagatgccgaagctcaatacggccaacccggaagttcaggcttatttgcttgatattgcgctgtactggatccgcgaatttgatatcgacggctggcgtttggatgtggcaaatgaagttgatcatgcgttttggaagaaattccggcaagccgtcacggcagaaaagcccgacatttttatattgggcgaaatctggcatcaggctgatccgtggcttagaggagacgaatttcattcggtcatgaactacccgttcacagaaccgatgattgactattttgcagacggatcgatttcagcttcgcaaatggccagccgcatcaattcgcatttaatgagcgggatgaagcaggtcaatgaggtgatgtttaatttgctggacagtcatgacacgaagcggattttgacaagatgcggaggagatgacaaaaaggtgcgctctcttttggcattcatgtttgctcagacaggctcgccgtgcatttattacggaacggaagtcgggcttgacggcggcgatgatccattgtgccggaagtgcatggtttgggaagaggaaaaacagaatcaagagatgctcgcatttatgaaacggctgatcgctttgcgaaaacaagagaatgatgtattgacttatggcgcgcttgagtggaagctggttgatgaccaaaacgattttgtcagtttttctcgaacgcatgaaggaaaagagctgatctacttcttccaccagggcagcgaggtgcgccgtgtcagattgcgggatttgaagattgcaagcgataaaagaatatacgatgcgtggacggaagaagcgcttcagcatgatgatgtggtcgacattcagccaggcggatttttcattttgggggcggtctaa

SEQ ID NO: 757 - DNA, 1254 bp, Bacillus licheniformis
atgcaacatttaaaaaaaggaattttagtgctgctggcgtcagttctgctgttcggtcttgccgcctgttcaagttcaaaggaaacgggaggcagcggcgggaaaaaagtgctgaccgtgtctgtagaagaggtctataaaccttacgtcgaaagcataaaggaaggttttgaaaaagagaatgatgtgacagtcaaaatcgttgaaaagccgatgttcgaccagcttgaagcgcttccgcttgacggtccggcaggcaatgcgcccgatgtcatgcttgcggcatacgaccgtatcggcggcttaggacagcaaggtcatttgctggaagtcaaaccgtctgacacaaaaagcttcggagacaaagaaatgcagcaggtgacggttggcggaaaagtctatggaatcccgcttgttattgaaactctcgtactctattacaacaaagacctgttaaaaacgccgccaaaaacttttaacgagctcgaggatttaacaaaagacaagaggttcgctttttcttcggaaaaaggaaaatcgaccgcctttcttgcaaaatggacggacttttacatgtcatacggtttaatggccggatacggcggatatgtattcggagctgacggcacggattccggagacatcggtctgaacaacaagggagccgtagaggcggtggaatacgccgaaaaatggtttagtgaatattggccgaaaggcatgcaggacaatacgagcgcagacgattttatccagcagacctttatggacggaaaagcagcggctgttatcggaggtccttggtcggcttccaattataaagaagctggtttgaactacggcgcagcgaaaatcccgacattgccgaacggaaaagagtatgccccgtttgcaggcggaaaaggctgggtcgcctcaaaatatacgaaagagccggagcttgctgagaaatggcttcaatatgccgcaaatgacgaaaacgcttaccgcttttatgaagatacgaacgaagttccggccaacctcgctgctcgaaagaaagcaggggagcaaaaaagcgagctgacgtcggcggtcatcacacaatacgaaacggcgactccaactccgaatattccggaaatggccgaagtgtggacaggtgcagaaagcttgatatttgacgcggcagcagggaaaaaatcggctcagcaatcagcggatgatgccgtgcgcgtgatcaaagaaaacattaaagaaaagtatgtgaaataa

SEQ ID NO: 758 - DNA, 1308 bp, Bacillus licheniformis
atgaacaaagaccaaacactagcaaaccggagccggaaggcagcgctgttatcgataattcccggtgctggccagattgcaaaccggcagttttcaaaggggatcctttttctagtcatcacaggcttgtttatttgtgagttagcgattttcggttatcaggcgctgatcggtctcgtgacgctggggactgtccccggagaagaccactcgctgtttctcttgatagagggcacgctgcaattgattttgacgctcgttttcttgatgttttacatctttaatctgtatgatgcccggaagaccgccgcgatgaaggcggcgggtttgaaaatcatcgagacggctggggacatgatcagaaatgcaggtgacaaagggtttccgtatttatttacgctgccggcatatctcatgatggtgtttgtgattatttttccggtgctggtgactctgtttatcgcgtttacaaactacgatttttatcatattccgccaaacagtctcatcgactgggtcggctttaaaaatttcatgaatatctttttccttggctcgtatcggcaaacattcgccgatgtgctgggctggacgatcatctggacgatctgtgcgacgacgctgcaaattgttctcggcatcgtgacggcgctgatcgtcaatcagaactttattaaaggcaagcggatgttccggatcatcttcctgcttccgtgggccgttccggcatttattacgattatgagcttcgccaacattttcaacgactcggcgggcgcgatgaacgtccaggtgatcccgcttttgaaccagcttccgttcgtcgacatcccggctgtcgcatggaagaccgatccgttctggacgaagacggctttgattatgatccagacgtggctcggttttccctacatttatgtcatggtgacgggggtgcttcaggcgattcccggagagctttatgaagcggcaaagattgacggcgcgacatttattcagcgctttaaacacattacgctgccgatgattttatttgcgaccgcaccggtgatgattacccagtatacatttaatttcaataacttctcgatcatctatttatttaatgaaggcggtccggggagtgcgggggccggagccgggtcaaacgacatcttaatatcctggatctataagctgacgacggggacgtcgccgcagtattccgtggcggctgctgtcacactgctcatttctttcattgtcatcggggtttccctgattgcttttaagaaatcgaatgcctttggcaatgaggaggtcatgtag

SEQ ID NO: 759 - DNA, 852 bp, Bacillus licheniformis
atgagagggctttttaaaaatacgcggttcaccgggatgctgaacaaggttttgacctatatatttttggcgtttttaagcatcgtgattatttatccgcttttgatcacagcatcatccgcattccgggtcgggaatgtagcggcttttacactcgatttttcgggcgcatggacattggaccactttaagcggctgtttgaagagacgctttacctcaattggtacgggaatacacttgtgatcgctctgtctgtcatggtgttccaggtgacgattgtgacgcttgccggctatacgtacagccgctaccggtttgcgggccgaaaaaagagcctcattttctttttgatcattcaaatggtgccgacgatggcggcgctgaccgctttttacgtcctggccatgctgatcggagctttggaccaatattggtttttaactgcaatctatatcggcggcggaattccgatgaacacatggctgatgaagggctactttgatacagtgccgagagaaatcgatgaagcggcgcgaattgatggagcggggcacctgcggatctttgcttcggtcgttctcccgcttgtgaaaccgatgcttgcagtccaggcgctgtgggcgtttatggggccgttcggcgactatctgctggcgaaatttctgcttcggtcgccggaaagcctgaccatcgccgtcggtttgcagacattcatctccaatccgcagcagcaaaaagtcgcgctgtttgcagctggggcgattcttgcagctctgccgatttgcatcttgttcttctttctccaaaagaactttgtgtccggtttgacatccggcggaacgaagggataa

SEQ ID NO: 760 - DNA, 882 bp, Bacillus licheniformis
atgaacgacatgcgaaacgaaaagctgatcgtccgatttcttaaagcagcggcatcaccggcgggcgtcatgcgctgcaaacatgcattcagctggctcgaaatttcttttctgtttatgtttttgactgcttgtttaatggcgcctatgacccttgcgtttatgaaaatggaccgcttcaatgccgggtatctgatcccgaacgtcgctcaagaggctgacgcggcattcatcaaacaattaaaaggctaccaattgacaaacggaagattgaagggcgaagacgagctgtaccgtgtggagaaagggagaaccctgctggccgtcgatttgaaggatgaattaaaaacaagcggtgagaacgggcggataaaagcggaaggctatcaaaatgcgctcatctttcagtcagatcatctgatcatcagtgatcaaagcggagcggggttttccgttcgctatccggcaaaggctgggctgaatgatctggatgccggtcatttgggggattttatcggtgcaatgtggtttgcccaatataagccgcttatcatcatgctggcctgttcggcggttttcatcatctcgctttttttaacggccgttctggcgggaggcatctggatctccaaaaaatccaacatgaccgggataaggtcgtttaaggaagcggccgcagcggcggtgtgcggatcggcgcttccggcaggagccgcaatggctttcggtatgatcagctttgacttcatcgcgatgctgctcatccattcgtgcggtagtgctttgatggtctctttcattttcaggcacatcttcaagaaccgccatcacaacgaaaatctacagtcaggaggaaatcatggcaaatcagcggctatttga

SEQ ID NO: 761 - DNA, 2283 bp, Bacillus licheniformis
atggcaaatcagcggctatttgagatcgaccagtggaaaatcaaaacaaacaaatttgaaaaggaacataaacggcttcaggaaagtctgacatccttggcgaacggatatatgggaatcagggggaattttgaagaaagctattcaggcgaaagtctcaaaggcacatatatcgcaggggtttggttccctgacaaaacgcgtgtcggctggtggaaaaacggctatcccgaatatttcgggaaagtgatcaatgcgatgaatttcatcggaattgatgtatatgtagacgacgaaaaagtcgacctcagccaaaacgacatcgaatcgtttgaattggagcttaatatgaaagaaggcatcttgcggagaagcgctgtcgtccgtgtgaatcaaaaggctgtcaaaatttcgtccgagcgctttcttagcctcgatgtcccgcaactgtgcgcgatccattatgaagcggaatgcctgagcgatgaagcggtcatcacgcttgttccttatcttgatggaaatgtcgcaaatgaggatgccaatttcgaagagcggttttggcaggaagaagcgaaaggcgccgaatctcatcgcggccatcttgtgacgaaaacgattgagaatccgtttggaaccccgcgttttacggtggctgcttctatgtgcaatgtgacggaaggatatgtcagcgagcattttcaaacggatgcaatgtacgcggaaaaccgctactgttacgaagtgggaccgggaacaaaggcttctttaaagaaattgatcattgtcacaacgtcccgggattttgaagaagcagagcttttagtacagggcagggcgcttttggcggatgttcttcggcagggatatgaagaagcgaagcggaggcataccgaacattggatggaaaggtgggcaaaagcggacattgaaattaaaggggatgatgagcttcagcagggcatccggtacaacctctttcagctcttctcgacatactacggagccgattcacgcttaaacatcgggccgaaaggatttaccggcgagaaatacggaggagccgcctattgggatactgaggcgtacgccgttccgatgtatttggcgacggcagagccggaggtgacgaagaatctgcttttgtaccgctatcatcatttggaggcagcaaaacggaatgccgccaaactggggctgaaaggagccctttatccgatggtcaccttcacaggcgatgaatgccacaatgaatgggagatcaccttcgaagaaattcaccgcaacggcgcgatctgttatgcgatctacaattatgtcaattatacaggcgaccgggactacatgaaagaatacgggatagacgttctcgtcgaaatcagcagattttgggcggaccgcgtccacttctcaaaacgaaacaataaatacatgatccacggcgtcacagggccgaatgaatatgaaaacaatgtcaacaacaactggtatacgaacttgattgcgtcatggacgcttgagtacacgctcgaaaacctcgctatcctcccggaggaaaaacgccgccggcttgatgtacgggaagccgaaatcgagaaatggaaggatatcatcgagcgaatgtactatccatacagtgaggaattaaatgtttttattcagcatgatactttcctggataaagagcttcaggcagcggatgagcttgaaccgggtgaccgtccgctctatcagaactggtcatgggataaaattctccgctccagttttattaagcaggctgatgttctgcaaggcatttatttctttaatcaccgatttacaatggaagaaaaacgtcgcaactttgaattttatgaaccgatgacagttcatgaatcgagcctttcgccatctgtccatgcggtgctggcggctgagctcaaaatggaaaagaaagcgctcgaactgtataagcgtacagcgaggcttgatctggataattacaatcatgacaccgaggaagggcttcatatcacttcgatgaccggaagctggctcgccatcgtgcaaggatttgccggcatgcgcactcaggatgagaagctgtcttttgctccgtttctgccgaaggaatgggacggttattcgttcaacatcaattatcgagaccggctaatcaatgtgcaggtagaggaaaacagcgtcgttttcagtcttttaaaaggagaaccgctttctatgacagtttatggagaacagatcgcactgaacggacggtatgaaaggaggatggcccgatga

SEQ ID NO: 762 - DNA, 1707 bp, Bacillus licheniformis
atgagccaatggtggaaagaggcagtcgtgtatcaaatttacccgcggagtttttatgattccaacggagacggcttcggtgatttgcagggggtgattcaaaagctcgattacatcaaaagccttggagccgatgtcatatggctgtgtcctgtgtttgattccccgcaggatgacaacggctacgacatcagcgactatagaagcatatacgaaaagttcgggacgaacgatgatatgtttcaattgattgatgaagtgcataaacgcggaatgaaaatcattatggatcttgtcgtgaatcacacgtctgatgaacatgcctggtttgccgaaagccgcaagtcaaaggacaatccttaccgtgattattatttttggaaggatccaaaggcggacggttcagagccgaacaattggggatcgatcttttcagggccggcatggacgctcgatgagcggacaggacagtattatcttcactacttttcgaaaaagcagcctgacttaaactgggagaatgaagcggttcgccgcgaagtatacgatttgatgacattttggatggacagaggcgtggacggctggcggatggacgtgatcggttccatctccaaattcgtcgactttcccgattatgaaacagatgacagccgtccatatgtcgtcggccgctatcattcgaacggcccccgtctgcacgaatttatacaagagatgaaccgggaagtgctgtcccgttacgactgtatgacggtcggcgaagcaaacggctcagatgttgaagaagcgaaaaaatacacggatccaagcagacatgagctgaacatgatttttacatttgaacatatggatattgataccaaacagcattctccgaatgggaaatggcagatgaagccgtttgacccgatcgctttaaaaaagacgatgacgaggtggcagaccgctttaatgaatgtcggctggaatacgctttatttcgaaaatcatgatcagccgagggtcatatcccgctggggcaatgaccgcgagctccgcaaacaatgcgccaaagcatttgcaacagttctgcacggcatgaagggaaccccgttcatttatcaaggtgaagaaatcggcatgacaaacagcgagatgccgctcgaaatgtatgatgatctcgaaatcaaaaacgcataccgcgaacttgtcattgaaaacaaaacgatgacagaggaagactttcgaaaagccgtggcgaaaaaagggcgggatcatgcgagaacgccgatgcaatgggatgacgggaaatacgcgggctttacggatggagagccttggctggcggtaaatccccgctatcaagaaatcaatgtgaaagagtcgcttgccgatgaagattcgattttctattattatcagaagctcatcgggctgcgcaaacaaaataaagtcatcgtgtacggagactatcggctgctgctcgaggaagatccgcgaatctttgcgtatatccgcgaatatcggggcgaaaagctgttagtcgccgtgaatttatcagaagaaaaggcgctgtttcatgcttcgccggaattgcttgaggacagatgggatgtgctgttgtcaaactacgcccgagagcggcttaatataagcggcagtatcgacatggagccttatgaagctttcatgatgatcagccgggcaaaggattacacatcatga

SEQ ID NO: 763 - DNA, 681 bp, Bacillus licheniformis
atgaaagcggtcatttttgacttggacggcgtgatcacggatacggccgagtatcattatctcgcatggaaacatactgcagaacaaatcggcattgagattgaccggagctttaatgaacggctgaaaggcatcaacagagagcagtcgcttgataagattttgattcacggcggcgcggccggaaagtttcaggaggcggagaaacaagagatcatgcgccggaaaaatcaatactaccaacagctgatccaaaacttgactccgcacgacctgctgccgggaatctccgtgctttttgccgaattgaaaagagaacatataagcattgcgttagcttcgtcaagccgaaacgcgcctgctattttgcagcggctcggtgtcatggacgaatttcagggtgtcgttgatccggccgcacttgctcacggaaagcccgaccccgaaatctttttgacggccgctgcactgctcggtgtgcctccgtctgaatgtgcagcaatcgaagatgctgaagccgggatcgccgcgatcaaatccgcagggatgttcgcggtgggagtcggtgatgagacatcgctgcgcggagccgatttgatcgtgcacaacacaaacgagctgacgtttgagctgctgaatgaaggatggcagcgctattgctgtataagagaaggaaaatga

SEQ ID NO: 764 - DNA, 123 bp, Bacillus licheniformis
ttgatcttgatcttgttcttggttttgcttccctctccgattgcagataaggccgccagcggcggcctgtcattttatgattctcgggttgcttttcattttccttctcttatacagcaatag

SEQ ID NO: 765 - DNA, 1253 bp, Bacillus licheniformis
atgcagcaacaacaatttgatcaactgacaactgccgaaaagcgggaagtcgaaaggcagcttcacttatatatggacggagcggaggaggtcattcccccggaagaactgcgggcaaagctggccaaatcgattttgaccggcgaaccgctgaaaattaaactcggcctcgatccgtctgcgcctgacgtacatttgggccacaccgtcgtcttgaataagcttcgtcagtttcaggaaaacggacatatcgtccagctcctgatcggcgatttcacggggaaaatcggtgatccaacaggaaaatccgccgccaggaaacagctgacggacgaagaggtccgccgcaatgccgaaacatactttcaacagtttggaaaagtgcttgatcagaacaaggtcgagcttcactacaactcaaaatggcttaaacgattaaccttggaagacgtcattgagctcgcgggcaaaattaccgtcgcccgtttaatggaacgcgatgattttgaagaaagaatcgccatgcaaaagccgatttcgcttcatgagttcttttacccgttgatgcaggggtatgattcagtcgttctggacagcgacatcgaactgggcggaacggatcagcattttaacgtgctcatgggcagacactttcaggaaaagtacggaaaagaaaaacaggtcgtcattctcatgccgctgcttgaagggcttgacggcattgaaaaaatgtctaaatcaaagaacaattacatcggcatcgatgaagaccctcatgaaatgttcgggaaaacgatgtctctgccggacagtttgatgaaaaagtatatccatcttgcgaccgacttggaggcggaagaaaaaaacgtcttgtcaaggatttggaaacgggggccgttcatccgagagacgcgaagatgcttctcgggaaaaccattgtcaacatgtatcatggaagcaaggcggcagaagcggccgaacagcagtttaagaaagtttttcagcaaaacagcgcgccggacaatataacagccgtacactggcaaggtggcggaacggtgccggtcaccgatttattggtgacgctcgaactccttccttccaaaagtgaagcccgccgcatgatccaaaacggcggcgttaaaatcaacggcgccaaagcggaatcgattcatgcggacattgcactcgaacacggcatgatcatccaagtcggcaaacgaaaatttgtcaaattgcaaatgcaccaataa

SEQ ID NO: 766 - DNA, 507 bp, Bacillus licheniformis
ttgaatagatccccccatcttcgacaggaagaacacgacaccctcagcaagctgaagcgcatgccgatcgaatccttgaatcttgaagccatttcggtcgccaccaacctttaccggtcggcgcaaaagctccgcgtcaaaatggagaccgaggtcctttcctcatatcaattgtcttggacggctttttcgattctttacgatctatgggtatggggcaggcttgaaacgagaaaactcgccgaactgtcaggaatttcaacagccactgcgagcaatgtcattaaaacgcttgagaaaaagaacttttgcgtcaaaagcgcggatccgagagaccgcagacacgtttacgccgagatcacaccggaaggaaaagccgcgattgaagagctttatccggcgttccacaaaggggaaacaatgctgatcaagggcatgacaaaagaggagcagaatacattgatcgagctccttcgaaaagtgaatgacaatcttcataaaccataa

SEQ ID NO: 767 - DNA, 567 bp, Bacillus licheniformis
atgaagaaaaaaagcgctcctcttattttgatcatggcgctgtccctcttgctgccttttgctcaagcagaggcagcaggcagcaaaggagcatccggggtgaaggcttcgagttcctcggctaataacagcgctctaaaaacacgtgcgggttcagtcaaccagagtatgcgcagttatatgaaacagtctgcgagccgacgatacttaaacaagaacagtcagttcaacaccattcagcggacactgcctcccgatgccctgtacaaaggaagcatcaagcggacactcaatcaaaatcctgctggatcagcctttttgaattactactttccatattggatgatcttccacgtaggcggatatacagcggaacaaaaaaacatcctccgtaccgcaggaatcaaagaaaaagcgctctctgaacgaaaagaaaaaagatattggctgttgattgaagatcaaaacggaaagaaacatgccgtcctcgtctcgaaaaaacaatatgacagcattcaaaaaggggaccgaattgaagtgcgccgcaaacagatcaccaaaaaatag

SEQ ID NO: 768 - DNA, 393 bp, Bacillus licheniformis
gtgaaaaaatcgaaactgatctctttatccgcggctgcgatgcttttagccgttcccttatcaggatgttcatcatccgcttcagaccgttcacaggaggtcgcagatgaccaatccattcaaaaatacgatctcgtatggtttgattacgtgaatgacagcgaatccgacaaagcaccattactgaaagcagcatacgtgaaagatggaaaagaaaagacggagactttcaaaaaatatgtggaaaatgtagaaaatgtcgaacagccttatattaaaatccgcgatcaggaagccttcatctttcgtcccccatacattaaatatgatcaggagccgcttgagggcgtcgtcaaagacaaagttgaacaaaaaagcagtgatgaacaatga

SEQ ID NO: 769 - DNA, 380 bp, Bacillus licheniformis
atgaagaagatacttttttctgtttttgttttggcaggcagcttgctattggcttttaattttgccggtgaagcgagtgctaaaacgaaaaaagtcagcggctatatcacttggtacaacggagtgggcaaaatcggcgctgacggcaagaggctcggccattgggactgcgccacaaagatgggcttcgattgtccgagaaaaggcacaaaaataagagcctattcaaaagcaaaaccgcacaaagtcattacagtctataaatatgatgtcggcagaatgccgggcgctgttttggatgtaagcccgaaagcttttagagctttgggatttccgacaagcaaaggaaaggtagccggacattatacatataaaaaata

SEQ ID NO: 770 - DNA, 1020 bp, Bacillus licheniformis
atgaaaaaagtttcagttgttttgttggcggcagtcattttagccgcaggcgcatttgcggccgtccgctatttcgtcccggaaaaagcggagccggcaaagagcggcggttcagacctgcttgtatcgataaccgatcagaagctgatgaccgcttactatgaaaatcaaaataagctgtatgaagaaaagatgacggattatccggctatggcattagaccggaaaaaacgaattctttactatacaaacaccgataacagcaatgtgaagcatttgatcaggctggatttacagtcgggcaaaaaaacaaccctatattcaggagatgaatatgtcgacgggctcagtttatcggcggacggttcgaagctgttcatgagatacaaccttgcggaggagaggaattttcaccttgcttcctttgatttaaaacaaaaggcgtttcatgtcatctatccatcgttgaaaaacaaggacgaaactgtcagctactatcagtacaacaaagctgacaatcaattcgttatgctgcattattcattgaaggaagactatcaaaaaacagatgatgcgaacaacaaaggcgtgccgcccgaaccgacgaatatgaacatttccatggcgggtgtgaaagatcggcaaaaggtgagaacgatagcaaaatttatcaatgacgtggcaatttcgccggatggaaaaacgattgtctttacagaatcggctgatgatcagaaggcgatttatgcgatggatgccgaaacgaaaaaatacaaagcgatcatttcagatcagcaggcattttcattggtcgattcagcacagccgcaattctcgaaagacgggaaaaagctttactttctcgctgaagcaaaagatgcgaagctgcttgaagatgaaacggggagcgaagcaagggtgagaacgatctattcgtatgatatggatacgaaaaaagtgagcaaagcctgggaaaaaacaaacgggatcatcaacacctttacggtcattgacgaataa

SEQ ID NO: 771 - DNA, 993 bp, Bacillus licheniformis
atggcatctgctaaactgcagcagcgattggatcaatataaagcaatttactctgagttaaaaagcgatttaaaatggaaagtcacagatcagcggacattaatgatgattgcttccatgtatgtcgtcaacaagcggccttttgataaagaacggtttttaaagctgagtgaggctgtcaaacaggccgccggtacattttcgccgttgaggtcagcccatcgctacacttttgccgctatgtttgacgtacgcttcgaagaacctgaaacgcatatcagaccttttttcactctttatgaaaaaatgaccggcaacggattcaaaaaaagtattttcacttatttgtccgctcttattcttttgacaaaataccgtgatgagcatgatcatgacagcaaaatcaatcgggctttgtctatttacaaaggaatgaaggacaagcacgtttttttaacatctgccggcgactacccgctctccgtgcttttggccggttcagatatggagacaggtgaactgattgactatatcgaagcgttttaccaaaagcttaaccaggcgggttttcgcaaagggaacgatttgcagtttctcagccacatcctctcgcttatgccggagcaggattcagatcagcttgtcgcccgctccctccggatatacgatgaattgacaaaaaagcataaaagaccaaagcctgtccattacccggaaatcggactgctcgcgctgcttgagaacggcgaaaaagacatagatgccatcactatcatggcaggcgcattgaacagcgataaactgttcaggtggcagaaagacatgaatctgaaaacggccgtcaacttgtacatgagcgaaaaaacggaagacccggcgcttttggatacagggctttatcaaacgcttgaagctgttattcaagcacagcagacggcagcaatcgccattatgacaagctctgctgcagcgtctcaggcaaacggctcataa

SEQ ID NO: 772 - DNA, 303 bp, Bacillus licheniformis
atgagtgttccgaaagatgccgcttgctcgatgccccatgatcatcaaaggtctttgcacgatttatgccgcaaatacatgcactatcacgtcgtgctgaaaatgaaggacggcagttctgttcacggcattcttgaaggggtgaaccgtcaggaagcatctgtcctcattcccgaagacgtgacagatgaaaggcagttttacggcggttacggatatccgcgccgacgattcaggcggttcaggagaaggatcttcccgtttgtttttattgctgcgctgtatccttttccatattattaa

SEQ ID NO: 773 - DNA, 258 bp, Bacillus licheniformis
atgagcagctacgaagagtactatgacaattacgatccatacagccctgagcgggaaaaagaaagacagtcaatgaaagcgcggcgttcggcggatagtaataaaacagataaaacgaataaaacagataaaacagctaaagcggataaaacggataaaacccgcagctctgacgatgaccggttcaaatgcagaaaaagaaagtgcttttctgatgacgatgacgaccgcttcaaatgccgcagaatgaagtgctga

SEQ ID NO: 774 - DNA, 135 bp, Bacillus licheniformis
ttgaataaaggatttttcgtttcaaccgctaatattatatgtatcaaccatttttttacggctgcgcctgccggtgcttgcggaaagcattcagacggacggcctgatatgatagaaggagcggaatgccgatga

SEQ ID NO: 775 - DNA, 549 bp, Bacillus licheniformis
atgaaaaatagtagaaaaaaagagatcttatcgtgggtgaaaacacttgtcatcgccgcagcgcttgtgatggtttgccgctattttctgtttacgccgtcaaccgttttgggagattcaatgtatccgactttagaggacggcaacatggtcatggttagtaagatcagcgatattcagcgctttgataaaattatttttcacgcgcctgattcggatgaaaactatgtgaaaagggtgatcgggctcccgggagatacgatcgaaatgaaggatgatgtcctttatataaacggaaaagcatacgatgaaccttatttaaagaaaaacaagcaaaagctgacgcttcatgaacatttaaccgataatttcacattggagaaattaacaggtgaacaaaaggtgccggaagatcacttgttcgtgatgggggataaccgtcaaaacagcaaagacagccgctttttcggatttatcacaatggactccgttgtcggcaaagttgagttccgttatttccctttcaatgagatcggcggaatagaatag

SEQ ID NO: 776 - DNA, 285 bp, Bacillus licheniformis
atgtttaatagacaacagatagatcatctgcttgaagaaaaaaaaggagagctgaagaaaaagttcggaagtggttttatcgcagttttctatatttctattcttctttccatatgtacgttttttatagaatacaaatattttctcattgtattattcgcacccactattattgtcatgttaatcaaccctcctttttccgaaaaaaaaggggtgtttcgtttcattgccggcctttatttgcttttattggcactggcaacatacttttggcttcgagcataa

SEQ ID NO: 777 - DNA, 123 bp, Bacillus licheniformis
ttgcacaaaaataggacagaatataaaagtccgacctattttgtcaacgatctgaaaggctgcctgcagttaggatgggaagcctttttagcatttgcgcattttggcgagcggacggtttga

SEQ ID NO: 778 - DNA, 645 bp, Bacillus licheniformis
atgaaagtgtttgtagtgggggcgaacggacaaatcgggcgccgtttgacgaaaagtttgaatgagagcagcgaacatcaggtcagggcaatggtgagaaatgaagagcaggcgcaagctttgaaacaatcgggaacagaaacagcgctcgctaatttagaaggcaccgttgaaagcatcgcagaagcggcggagggctgcgacgcgattgtctttaccgccggctcaggcggcaatacgggcgctgacaaaacgcttttggtcgacttggatggggcggttaaaacgatcgaagccgccgaaaaagcaggcattcgccgctttattatggtcagcacattgcaggcacaccgccgtgaaaattggaatgaagcgttaaagccgtattatgtcgccaaacattatgcggatcggatgcttgaaggcagcgaattaaactacacgattatccgtccgggaggcctgttaaacgaaccgggcacaggccgggtgaaagccgcggaaaatcttgagcgcggaacgattccgcgtgaagatgtggccgataccatcttggcggcgctcaccgaggagcacacattccgtcgttcgttcgatttggtttcgggtgatcaaacgcccgccgaggcgctgaaatctatataa

SEQ ID NO: 779 - DNA, 873 bp, Bacillus licheniformis
atgaatgattacgaaagaattcaaaacgcggttcagtttatcgaagaacaccttcaaaacgatttaaacatcacggatattgcggctaaatcgtgtttctccccatttcattttcaaaggctttttcaggcgatctccggtttttccgtttatcaatacattcgcaaccggcgtctgtctgaagctgcgcttctgcttgagaaaacagaccgttccattctcgacattgcaatcaatttcggctatggctcacaagaagctttcagcagggctttctcacagtacttcggcatcactccggccaagtatcgcaaagcgaaggtcaagcttgattttcaatctaaaattaatttcctcgaatataaagaaaggatgactggagatatgaacatcccaaagccgcacatcactcatttaaacgacatacatatgatcggatatgagtaccggacaaatttaaacgatgaaaagtatttcgaagatatcccgaaattctacaacgatttcggcagaaatggatactttatgcaaattcctcaaaaaacggatccgaatatgtgttacgggctgtcatgccgcttccaggatgacggaggtttctcatttattatcggggaagccgttcgcgaaacagcagccggggaagtgccggagccgcttatttatacgaaaattcccggcggcaaatacgccgtatttcatgtaaacggatcgactgaatcagtgcagaacacaagaagatacatctatggatcatggctgatgaataccaattacgagagaacagaaggaccggactttgaagtgactgatgtgtgccgttccgtaccgccgaacgagatgaagatgaccatctatatcccgcttctgtaa

SEQ ID NO: 780 - DNA, 1542 bp, Bacillus licheniformis
atgaaacttgaaaaattcgttgaccggctccccattccgcaagtgcttcaaccccaaagcaaaagcaaggaaatgacctattatgaagtcaccatgaaagaatttcagcagcagcttcaccgcgatctgccgccgactcggctgtttggatataacggagtttatcccggccctaccttcgaagtgcagaaacacgaaaaagtcgcagtcaagtggttaaataagcttccggatcgccattttctccccgtcgaccatacgcttcacgatgacggccatcacgaacatgaagtgaagacggtcgttcatttgcacggaggctgtacgcctgctgacagcgacggatatcctgaggcttggtacacaaaagacttccatgcaaaaggccctttctttgaaagggaggtgtatgaatatccgaatgagcaggatgctacagctctttggtatcatgaccatgcaatggccatcacaaggctgaatgtatatgcggggcttgtcggtttatattttattcgcgacagggaagagcgttcattgaacttgccgaagggagaatatgaaatcccgcttttgattcaggataaatcatttcatgaagatggttcattgttttatccgcggcagcctgacaacccttcgccggatcttccggacccgtcgattgttccggctttttgcggtgataccattttagtcaacggcaaggtatggcctttcgctgaactggaaccccgaaaataccgttttcggatactgaacgcctccaatacgagaatctttgagctgtatttcgatcatgacatcacatgtcatcaaatcggcacggacggcggtcttctgcagcatccggtcaaagtcaatgaactggtgatcgcgccggctgaaaggtgcgatatcatcgttgatttttcacgagcagaaggaaaaaccgtgacactgaaaaaccggatcggctgcggcggacaagacgcagatcccgatactgatgccgacatcatgcaattccgcatctcaaaacctttgaagcaaaaagatacaagttcattgccgagaatattgagaaagcgcccattttaccggagacacaagatcaatgccctcagaaatctgtcattgggcgcggccgttgaccaatatggaagacctgttctgcttttaaacaacacaaagtggcatgaaccggtaaccgaaacacccgcactcggcagcactgagatctggtcgatcatcaatgccggaagggcgatccatccgatccatttacatcttgttcaatttatgattctcgaccaccggccgtttgatatcgagcggtatcaggaaaacggagaacttgtttttaccggtccggcagttcctccggcaccgaatgaaaaggggctgaaagacaccgtcaaagtacccccgggttcagtgacgcgcattatcgccacctttgcgccgtacagcggcagatatgtttggcactgccacatccttgagcacgaagattacgatatgatgcgccctcttgaagtgacagatgttcgtcatcaataa

SEQ ID NO: 781 - DNA, 1008 bp, Bacillus licheniformis
ttgcagaaaagaatagagtggattgatgtttcgaaaggcgtgggaattatattggtcgtattgggccatacaccgacgccggattggctgaaaacgttcattttcgcatttcatatgccgctgtttttctttctgtccggcctcgtttaccatgatgggaatatgacttttacatcttttctcttaaaaaaaataaagacgctccttttgccgtacttcatcttctccgttcttgcctatttattctgggttctcgtcgagaggcattttacgttcaccggcagttcggatgtcgacccggttgtaccgtttaaagggattttttattcgatgcctgatgactacatgctgacacacaacccggcgctctggtttttaacatgcttattcatcgttgaaatactgtttttcatcgtgaagagatgggggaaaggcagactgtttatcgtcatagccgtattggtctcagccgctttaggctttttgaattatcaatatctcggcatcaagctgccgtggaatattgaagtggccctgaccgccatcgtcttttattcggccggttttctgttgaaaaataatctgaaagagatgagagaccgaagaatgctgctgctcacgcttcttttattcatcgcggtcggctgcttgcagaccctgaacgtcagagtggatatgagggccaatgagtacggaaacatggcgctcttttatatgacctcatttctggggacggcaggcgtcattttcagcagctttcaccttgaaaaagcaaggcttctccaattcctcggcaaaaactcgctgatcattctcgtactgcactatccggtcatcaggatgctgaaagccgtcgtctactacttcacacaggtttcccttgatgagacatacggctccctgttgtggagcgcgctttacaccggcatgacattgcttgtaatggtgccttgcatctttttgttgaaccggtatccgatcgtacttgggcggaagaaatgcaattaa

SEQ ID NO: 782 - DNA, 498 bp, Bacillus licheniformis
atgatgttcgcttcaagcggctcttctactcaagagagcaaatcgtccggaagcagcgcaaagacgacagccgcaaaaactagcgaagaaaaaagcaatgacgatgccaaagaaaaaactgaattcggtttaaatgaaacagctgatcttgacggcacacacatcacagttactaacgttaaaaaatcgatgggcaatgaatatttcaaaccaaaaaacggtaatgaatatgtagttgcaacacttaacatagaaaataaaagcgataaagatatttcctataacccgctcgattttcaaattcaaaatgaagatggacaaattacgcacaatacgtttggaccatcagatgataacgacctatcttctggaaatctgacaccaaacggcaaggtatctggaacaatcactttcgagactaaaaagagcaaaacatataaagttatctacactcctgaattttggaatgacaaaaagattactttcaaccttaaataa

SEQ ID NO: 783 - DNA, 873 bp, Bacillus licheniformis
atggaacggtatgatgaattaaaaaaaggtgaaaccggggcatgggtcagcatcatcgcttaccttgtactgtcggctgttaaattggccgtcgggcttgcatttcactccgaagccctcagagccgacggactgaacaatacaaccgatattatcgcctcattagcggtgctgatcggcctcaggatttcgcagaagccgcctgatgaagaccatccgtacggacatttccgcgctgagacgatcgcctcgatgatcgcttcatttatcatgatggtggtcggtcttgaagtgctgtacagctcgggcgaaatgctgtttaatccgaaggaaacgacaccggacatgattgcggcctggacggctgcaggcagcgccgtcgtgatgtttttggttttcctctacaataaaaggctggcaaaaaaggtgaacagccatgccctctatgcagccgccgccgataataaatcagatgcctatgtcagcatcggaacattcgcaggcatctttgcttcgcaatttaaccttgcatgggtcgatacggcagccgcgtttatcattggattaatcatctgcaaaacggcttgggggatttttaaagaggcggcccattccttgacggacggattcgatattaaacatatttcaacctataaagaaacgatccggaaagttcccggcgtcggcaacatcaaagatgtaaaagcgcgttatttgggcagcgccatccacgtggaaattatcgtggaggtaaggtcagatctcaacattgcagaaagccatgacatcgccgatgaaatagagagaagaatgcaggaggagcactcgatcgttcattcccatgttcacatagagccttctaaagaaaaataa

SEQ ID NO: 784 - DNA, 963 bp, Bacillus licheniformis
atgtcatacgaagaaatgctgcatcccgttttgggaaaagtagctgataatattgacaaagtaatggtaggaaagaaagatattgccgttttaagcctgactgccattcttgcaaacggacacgttctgctggaagacgtacccggcgtcggaaagacgatgatggttcgcaccctggcaaaatcaacaggcgctgaatttaaaagaatccagtttacgcctgatttactgccttcagatgtaacaggggtttccatatataatccaaaaacgctggaatttgaataccgttcaggtccgattatgggggacatcatcctcgccgatgaaatcaacagaacatcgccgaaaacccagtcggcgcttctggaagcgatggaagaaggaagtgtgacagtagacggtgtgacaatgccgctctcaaagcctttttttgtgatggccacgcaaaaccctgtcgagtatgaggggacatacccgctgccggaagctcagcttgaccgctttttattcaagctgagaatgggatatccgacagtccgcgaagagcttcaagtgctcgatcttcaggaaaaccgcagccccattgaggaaattgagcctgtcatagagaaggaagagcttgccgcatttcaaaaagaagctgaaaaggtgtatgtagacgctgcgattaaagaatacattgttgggatcacccaaaaaacgaggagtcattccgccgtttatctcggggtgagtccgcgcggctcaatcgccttgatgaaggcggctcaggcgtttgcatttttatataaccgcgattatgtcattcctgatgatattcagtatttggcgccttttacccttgcgcacagaatgatcctgcggtcagaggcgaaatttgaaggaaagcggcctgaagctgtccttcaggacatcatgtcaaaaaccgaagttcccgtcggaaggccgatgagcagctga

SEQ ID NO: 785 - DNA, 1212 bp, Bacillus licheniformis
atgagagagcgcatcggtcttgtgatgtacggatggaagctgtttattctgtttcttctgtttgcttcaacgttttgctatgcgatgtttcaagggggatttgtcagctggtttctgttctactcatttctcccctttgcgctttatgctttcctgtttgctttttatccgctgaagaacttgacagcggagcggaggctgagccaagggcagtataaagccggtgatcaattggaggctttcgtcgtgctgaagagaaaatggccttttccgatcatgtttatgatcgtggaagactgcctgcctgattcgctggggaaaaacaggggttcggcagaggccaaacagcttctctttccttggtttaaaaaagaaattaaaatggcgtacacgatcgattcggttccgagaggagaccaccgtttagcaaaaatcagagtccgtacaggtgatccgctcggcctgctggaaagggaatgcgagattcaattggaagcttcctttctcgttttgccttcctatcaggagatcgcttaccgcgccagcggaggctcttatgacgagcatgcaggccgcgtttcagagcttcgccgcaaggacagtacactggcgtcaggtatcagagaatatcagccgggcgaccgttttgcatgggtcgactggaagacgtcagcccgccgcagccagctgatgacgaaggaatttgagcagacgaaaggggatgacctgctcgtctttatggatcagtccccgtctgaggcttttgaagagatcgtcacgtttaccgcttccatcattcgttcggcaatgcggagcgggacgaatgcagggcttgtttccattggtaaggagcggaatgtcttcccggttcggcagggggaagagcagctgagaaagctgttctactacttggcgattgccgactgcaatgcagtccagccgtttcacagtctgatagagggggaattgggacattccgatatgagaaaagccgtcaaatatattgtgacaagccgcatcacgatcgaactggtgcaggctttgaagaaaccgctctccggcgggcggcccgtcatttgtttggtgaagaaaaaaggcggagatctatcaagcgaggaaagcgcggctgtccagcatttaaaagcgcggggaatcgaagtaaacgtcatttacggggaacatttttcccggggtttggctgaagcgaggtga

SEQ ID NO: 786 - DNA, 2226 bp, Bacillus licheniformis
atgttgtccgggggaaaaagaaacaggttcggtttattgcttttttatgtgctgacttttttgctgctgtgggagtggctccgtcctttgcagtattttaccgatacggggcacaccgtcttttttattttatttatcgctcttgtatttttgcttacattttttaaggtcccttggtttatcagatttccggtcagccttggcttcgttctgtttgcactgcacacgattttttacgaaggatcggtgttttcaccttcatggattgccctgtttttccaggatttaaagcgaaatttctcctatattttctccggcatgtggcgggatatgtcgccgttgtttcggacgctgctcttttacgtccttctttggctgctcgtatacttgctgcactactgggtgatctatcagcgcagaattttattcttttttattatgaccgttgtttatgtcgcggtgatcgatacatttacgccgtttgacgcgtcatatgcgatcgtcaggatcgtgctgatcggctttttgcttctcggcctgctgtatttggaacggatcagggaatcagaagcgctcaaatcctcgaaatcgcggtttgccaaatggtttgcaccgctcttattgatgactgccgccgccgtgtgcatcggcgcggtctcgccaaaagccgatcccgtctggcctgatccggtgccgtttctgcagacggctgcgaccggcgattttgcttcctcaggcagaagcaaagtcggctatggaacgaatgatgaggcattgggcggtccattttcaaaagacgatacatgggtatttacatggcagggaaatgaacgaagctatttcagggtggaaacaaaaagccgctatacaggaaaaggctggattgaagacgaaaaatcaggcgcatccattcagcttgaagaggataaactggattaccagtggtacgacgaaagcgtgaagaccgaaacgcgcaaagcgatcgtcgatatcgatcccgcttaccggtacgatcatgtcctgtatccgatcgggacgaccgaaatcaagctcaataatttctttgtgccgctccgcatgaacttaaatacggagaaaataaaaccggccggcaagacaggcgcggacattcagaatctggaaagctattcggtcacctataaatcacccgtctttgatgtcgatcagctgaggaaagtcagcttggagtcggaggggaaatgggccaggagccatgagaagtacctgcagcttcccacttcccttcccgaccgcgtgaaaacattggcgcacgatttaacgaaagacgaagataatatatatgacaaagcgaaagcgattgagaagtatctcggttcttccgaattttcttatgagacggaagatgtcgctgttcctaaaggagaccaggattacgtcgatcagtttttatttgagacgaaaatcggctactgcgacaatttttccacggctatgatcgtactgctgcggtcggccggaataccggcccgctgggtgaaaggctacacatccggtgaatatgcaggaacgacggcagaccggaaacgcacgatgtacgaggtgacaaacaacaatgcccactcctgggttgaagtgtattttgaagggcaaggctgggttacgtttgaaccgacgaaaggctttttaaatcccgagcagctcgttgaagagtccagcggtcagcaagccggcgcggcttctgataaaaaagaagatgataagaaaaatgatgaaggccagcgtccgcaggatgcaaaagaacaagacaacaaagagaagcccgaatcccaggcaaagcgtgatgccaaagccgattcccatgccggaagcgatgatgcagaccgtactcttttgactggtgcggccgtactcggtctgttgctggcgtttgcagcggtgctttactatacaagggtgaaatggatgccgcacatcatcatcaacaggctgaaaaaacggcgtgatgaagcggttttctttaaagcctacgacgaactgctccgccagctgaagcgccaaggcatgcaaaaagaagaaggccagacgctgcgcgagtttgcgaagacggttgatgaacgctttcaaagcggggacatgacggctttgactcttcaatatgaacgggctttgtatcgaaaggaagacgccgcaaagctttggaatgattcggcggagttatgggaaaatttaattaaaaagagatag

SEQ ID NO: 787 - DNA, 1542 bp, Bacillus licheniformis
atgacgaagttagtaaatgaaatgattcttgtgttggattttggaagtcagtacaaccagctgattacccgccgcattcgtgagtttggtgtatatagtgaattgcatcctcatacgttgacggcagaggaaatcaaaaaaatgaatccgaaaggaattattttgtccggcggtccgaacagcgtttacgacgaaggatctttccgctgcgacgaaaagattttcgaactggacatccctgttcttggaatttgctacggcatgcagttgatgacgcattaccttggcggaaaagtagaagcggcaagccagcgcgaatacggaaaagcaaacattcatatcgagggtgaaccggatctgtttaaagatcttccaaacgaacaagtcgtctggatgagtcatggtgatctagttgttgaagttccagaaggctttaccgttgatgcgacaagccatcattgcccgaactcagcaatgagcaagaaggataagaaatggtacggcgttcaatttcatccggaagtccgccattcagaatacggaaacgaccttttgaagaacttcgttttcggtgtttgtgaatgcgtcggcgaatggtcaatggaaaactttattgagattgaaatgcagaaaatccgcgaaacagtcggcgacaagcaagtactgtgcgcgttgagcggcggggttgactcctctgtcgttgcggtcttgatccataaagcgatcggcgaccagctgacttgtattttcgtagaccacgggctccttcgaaaaggtgaagcggaaggcgtgatgaaaacgttcagtgaaggcttcaacatgaacgtgatcaaagtggatgcgaaagatcgcttcctgaacaagcttaaaggcgtctcagaccctgaacaaaaacgcaaaatcatcggtaatgagtttatctacgtgtttgacgatgaagcggaaaaactgaaaggaattgacttccttgcacagggaacgctatacactgacattatcgagagcggaacagcgacggctcagacgatcaagtcgcatcacaatgtcggcggccttcctgaagacatgcagtttgaactgatcgaaccgctgaatacgctcttcaaagacgaagtgcgcgcgctcggaaccgagcttggcatccctgacgaaattgtttggcgccagccgttcccaggtccgggcctcggcatccgcgttcttggagaagtgacggaggaaaagcttgaaatcgtccgcgaatcagacgcgatcctccgcgaagaaatcgccaaagctgatcttgaaaaagatatttggcaatacttcaccgttcttcctgatatccgcagcgtcggcgtcatgggagacgcaagaacttatgactatacgatcggcattcgcgccgtgacatcgattgacggcatgacatcagactgggcgagaattccttgggatgtccttgagaaaatctcgacacggatcgtcaatgaagtgaagcacattaaccgcgtggtttacgatattacgagcaagccgcctgcaacaatcgagtgggaataa

SEQ ID NO: 788 - DNA, 1323 bp, Bacillus licheniformis
ttgaagcgttactttcagtttgaagaattgggcacaaattatcggagagaaatgatcggcggactcaccacatttttgtccatggcatatattttgatcgtcaacccgcttaccctttctctggcgtcggtggaaaatttcccggatgcattgagaatggatcaaagcgcggtctttacggcaactgcggttgcagcagccgtcggttgttttatcatggggctgctcgcgaagtatccgatcgctctggcgcccggaatggggcttaacgcattctttgcattctcagtcatcctgaatatgcagattccttggcagacggctctttcaggcgttatggtttccggacttatttttatcgttctttcgctatccggtttaagggaaaaaattatcaattcgattccttatgagctgaaaatggctgtcggtgcggggattggcctgtttatcgctttcgtcggtttgcagggctccaaaatcgtcgtatccaacccggatacgattgtgtcgtttgggaatattcattcaggtcccgttcttttgactgttttcggactgatcatcactgtcattttaatggtattgcgcgtcaacggcggcattttcttcgggatgctgatcacggcgattgtcggcatgattttcggacagattgacgttcctgacaaaatcgtcggtgccgttcctagtcttgcgccaacatttggacaagcctttatccaccttcatgatatctttacggtgcaaatgcttgtcgtcattttaacgtttttattcgtcgacttttttgatacggccggtactttggtgggtgttgcatcacaagccggtttgatgaaggataacaaactgccgcgcgcgggaagagctttgcttgccgattcttccgcaactgtggccggagcgatccttggtacatcgacaacgaccgcttatgttgagtcaagcgccggggtagcggccggagcgagaagcggttttgcggcgattgtaaccggcgttttgttcttgctgtcgctgttcttctcgcccgtactcagcgttatcacttcacaagtgacggcgcctgctttaatcatcgtcggcgtgctgatggtggcgaatctcaacaaaatcgactggaccaaatttgagattgcggtgcccgcattcttcacgatgatcgcgatgccgctgacatatagcatcgccaccggaatcgcgatcggatttattttctacccgatcacgatgatttttaaaggcaaagcaaaagagattcatccgattatgtacggactggctgtcgtatttattctttatttcattttcttgaaatag

SEQ ID NO: 789 - DNA, 150 bp, Bacillus licheniformis
ttgttctatatcatcttcgtttcgtttgtgatgttcttcaatcatataagcaactcctcttctattcaaaagctttacataaatgaaaagcacttttataaattacataagctgtgtgaaacagtcaagacaaacctctttttatcatag

SEQ ID NO: 790 - DNA, 759 bp, Bacillus licheniformis
atgattgaagaacatcacaaacgaaacgaagatgatatagaacaagaacctgcttcgaggatgtcgaggaattcccggaaaaaagcgaagaagagcaaggagacgaatccgtctgcagcaaaagtcaaatcggtgatggagagtgtgattgccgctttgttccgttatttcagctttgtgctcgatattttaaagtccccggtgcgcactgcacttgattatgaccggtcttattttaagtattccgttatttcaatgacgcttttagctgttttcttttcgctcggcaacttttatcagctgcttgcgggccgggggagaattctcgggttcggcgtgtcggtgccgtttatggaagtgtttttggttgtgtttatctactgcatggctttcatgttttggatggcggcagcgagctgggctgtatcgaattttatgctcaggtataaagcttcatttttcgatatcacggcaaagtacggctctttactggttccgtttatcgtccccgccgctctgtggatgattttcgcgattatcaacttcacggccgcgacggtgattctctcgatcgtcatctttatgggattgaccttcggcacttttacattgattcaatcgatttatgaaaaaagcgaaaaaccgcggtttgacctgatgtactgcgtgtttaccgtctttttgcttgaattggtattcgttggggcaacttggaagctggtgggcggatacttgctgtcctcgcttatccctgtataa

SEQ ID NO: 791 - DNA, 156 bp, Bacillus licheniformis
atggctaactttcttcgaaaagctgtaaagacaaaaaaaggagtatttaatcaggcagctcgcaaaatcaggacggctggacaatttgaaagacctctcgtcatacacgctgagcgatttggaaaaggaacaccggaagctgcacaaattagatga

SEQ ID NO: 792 - DNA, 555 bp, Bacillus licheniformis
ttgcttcactcagcactattgaacggtgtgatcatggttggaattattctggttatcaatattatatatgtaacgtttttaacccttcgcatgatactgactctaaaaggccagcggtatctcgccgcttttatcgggacaatcgaaatgcttgtttacgtcgtcgggctgggtcttgttttagataatttaaatcaaatccaaaacgtgatcgcttatgcggttggatttggaatcggcatcatcgtcggcacgaaaattgaagaaaagctcgctttgggctatattaccgttaacgccattacgaaagagctcgatttggatctgccgaaacagctcagggaaaaaggctacggggtcacccattgggtcgtcggcggacttgagggagacagaacggcgatgcaggttttgacgccgagaaaatacgaactgcaactgtacgaaacgattaaatcaatcgattcaaaagcatttatcatttcctacgaaccgaagacaatacacggcggattctgggttaaagccgtaaagaaaaggagaattaaagaataa

SEQ ID NO: 793 - DNA, 198 bp, Bacillus licheniformis
atgacaaagccgaaaaaaaagcgctttgaagtaacggaaggcgaaacgatcgaaaccgtgttgacgaagatgcaggaagaaggctatacaccggtgcgccgaatggaggagccggtcttcaaagaaacaaaggaaaatggaacgattcaggttgttccgtgcggaagaaaaattatattcgaagggaaattgctctaa

SEQ ID NO: 794 - DNA, 489 bp, Bacillus licheniformis
atgcagcctcttcttggtgttatcatgggaagcacatctgactgggaaacgatgaaacatgcctgcggcatactcgatgaactgggaattccgttcgaaaaaaaggtcgtttccgcacatcggacgcctgatttaatgtttgaatatgccgaaacggcgcgggaaagaggcttgaaagtcatcattgccggagcgggcggagccgcccacctgccgggaatggtcgcagccaaaacgacgctgcccgtcatcggtgtgccggttcagtcaaaagcgctgaacggcctcgattcgttgctttcaatcgttcaaatgccgggtggtgtacccgttgcgaccgttgccatcggcaaagcgggagcggtcaacgccggactgcttgcggcgcagattttgtcagcttttgacgaaaagtatgccggaagattggacgaacgaagggaaagcatcagacaaaccgtattggaaagcagtgatcagcttgtataa

SEQ ID NO: 795 - DNA, 1143 bp, Bacillus licheniformis
ttgtataaacaaacgatttttccgggcgcgacaatcggcattatcggaggcggacagcttggcaaaatgatggcggtcgcggctaaacaaatgggctataaaatcgcggtggttgaccctgttccttcatcaccgtgcggccagttcgccgaccttgagattacggctgcctataatgacagggaagcgatacggaagcttgccgaagcgagcgacgtgatcacttacgaattcgagaacatcgattatgatgcgctgaactggctgaaggagcacgcataccttccgcaggggagcgagctgttgctccttacgcaaaacagggagaccgagaaaaaagcgattgcatcagcgggctgcaaagtcgcgccgtaccggatcattcacgaccgggcggaactggaagcgtccgtagcggagctcggtcttccggcggtgctgaaaacttgccgcggcgggtatgacggaaaagggcagtacgtcctgaagggacatgcacaaatcggggaagccgcagctcttttacagcacggcacatgtattttggaaagctgggttcctttcaaaatggaattgtccgtgatcgtgacaagatcggttcacggagagacaaccgtctttccggcggcagaaaacattcataaacaaaatattttattccagagcatcgtcccggcgcgagccgatgaggcgattcaggaacaagcggcagcacttgccctcaggcttgccgaaaagcttcagcttgtcggaacgctggccgttgagcttttcctgaaggaagatggcgtgcttctcgtcaatgagctggcgccgcggccgcataattccggccattacacccttgatctttgcgaaacgagccagtttgaacagcatatccgggctgtctgcgggctgccgctcggcaaaacggaccttctgaaggaaggaatgatggtgaaccttctcggagacgaagtgtacatggctgaagaagaccccgaacttttaaaagaagcgaagctttatatatacggaaagcatgaagtcaaaccgagtcgcaaaatggggcacatcacatttttaagaacacccgacgatgaatggatcgggaagatgacagaaaagtggactgaaagagatggaggacgaaaacaatga

SEQ ID NO: 796 - DNA, 1296 bp, Bacillus licheniformis
atgatcgaacgttattcaagaccggaaatggctgcgatttggacggatgaaaacagattccaagcatggcttgaagttgaaatactggcttgtgaagcttgggctgagctcggcgtcattccgaaagaagatgtgaaggttttaagggaaaaagcgtcatttgacatcaaccgcatcttcgaaatcgagcaggacacgcgtcacgatgtcgtcgcatttacccgcgccgtgtccgaaacgcttggcgaagagaaaaagtgggtgcactacgggctgacatcaacagatgtggtcgataccgctctttcctatctattaaaacaggcgaacgatattttgctcaaggacattgagagatttgttgacatcttgaaagaaaaagcgaaggaacataaatatacggtgatgatggggcgcacacacggcgtacatgcagaaccgacgacattcggtttgaaactcgccctttggtatgaagagatgaagcgcaacctggaacgcttcaagcaagcgaaagaaggcatcgaagtcggcaaaatctcaggcgccgtcggaacgtacgcgaacatcgatccattcgtcgagcagtacgtatgtgacaagcttggcttaaaacctgcgccgatttcaacacagacgctgcagcgcgaccgccacgccgattacatggctgcgctggcgcttgttgcgacaagcatcgagaaattcgccgttgagatccgcggcctccaaaaaagcgaaacacgcgaggtcgaagaatttttcgcaaaaggccaaaaaggttcatctgccatgccgcataaacgcaacccgatcggttcggaaaacatgacgggaatggcgcgcgtcatccgcggctacatgctgaccgcttatgaaaatgtaccgctttggcatgaacgcgacatttcgcattcatcagcagagcgcatcattctgcctgatgcgacgatcgcgctgaattacatgctgaaccgcttcggcaacattgtgaaaaacttgaccgtgttccctgaaaacatgaagcgcaacatggaccgcacactcggattgatctactcccagcgcgtccttctcgctctcattgataccggcatggcgcgcgaagaagcgtatgacaccgttcagccgaaagcaatggaagcatgggagaaacaagtgccgttccgccagcttgtcgaggctgaggaaaaaattacgtcccgactgtctccggaacaaattaacgactgctttgattacaattaccacttgaaaaatgtcgactacatttttgaacgtttaggcttggcatag

SEQ ID NO: 797 - DNA, 717 bp, Bacillus licheniformis
gtgaatattgtgaaaaatgaacttttatacgaaggaaaagcgaaaaagatttaccggacggatgatgacaacactttgtttgtcgaatacaaaaactcagcgacggcttttaacggagaaaaaaaagccgagattgacggaaaaggccgtttaaataacgaaatttccagcctgattttcacaaggcttcacgagaagggaatcaacaaccactttgttgaacgaatttctgaaacggagcagctcattaaaaaagtgacgatcatcccgcttgaagtcgttgtccgcaatgtcgttgccggaagcatgtccaaaaggctcggcattccggaaggcacggagctggggcagccgattatcgagttttactacaaggatgacgcgctcggtgatccgttgatcacagaagaccatatccggattttaaaagcagctgagcctgaacaggtggagaaaatcaaatcgattacgagacaggtaaacgaagagctgcagacgattttcgcggcttgcgatgtcagattgatagatttcaagcttgagttcgggctcgataaagacggcgaggtcctgctggccgatgagatttccccggatacgtgccggctgtgggatcaagaaacgaatgaaaagcttgataaagatgtgttcagaagaaatctgggcggattgacggatgcatacgaagaaatattcaaaagacttggaggcatgtaa

SEQ ID NO: 798 - DNA, 255 bp, Bacillus licheniformis
atgtacaaagtgaaagtgtatgtcagcttaaaagagagtgttttagatcctcaggggagcgccgttcagcatgctttgcacagcatgtcctacaaagaagttcaggacgtccgcatcggcaaatacatggagctcacaatcgaaaaatcggaccgcgaccttgacgttctcgtcaaagaaatgtgcgaaaaacttttggccaacacggtgattgaagattacagatacgaagtcgaggaggttgtcgcacagtga

SEQ ID NO: 799 - DNA, 684 bp, Bacillus licheniformis
gtgaaatttgcggtgattgtgctgcctggctcaaactgcgatatcgatatgttccacgcgattaaggatgagcttggcgaagaagctgaatacgtctggcatacagaaacaagtcttgatgaatatgacggcgtcctcattccgggaggattctcatacggtgattatttaagatgcggcgcgatcgcccgcttcgcaaatattatgccggccgtcaaaaaagcggctgaagaagggaagccggtgctcggcgtctgcaacggatttcaaattttgcaggagctcggtcttttgccgggcgcaatgagacgcaacaaagatttgaaatttatctgccgtccggttgaactgatcgtccaaaacaatgaaacgctttttacatcttcctacggcaaaggcgaatccatcacgattccggtcgctcacggcgaaggaaacttctactgtgatgaagaaacgcttgccggattacaagaaaacaatcaaatcgctttcacatacggaacggatatcaacggaagcgtcgccgatattgcaggcgtcgtcaatgaaaaaggcaatgtattaggcatgatgcctcacccagaacgcgcagtcgattctctgctcggaagcgccgacggtcttaaactgtttcaatctatcgtgaaaaattggagggaaactcatgtcgctactgcttga

SEQ ID NO: 800 - DNA, 2229 bp, Bacillus licheniformis
atgtcgctactgcttgaaccaagtcaagaacaaattaaggaagagaaactttatcagcaaatgggtgtcagcgatgacgagtttgccatgattgaatcgattctcggaaggcttccaaactatacggaaatcgggattttttcagtcatgtggtcagagcactgcagctacaaaaattccaagccgatcctgaaaaagttcccgacaaaaggcgaacgcgtcctgcaaggaccgggggaaggcgcaggaatcgtcgatatcggcgacaatcaggcggttgtcttcaaaatcgaatcgcacaaccatccgtcagcgattgagccttatcagggagctgcaacgggtgtgggcggcatcatccgcgacgtcttttcaatgggcgcgcgtcccatcgctgttttgaactctctccggtttggcgaactcacttcaccgcgtgtgaagtacttgtttgaagaagtagtcgcgggcattgccggatacggaaactgcatcggcattccgaccgttggcggggaagttcagtttgacggctgctatgaaggcaatccgcttgtcaacgcgatgtgtgtcggtttaatcaaccatgaagatattaaaaaagggcaggcgaaaggcgtcggcaataccgtcatgtacgtcggcgcgaaaacggggcgcgacggcatccacggcgcaacgttcgcctcagaggaaatgtctgaccaatcagaagaaaagcgctcggccgttcaagtcggcgatccgttcatggagaagctgcttcttgaagcgtgtctggaagtcatcaaatctgacgctttggtcggtattcaggacatgggtgcggcaggcctgacaagttcaagcgcggaaatggcatccaaagccgggtctgggatcgagatgaaccttgacttgattccgcagcgcgaaacaggcatgacgccgtacgaaatgatgctttcggaatcccaggagcgcatgcttttggttatcgaacgcggccgcgaacaggaaatcatcgatatttttgacaagtacgatcttgaagccgttgctgtcggccatgtgactgatgacaagatgctgcgccttttccataacggagaaatggttgccgagcttccggtcgatgctcttgcagaggaagcgcctgtttaccataagccgtcaaaagtaccggcttattacaaagagttccttgaaacagacgtccctgcaccaaaagtcgaagatgcgaaagaaacgcttctcgagctgctaaagcagccgaccattgcgagcaaagaatgggtttatgaccaatatgactacatggtcaggacgaacacggttgtcgcaccgggctctgatgcagccgtcctcaggattcgcggcacgaaaaaagcgctcgccatgacaacggactgcaatgcccgctacttgtaccttgatccggaaacaggcgggaaaatcgccgtcgcagaagcggcccgcaatatcgtctgctccggagcagaaccgcttgccgttacggataacctcaactttggaaatccggaaaagccggagatcttctggcagatcgaaaaagcggcagacgggatcagcgaggcgtgcaacgtgctcagcacaccggtcatcggcggaaacgtctctctctacaacgaatcaaacggaagcgcgatctacccgacgcctgtcatcggaatggtcggactgatcgaagatacggagcatattacgacacagcactttaaagcagcgggcgatttgatttatgtcatcggcgaaacattccctgagttcgccggaagcgagctgcaaaaactgaccgaaggaaagatttacggcaaagcgcctgcgattgacctggaagtcgaacaatcgcgtcaaaaagctcttctgaaagcgatccgctccggactcgttcaatcggcgcatgacgtctcagaaggcggcatcggcgtggcgctggcggaaagcgttatatcttctcaaaggctcggcgcccatgtgacgcttgcaggcgaacctgcattgttattcagcgaaacacaatcacggtttatcgtctctgtgaaaaaagaccatcaagaagcgttcgaaaagcttgtcaaagacgccgatctaatcggtgaagtaacgtcagacagcgtgctggctgttcaaagccaggaaggacaacaatggattcatgcgcagacagaagagctcgaaagcgcatggaaaggagctatcccatgcttgctgaaatcaaaggcttaa

SEQ ID NO: 801 - DNA, 1431 bp, Bacillus licheniformis
atgcttgctgaaatcaaaggcttaaatgaagaatgcggcgtatttgggatttgggggcatgaagaagcaccgcaaattacgtactacggccttcacagccttcagcacagaggccaggagggcgccggcatcgtcgcgacagacggcgaaaaaatgtccgcccacaaaggccaggggctgattaccgaagtttttcaaaacggtgagctcaaaaaggtgaaaggaaagggagcgatcggccacgtccgctatgcaacggcgggcggcggcggcttcgaaaacgtccagccgttccttttccattcgcaaaacaacggcagccttgcgcttgcgcacaatggaaacttagtgaacgccactcagctaaaacagcagcttgaaaaccagggcagcatttttcaaacgtcttcagatacggaagtgctcgcccatttaattaaaagaagcggccacttcgagctgaaagatcaaatcaaaaacgctctttctatgctgaaaggcgcttatgctttcctgatcatgacggaaaaggaaatgaacgtggcgcttgatccgaacggactcagaccgctatctgtcgcaatgcttggcgacgcgtacgtcgtcgcttctgaaacgtgcgcatttgatgtggtcggcgcgacatatctgcgcgatgtagaaccgggcgagatgctgatcatcaatgatgaaggcatgaagtcagagcggttctccatcaacatcaaccgttcgatctgcagcatggagtacatttatttctcaagacctgacagcaatattaacggcattaacgtccacagcgcgagaaagaatctcggcaaaaagctcgccgaggaatcaggcattgaagcagatgtggtgacaggcgttcctgactcaagcatttcagcggcgatcggctatgccgaagcgacgggaattccttacgaactcggattgatcaaaaaccgctatgtcggcagaacgttcattcagccgtcacagtcgctcagggagcagggcgtgagaatgaagctgtcagccgtccgcggggtcgttgaaggaaagcgcgtcgtcatggtggacgattcaatcgtgaggggcacgacgagccgcaggattgtgacgatgctgcgcgaagccggagcgacggaagtgcacgtcagaatcagttccccgcctattgcccatccgtgcttttacggaattgacacatcgacgcacgaagaactgatcgcgtcctctcattcagtggaagaaatccgtcaggaaatcggcgccgatacattgtcattcttgagcattgaaggactcctttccgggatcggaagacagtatgaaggtgaaaactgcggccagtgcatggcctgttttacaggaaaatatccgaccgaaatttatcaggatactgttcttcctcacgtgaaagaaatcgttttgacaaaataa

SEQ ID NO: 802 - DNA, 1041 bp, Bacillus licheniformis
ttgtctgaaagctataaaaacgccggggttgatattgaagccggatatgaagccgtaaaacgaatgaaaaaacatgtggaaagaacgaagcgaatcggcgcaatgggcggacttggcgggtttggcggcatgtttgacctgtcggaactgccgtacaaacagccggttctcatttcgggaacggacggtgtcggcacaaaactgaagctcgcttttgcgatggacaagcatgacacgatcggcatcgatgccgtcgcgatgtgtgtcaacgatgtgctcgctcaaggagcggagccgcttttcttcctcgattaccttgcggtcggaaaagccgatcccgtcaaaattgaagagatcgtaaaaggcgtcgcagaaggctgcgtacagtcgggatcagcgcttgtcggcggagaaacggcggaaatgccggggctttatacagaggatgaatacgatatcgccgggttctcggtcggagctgccgaaaaagatggcatcgtcacgggcgaaaatatcagcgaagggcaccttttaatcggactttcttcaagcggccttcacagcaacggcttctctctcgttcggaaagttcttcttgaagatgccggtctgaaccttgatgagacgtatgcaccttttgaacggcctcttggcgaagagcttttagagccgacgaaaatctatgtcaagcctgtccttgaagcggtgaaatcaggcaaaatcgccggcatggcgcacgtgaccggcggcggttttatcgaaaacctgccgcgcatgatgcccgatggcctcggcgttgaaatcgacatcggctcctggcccgttcctcctatcttcccgttcattcaggagaaaggcggcctgaaatccgaggaaatgtttaatgttttcaatatgggaatcggctttgttcttgcggtgaaagaagaggatatgacagacgtgatccaaacgctcgaaaacaacggtgaaaaagcctatctcatcggcagagtgaaagccggaagcggcgttgtgtttggcggtgccggtctttcatga

SEQ ID NO: 803 - DNA, 588 bp, Bacillus licheniformis
atgaaaaaattcgcggtatttgcatcaggaagcggaacgaattttgaagcaatcgaaagaagaatgagagaagagaactgggatgccgaaattgtcctcgtcgtctgtgacaagcccgatgcgaaagtgcttgaaagggcggaaaaagccggaatcccgtcgttcgccttccagccgaaatcgttcgacaataaagctgcatttgaacaagtgatcgttgaacagctccgccttcacggagcggaatggattgtgctggcggggtatatgaggctgatcggcgatacgcttctttcggcttaccggaataaaatcatcaacatccatccgtcgctcctgccggcgtttcccggcatcgacgcggtcggacaagcgtacagagcaggcgtgaaagtggcaggcatcacggttcactacgttgacgaaggcatggacaccggtccgattatcgcccagcgcgccgttgagcttgaaaaaagcgaaacactcgcgtctcttgaagaaaagatacacaaattggagcatgaactttatcccgaagtaatcaaagagcttcttgaactaaatggcagaggtgaaaaggaatga

SEQ ID NO: 804 - DNA, 1539 bp, Bacillus licheniformis
atgacgatcaaacgcgcattaatcagcgtatctgataaaacgaacattgtcccttttgtaaaagaattgacagagcttggcgttgaagtgatttcaacagggggcacaagcaaacttcttcaggaaaacggcgttgacgtcatcggcatttctgaagtgacgggctttcccgaaatcatggacggccgtctgaaaacccttcatccgaatattcacggcgggcttcttgccgtacgcggcaacgaaaagcacatggcgcagctgaatgagcagggtatccagccgatcgaccttgtcgttgtcaatttatatccttttaaagaaacggtttctaaagaagatgtcacattcgaagaagcgattgagaatatcgacatcggcggccccggcatgcttcgcgctgcagcgaaaaaccaccaggacgtggcggtcatcgtcgatccccgcgattacagccctgtgctgaacgacttgaaagaaaacggcagcgtctctcttgagaaaaaacgcgagcttgcggcgaaggtgttccgccacacggcagcatatgacgcgttgatcgctgactatttaacaaatgtaaccggtgaaaaagagcctgaacagttcaccgtcacttttgagaaaaaacaatcgctccgctacggcgaaaatccgcatcaggaagcagtcttttatcaaagcgcgctccctgtcaaagggtcgatcgcttcagctgaacagctgcacggaaaagagctttcctacaacaacatcaaagacgcggatgcggcacttcaaattgtccgcgagttcaccgagccggctgcggttgccgtcaagcatatgaacccttgcggcgtcgggacgggcaacacgatcgaagaggcgtttaacaaagcatacgccgctgacgaaacatcgattttcggcggcatcatcgccctgaaccgcgaagtggacaaagcgactgctgaaacgcttcacaaaatctttttggaaatcattatcgcgccggcattcagccaagaagcgcttgatattttaacatccaagaaaaaccttcgcctcttgaccctcgatgtcaatcagcctgtgaaaaacgaaaaacagctgacatctgttcaaggcgggctcttgattcaggatctggatatgcacggctttgacgacgctgacattacgattccgacgaaaagggagccgaccgaacaggaatgggctgacctgaagcttgcttggaaagtcgtgaagcacgtcaaatcgaatgcgattgtcctggcaaaggacgatatgacgatcggcgtcggcgccgggcaaatgaaccgcgtcggctcggcgaaaatcgcaattgagcaagccggggagaaagcaaaaggaagcgcgctcggatcagatgccttctttccgatgcctgatacggtcgaagaagcggctaaagccggtgtgacggcaatcattcagccgggcggctcggttcgtgatgaagattcaattaaaaaagcggatgaatacgggatcgcgatggtgttcaccggaatccgccatttcaaacattaa

SEQ ID NO: 805 - DNA, 1269 bp, Bacillus licheniformis
gtgaacgtattgattatcggcagaggcggcagggagcacacgctcgcctggaaagcggcgcaaagccctcttgtcggcactgtatatgcggcgcccggcaatgacggaatggccgggaccgccgtactcgttgatcttgacgaaggcaatcacgaagggcttctcgctttcgcaaaggaaaacaatatcggactgacgatcgtcggtcctgaggtccctttaatcgaagggcttgttgatgcatttgaagaagcgggccttccggtgtttggaccgtcgaaaaatgcagctgtgattgaaggaagcaagcagtttgccaaggatcttatgaaaaaataccagattccgacagcagaatacgaaacgtttacatcttttgaaaacgcaaaggcgtatgttgaggaaaaaggcgctccaatcgttattaaagccgacgggcttgccgccggaaaaggcgtcacagtcgcgatgacagccgaagaagcggttcagtgtctgcatgactttttagaagatgaaaagttcggcgaagcaagcgcatctgtcgtcatcgaggaatttttgagcggtgaagaattttcgctgatggcttttgtcaaaggtgagaaagtgtatccgatggtgattgcacaggatcacaagcgggcatttgacggagacaagggcccgaatacagggggaatgggcgcgtattctccggtgccgcagatttcggatgcggtcgtcgaagacgccgttaaaacgattttggagccggcggccgaagcgatggttaaagaaggccgttcgtttacgggagtcttgtatgccgggttaatgctgaccgaaaaaggaacaaaagtgatcgaattcaacgcgagattcggggatcccgaaacccaggtcgtcctgccgcgtcttgaatcagaccttgtccaggtcttggttgatctcctcgcagacagagaagtggagctgaagtggaaggatacggcggcagtcaccgttgttcttgcatctgacggctatccggaaagctatgaaaaaggcgcgccgatcggcacgcttgagcctgacatggagcagaccgtcgtctttcacgcaggcacgaaaaaaagcggcgatcagtttgtgacgaacggcggccgcgtcgccaatgtcaccgcgtttgcagagacgtttgatgcggcaagggaagcagcctatcaagcggtggatcgagtaagaaaaccggggctgttttaccggatggacatcggctcgcgtgcgctcaaggcagcacagaaataa

SEQ ID NO: 806 - DNA, 600 bp, Bacillus licheniformis
gtgattgaggaggcggctgaattggctgacagctaccgcggggacaagcggatcacaaaatcgaaaacaaacttaaaaaaagccttgtttgaactgcttgctgaaaaagaatggggaaaaatctctgtgcaggatattacgcaacgggcaaacttgaatcgaacgacattttatcagcattatcaagataaatacgatttgcttcatcaacatatgagggatatgtttgaggcgatgaaagaggatattttttcgccgcttgatatagatagcagcgggaaaaagccagaagcatactggtatgtgctgcgcttttatcatcatttgcaacagaacagcggcgattttgcgattatcatcaacagaagatatgagctgaacattaaggagctgctcaatgatttttggaatgacagctttttgacgggaatcaaaaaaacggcagctgctgatactgaccgctcagtgcctctcgacattcagcggcggtttgtgatttccgccttcgcgggcacagccgcatggtgtcttgaaaacggcatgccttatccgcccgaattgatggctgaatcgatgatcaagatcatccaaaaaaattga

SEQ ID NO: 807 - DNA, 1225 bp, Bacillus licheniformis
atgagtcaaacaaaacagcagaaccccattcagaaagcgctgattaacggaaagaacagacaagacccgtatgatccgtttccgtggtataaaaaaatgcgcaccgaatcaccgattcactatgatgaagacagcaaagtgtggagtgtgttccgctatgacgatgtcaaaagagtgatcagcgacaaagactttttttcaaatcaattccctcagcttggaactggcaatacgtttgcgaaaacgatgatcagcatggatccgccgaaacacacgagaatcagatcgatcgtcaacaaggcttttacaccgcgcgtcatgaaggagtgggagccgcgcattcgcgaactgacgaatgaattgctcgctgatgtccgcggcagggaagagatcgaccttgtacaggatttttcatatccgttgcccgtaatcgtcatttcggaattgctcggcgttccttcggtgtataagcatcatttcaaagaatggtccgacctgttggtcagcctgccgaagagcgatcggccggaagatgtgaacgagtggaaaaacatcagggaccaaggcgaagaagagctgaccgcattctttgaaaagatgattgaagagaaaagacaaaacctcggcaatgacctgatttcgcttttgatcaaagccgaacaagaaggggacaagctgtcccctgatgaattggttccattttgcaatctgctcttgatggcggggaatgaaacgacgacgaatttagtttcaaatgcggtctacagcaatctcgaaacaccgggcgtgtatgacgagctcgccaggcatcctgaactgattccgcaggcagtcgaggaagccgtccgtttccgggcgccagcgccgatgattgtgcgcttcgttaaacaggataccgagatcagaggagtaagcttgaaaaaaggagaaggtgtgatcgctttccttgcttctgccaaccgtgatgaaacgaaaatttgagagggcgcacgaatttgatattcaccgccatccgaacccgcatatcggatttgggcacggcatccacttttgtttgggcgccccgctcgcaaggctggaagcggcgatcgccattgaggcgctcttaaagcagtatgcctcgatggaaaagcttgcggtcgtgccgatggccgacagcagcatgtacggcttgaaacatttccgtctgcgggtgaagtcagcaggggaaacggcgcctaactaa

SEQ ID NO: 808 - DNA, 111 bp, Bacillus licheniformis
gtgtctaagctcggaaaatggctgaagcgtgaattggtgaagaaaggtctgcctttggcgaaagaaaaattaattccgattttgaaagaaaaaatgaaaaagaaacgataa

SEQ ID NO: 809 - DNA, 447 bp, Bacillus licheniformis
atgaaaagaattcttatagttcttgccggaattggccttttaggtgcgggcggatgcggaatgcttgatcaggtgaatgacggattgaactatacaaatgaagcggccggctatatccaaaaagtgaagacatttgcggaggaggcgccttccttggctgaacaggctgtaaacgacacgggtgcaaaagaaaagctggaaactcagcttgagtctatccagcaggctgcagccgattttaatgaattaacccctcctgatgccgcagccgaggttcataacaccatcgagaagcataatgaaacactgcaaaaaagcgctgaggatgttttgaaaagtgttgaggaaggaaaattaacagtcgagaagctggagcagtcagaattggtgcaaagcgctcagcagatcagcgatgtgatgggccagattgaaaaattgaccgaatag

SEQ ID NO: 810 - DNA, 417 bp, Bacillus licheniformis
atgttgcccaagcactcaaaagatcagcgtaaacagcttgaagtcgttgccttaagtgaacttgtccctgaagatcaactggtcaggaagatggaagaagccatggatttttcatttatttatgaaaaagttgcccctctttattcttcaaaagcacgtccaagcattgatcccgttgtattgatcaaaatggttctgattcaatacgtgtttgggcatcgctccatgcgcgaaaccatcgaacgggtttttgcggatttaaaacacaagcgtggcctgcgctggacaaccctgcggggaaagaaaaaattgtccatgcaggcgatgcttgttttcgctgccatgaatctaaaaaactggcgaattggacgtggaaaggccctaatcgccagccttttcatcgaaaaaacaaaataa

SEQ ID NO: 811 - DNA, 231 bp, Bacillus licheniformis
atgaagcaaaacatcggactgtttgacgccgtttttcggattgcctgcggactgacgatcctgtcggcggcagcggcaaagtttacgagaaaaccgtggtgcagaatgacgcttttctgcatgtttatgggggcgatgaaggccgcttccggcattttacgattttgtcccatgacatatgtttgccaaacgtatatgaagcaacagggagagactggcgaacaatcataa

SEQ ID NO: 812 - DNA, 1740 bp, Bacillus licheniformis
atgtccgaacgcaccttaatttggaaaaacaagcacatcagatcgcaagttgatgttgtaagttcaaggctgcagccaacgctccttttacgaaatgcatctgtactgaacccgtatgtaaagcaatggattccagcaaacgtatggattcatcatgacagaatcgtttatgtcggccgtgacttgccgaagacggctgttaaaactacaatagattgtgaaggaaaatacattgtacccgggtatattgagccgcatgtacatccttttcaaatttataatccccaaactttggccgaatatgtgtcacagtttggaacgaccacattcgtaaatgacaacttgtttctgcttttacattgcggaaaaaagaaagcgttttctatactggaggaactgaaaaaacagcctgtccactactattggtggtcaaggtatgacttgcagaccgaagtgttgaatgaagatcaaatcttatcgatcgattaccgaaaacattggggagaacacccggatgtcatccagggaggagaaatgacaggctggccgcgccttttggacggcgatgatctgatccttcattgcatgcagtgcacgaaaagaaggagaaagcggatcgagggccattttccgggggcatcggaaaaaacgctgacgaagatgaagcttttcggcgctgacgccgatcatgaagccatgactggaaaggaagtgctgaagcggcttgaacttggttaccacgtcggcttgaggcagtcttccatccgccctgatttgcgaaaaattttgcgcgagctgcacgaagaaggctttcaccattatgaccatatgttttatacaacggacggcgcaacgccgaacttttataaagaaggcatgacaaacaagctgattgaaatcgccatcgaagagggcgtgccgctgatcgacgcctataatatggcttcgtttaatatcgcgaagtattaccatatggaggacatccttggggtggttgcaccgggcagatacgcgacgctcaacattttgaatagccctgatgaaccgaatccggagacggttttggcaaaaggtcggctgatcaaatcaggcggcataaatatgaatgcgttttcagttccggattggcaaaaagggggtcttgtccctctgaacctttcatatgatctaacgatggatgatttgcagttttccatgccgctcggcttgaaaatgaggaattccgtcattatggagccttatacgattgagattgacaactctgtgaaccagctttcttttgatcatgatgaaagctatctctcgctgttcgacaaatacggaaagtggcgtgtcaatacgatgctgaaaggctttgcaacccgcatccaaggtttcgtcagctcctattcgacaacgggagacattatcgcgatcggcaaaaacaaggaagacatgcttttggccttcaaacggatgaaagaaatcggaggaggtatcgtattagcggaaaacggaaaaattctgcacgaaattcctcttcatttaagcggcggcgcatcaattgagacgtatgaaaaggtgcttgaaagggaaaaagcgttaaaagagcttctgtttgaaagaggctatacgttcgacgacccgatctacaccctgctctttttgcaaagcacccatctgccttatatcagggtgacgccgaaagggatctttgatgtgatgaaaaaaactgtactctttccatcgataatgcgttaa

SEQ ID NO: 813 - DNA, 990 bp, Bacillus licheniformis
atggtgaatcgatatgtaagagtactgctttgttttgcttcgcttttactgcttgcatcgtgccagtcgcaggaacagcaggaaaaggaaaagaacattcatccgctgacagggttgaaggcggacggagatattcggcagcggcccattgccgttgtggtgaacaatcattcaaaagcaaggccgcagtcgggattaagcaaggctgacattgtcattgaagctctcagtgaaggaccgatcacacgattgttggcgatctatcaaagcgatatgcctgaagcggttggcccagtccgcagcgcccgggagtatttcattgatttggctctcggttttgacagcatccttgtgcatcacggctggagtccgggggcaaaagaccgcctgttgaacggcgacgccgatcatatcaatggaatggatcacgacgggaccctgttttggagagccgattttcgggaagcgccgcataattcgtacacatcatacaaaaacgtaaagcaagcagcagatgacaaaggatatgccatcgaaacccgcacagaaccgctcacttttaaagcaagccctgataaaccttcggatgcgctttattctatacggttagattatggaacaaaatccgttacaaaccgtgtcgaatatggttatgataaaaaggttgaaggctatgtgagaaagtcagacggcgttttgacaacagaccttgaaacagaagaaccggttgttcttcaaaacattctaatagcggaagccgaacatcatatgaaagatgcgtacgggagaagggatattgaccttcgttcaggcggaaaaggactccttctgcaaaacggggaagtccatcggatcagctggaagaacgaaaacggccggatcataccgacggcggacggcaaaaccgttccgttcgtgccgggaaaaacgtggatcaatatcgttcccgatctcagcaaggtttctattagcaaaggagaaggtgtgtaa

SEQ ID NO: 814 - DNA, 312 bp, Bacillus licheniformis
atgcagatcgataaattgcgcgggagagagctggaccagctttttcaatccatactatcactaaaagatctcgaagaatgctatcgttttttcgatgatttatgcacaataaatgaaattcaatcattggctcagcggctcgaagtagccagaatgctgcgcgacggcaacacgtatcataaaattgagacggaaaccggagcgagcaccgcgaccatttccagggtaaagcgctgcctgaactacggaaatgacgcttatatcatggcgctggaccgcgtcaaagcaaatcaatctgaatcatcttcatga

SEQ ID NO: 815 - DNA, 687 bp, Bacillus licheniformis
atgtacgatattaccgagtggaagcacgtctttaaactcgatccgaataaagatattacggatgatcagcttgaacagctgtgcgaatccggaacagacgcggttttgatcggcggaagcgaccatgtcacagaagatgacgtccttcggctgatgtcaaaggtgcgccgctttttagtgccgtgcgttcttgaagtatcgacgatcgatgcgatcgtcccggggtttgacctctattttattccgactgtgctcaacagcagggatacagactggattgccggcttacataaaaaggcgatgaaagaatacggcgagctgatgtcgccggaagagattgttgttgaagggtactgtattttgaatcaggactgcaaggctgccgctttgacgaacgcagataccgagcttgacattgaggatattaaagcgtacgcccgcgtagctgaacatcttttccgccttccggtcttttatcttgaatacagcggcatgctgggtgattcagagaccgttaaggaaacgaaagccgtgcttcaggaaacgacgctgttttacggcggcggcatcaaagatgcggagacggcggttaaaatggctgaacacgccgatgtgatcgtagtcggaaacgcgatttatgagaacttcgaagaagcgctgaaaacggtacaggccgtaaaaggatga

SEQ ID NO: 816 - DNA, 2220 bp, Bacillus licheniformis
ttgaattacattagcgaccaattattaagcggattgaacaagatgcagcaggaagcggtcaaaacgacggacggtccgcttttgatcatggcaggagcaggaagcggaaagacgcgggtattgacgcaccgcattgcgtatttaatggcggagaagcgcgttgccccgtggaacatactggcgattacatttacgaacaaagcggccagagaaatgaaagaacgtgtggaaagcattctcggaccgggagcggatgacatctggatttcgacgttccacagcatgtgcgtcagaattttgcggagagacatcgacagaatcggcatcaaccggaatttctcgattcttgatacgtctgaccagctttccgtcattaaaggaatcctgaaagaaagaaacatcgatccgaaaaaattcgatccgagaagcatactaggatcgatcagcagtgcgaaaaacgagttgatcgccccggaagaatacgagaaaacagccggcggtttttttgaacaagtcgtcagtgatgtctacaaagattatcagaagaaactgcggaaaaaccagtcgctcgattttgacgatttgattatgacgacgattgtcctgtttgaccgggtgccggaagtgcttgaatactaccagcggaaattccaatacattcatgtcgatgagtatcaggatacgaacagggcgcagtatttgctcgtcaaaaaaatggcgcagcgcttccaaaacatctgcgttgtcggggactccgaccagtcgatctacagatggcgcggagcggatatcgccaacatcctgtcgtttgaaaaagactatccgaatgcgagcgtcattctgctcgaacaaaactacagatcgacaaagcggatattgaacgcggccaatgaagtgattcagaacaactcaaacagaaagccgaaaaacctctggaccgaaaatgacgaaggggcgaaaatctcctacttcagaggcgacaacgaatttggcgaaggccaatttgtcgcgggcaaaatcagggagctcgtcggctctggaaaacgatccttctcagatatcgcgattttgtaccggacgaacgcccagtcgcgggtcattgaggaaacgctgatgaaggcgaacatcaactacaacatcgtcggcggcacgaagttctatgacagaaaagaaatcaaggacatcctcgcgtatttgcgcctcgtcgcaaaccctgacgacgatatcagctttgcgcggatcgtgaacgtcccgaagcgcggcgtcggtgcgacttcagtcgataaaatcgcggcctatgccgacatgaacggtatgtctttatttgaagcgctcggccaggttgactttatcggcctcagtgctagagcggccaacgcgcttgatgagttcagacagacgatcgaaaacctgacgaatatgcaggaatacttatccgtcacagagcttacggaagaaatccttgaaaaaaccgaataccgcgaaatgctgaaagcggaaaaatccttggaggcgcagagccgccttgagaatatcgacgaatttctctccgtaacgaaaaactttgagcagcaaagcgaagacaaatcgctcgtcgcttttttgaccgatttggcgctcatcgccgatatcgatcagcttgatcagaaggaagaagagaccggaaatcaagacgcggtcatcttaatgacgcttcatgctgcaaaaggactcgaattcccggtcgtgttcctgatggggcttgaagaaggagtgttcccgcacagccgctccctgatggaggaagcggagatggaagaagagcggagactcgcgtacgtcggcatcacgagggctgaggaagaactttatttaacgaacgcgcggatgcggacgttgttcggaagaacgaatatgaacccggaatcaaggttcattgcggaaataccggaggaattattggacaatctaaacgagaagaaaaaagatctgaaaacgccgtttggaagaaagcccgagcggagaggccccgttacccgtccggctgcatcgtacagcaaaaccggcggcgacggcgtcaattgggcagtcggcgacaaagcctcccataaaaaatggggcgtcggaaccgttgtcagcgtcaagggatccggcgaatcgacagagcttgacatcgcctttccgagcccgaccggagtgaagcgtcttctcgcggcctttgcgccaattgaaaagcaataa

SEQ ID NO: 817 - DNA, 2004 bp, Bacillus licheniformis
atggaaaaagaagcagctaaacgccgtgtggaacaactgcatgcattgattaacaaatacaactacgaatatcacacccttgacgatccaagcgtgcctgattccgaatatgacaagctgatgaaagagctgattgctcttgaagaagagcatcccgacctgaaaacgccggactctccttctcagcgcgtcggcggagccgttttggacgcctttcaaaaagtgcagcacaaaacgccgatgctgagcctcggcaacgcgtttaatgaagaagatctgcgcgactttgaccgccgcgtccgccaggcggtcggagacgttgaatacaacgtcgagtttaaaatagacggtcttgctgtttcactgcgctatgaaaacggcgtatttgtcagaggtgcgacgagaggcgacggtacgacgggcgaggatattacggaaaatttgaaaaccatcagaaacattcccctcagaatgaaacgcgatctttctattgaagtgcgcggcgaagcttttatgccgaagcgctcctttgaactgctgaacaaagcgcggatcgaacgtgatgaagagccgttcgccaacccgcggaacgccgctgccggttcattaaggcagctcgatccgaaaattgccgcgaaacgaaatctcgatatcttcgtctacagtatagcggagcttgatgaaatgggcgttgaaacgcaaagccagggactcgatttcctcgacgaactcggcttcaaaaccaatcatgaaagaaaaaaatgcagcacgatcgaagaagtcattgagattgtcgaagagctcaagacaaaacgcgccgacctcccgtatgaaatcgacgggatcgtcattaaagtcgattcccttgaccagcaggaagagctcggctttacggcgaaaagcccgcgctgggcgatcgcctacaagtttcctgccgaagaggttgttacgacgcttttggacattgaattaagcgtcggccggacgggcgcagtgaccccgactgcgattctcgaacctgtaaaagtggcgggaacgaccgtccaaagagcttctctccacaacgaagatttaattaaagagaaggatatcagactgctggacaaagtcgtcgtcaaaaaggcgggagacatcattccggaggtcgtcaacgtcctcgtcgaacagcggacgggcaaagaaaaagaattcaacatgccgaaggaatgcccggaatgcggaagcgagcttgtcagaatcgaaggagaagtcgcgcttcgctgcattaatccggaatgtccggctcagatcagggaaggcctgatccattttgtttcccggaatgcgatgaatatagatggtctcggcgagcgcgtcatcacccagctgttccgcgaagacctcgtccataatgtcgccgatctgtataagctgacgcgcgagcagctgatcaatctcgagcggatgggggaaaagtcgaccgacaacttattgaattcgattgaaaaatcgaagaagaactcattggaacggcttctcttcggactcggcatccgcttcatcggcgccaaagcggccaagacgctggcgatgcattttgaaacgctcgataagcttaaaaaagcgacaaaagaagaattgatcgaagtcgatgaaatcggcgacaagatggcggacgccctcgtcacctattttgaaaaagaagagattctgaagctgttggacgagcttgaagaactcggggtcaacaccgtgtataaaggcccgaaaaaagcggccgctgaagcgagcgattcgtattttgcggggaaaacgatcgtcctgaccgggaagctcagcgagatgtcgcggaatgacgcgaaagcggaaatcgaagcgctcggcggaaaaatcacaggcagtgtaagcaaaaaaaccgatctcgtcattgccggcgaagcggcaggcagcaaactggcgaaagctgaagacctaaacatcgaagtatgggatgaggcaagactgatcagtgagctaaagaaataa

SEQ ID NO: 818 - DNA, 1191 bp, Bacillus licheniformis
ttgaaaaagatattatgtttggcggctgctgcgggtatgctcatgctctcagcctgtgcgccgaattttgggggagaagaagagcaggagatggtgcagaaaacggataagtcgaaagaaaaagccatcattccgaaatacaacatctccgattcttattataaaatggttcttcctttcaaggcggggaaagcccgcggcttgacgaccgaacgcctgaatacgcggctggatatcgatgaatttgagacaggcatgatgcgccttgcgcaagattcattttctactgacgattacctttttcaagaaggacaatacctggatgaggatacggtatcgagctggctcgcccgcaaaaaaacgggggacgacttgaaaaaagcggagaaagacgataaaaacttcaaaaacctcggactgaacccggccctttccggaagcggatcaacagagaagcaaaacgaagaaagcccgatatacctcgcccatatgcttgagcacgactacctcgtccgcaaagacaaggatacgattgagctcggaggcgtcgtgatcggccttgcgctgaactctgtccactactaccgcgaaaatgtcggcgacccgcaaaaagaagtgaccatcagcgacaaaaagctgaggcaggaaggcgaaaaaatcgctgaagaagtggcgaaacggatcagaaacatggatgatctaaaaaatattccgctgacgatcatgctttacaagcaggcgcctaagtcatcgatcgtccctggaaactttatcgccaaaaccgatgtgaaagcagggacaagcgagatcggcggctgggataaaatcaatgaagagtacacgttcttcccttcaacagaaggttcggagaagcatccggatgacgcggagctcttcaaacgctttaaaaacaaagtcgatacgtattttccaaactacacaggggttgtcggcacggctctctataaagacgaccaaatgcaggacatgaaaatcaacatcccgatgcagttttacggcaaaagcgaagtcatcgcctttacccagttcttgaccggtgaagtgatggactactacggcaaaagcggactgaacgttgagatcaacattaattcgtcagccgggcaggaagccgtcattctgaaaaagccgggagacaaagaaccgaccgtccatatttatgattcataa

SEQ ID NO: 819 - DNA, 927 bp, Bacillus licheniformis
atgtgggaaaaattttactctaaaaatggtttggcagctaaaaatattgctaaagaattgatgaatatcaaagcaggtgaaaaaattccccgtatctcagactactgtcataagttatccatcggcagggggactgtgcaaagtgcgctgaatttattagttgatatgaaagcgattcaattggaggctagagggcatttaggaacgtttttggtaagtaaggataacaatttattacttgagattgcaggtattgcaccattaatcggctcaatgccacttccgtattcaagaaaatatgagggtctggcaacagggattgtggaagggtttgaatcaaccggaaaaacagttaacttgatctacatgcgtggcggagtgaatcgaatcgaagcagtccgaacaaaaagaagtgattttgcaattgtttctaagatgacggcagatcatatcatagtagaatatccaaatttgaaaattttcaaaaaattcggggaaagtagttatgtatcttcccataaaatcttcttagctcatccagatgaggaaataggcaaggatggcgtaagagtaggtgttgatttggaatctctagatcagaaacaattaacattggctgaatttgaaaacaaaaatgctgaatttgtcaatgtgaattatatgcagctctttgatatgcttctttcaaaacaaattgatgcagcagtttggaatgctgatgacaaaagaatgattcaaacgtttaaagcaatcgattttttttcaccgaaagcaaagaaaatttccaaggatacaacagaagccgttattgttattgaaggagacagagaaaaagaaatagcagaaaagtggaatttggttaatgagaaacagatattagacacccaaaaaagcgtagaaaagggagagaaaataccgcgctactaa

SEQ ID NO: 820 - DNA, 366 bp, Bacillus licheniformis
gtgaatcaaatacagctggaagaaaagttgtctattttactaacgagtcgagtgattacaaaaaatgctttcaacacaacattgaacacatttgttttcttatcagaaaagctgaaaaaggaggtgatcaaagactctgaaatgttttggacgcacatggcgatggctttaactagaattaaggagggagaaagcgaagaagttcctgcaaatgccatcatcaatgaaatgtatgaaacaccatataaaagtgcaatagaagaagtgatagactttatacattcactggcaggtctagaacttccagaaggtgagctcgtttatttttatcttcatcttcataaagtcatagaatctaataaatag

SEQ ID NO: 821 - DNA, 360 bp, Bacillus licheniformis
atggtgagaattgtaataggcggacagttgaaaaaacaagcgattgaaaaacttgttaaagaaattgggggaaataatgtagaagtattggtcaaaggtgatttggacgctgttatggctgtgaaaaacaataaggcagattattatattggcgcctgtgaaaccggatctggcggtgctcttgcaatggcaattgcattattaggtaaagataaatgcgtcaccttggcttctccaagtaccataaaaaacaaggaagagatcgagaaggaagtagaaagcggcaaaattgcttttggtttcaccgcttcaacatcacaaaatatattaaacattttaattccttatttattaaaataa

SEQ ID NO: 822 - DNA, 1302 bp, Bacillus licheniformis
atggacctttctttgattcaatgtcttgtcatagcggctgttggtgcattaggttctatactagtcaatcgcggggtagctgtatttaatgatggtttgcgtccgattatgcccgaatacctagaggggagaatgacaagaggggagcttgctgcaacaagctttgcattaagttttggattaatcatagggtttggtattccgctttccataggagcaacaatcattattggacacagtattttattggcttgtgacatcattggcatttggactccggaaaacaaaataggcatggcaactgcaggagttattggtgccgtttatagtattgggatcgttttaggattgcaatttgtagtagatttatttggcaagtttcccgtgaattttatagactctttaagtcttattggccagcctattattatcgcatttacagtatttccagctgtagcggtcggatatcagcacggtttaaaaaaagccgccgtcactgcaattgtaactttagcttcttttctcttattcgaaaagtttggaacatttcaagcggcgggatatgaaatttcgctcagtcctgaagggatggctttattagcaggaatgttaatgatgatttattatgcagcgagaattagaggaggagatgaatctactaatgcaaatttagtgaatatatttaatgagcgtgtaaatcgaattaagaaaaaccgctggttattagctcttatgggagggcttgtttctttaacatcatctatgctgattttagcagtggatgcaatgcctcaagcattgattaataaagagctttacacagaggcggcaatcgctacatttgcacgtggaattggtttcatccctttagttttttcaactgcaatcgtaacgggggtttatggtttagctggtaccacactggtatttgcagtgggtcttattttcagggatataccgattttagcatttctgttgggctttttagtcatgtatttagaggtcatatcattatccgcagtatcaaaaagcatggacaaactgcctggtgtaagggagatgggagagcatatccgcacttcgctgtcagatgttctaggaatggctatattaattggcagtgcgatggcaggggaaaaaattgctcctggcattggcttcttctgggttattggattttatttaataaaccgaatagcatcaaaaccgcttgttgaattggctgtcggcccaattgcagttatattgttggggattgtcgctaatcttctctatgcagtcggtttatggcaggttggctaa

SEQ ID NO: 823 - DNA, 885 bp, Bacillus licheniformis
atgttgaaagacggaatgacctatatgcatgaacatacaacgatagacctttccaaagtaaaaaacaatgaggattgtaagttggatgtatttcctgaaaccgtcagagaatttaaaagtttatacgaaaagggcgtacggaatattgttgatgttacgaatattggaatggggagaaatattacatacgtccaaaaagttgcaaaagaaacaggcattaatattgtcttttcaactggtttctatcaagattctttttacccgatccatgtgtttcgtgaatcgaaagaaaagctggcagaaagaatgattatggagattgttgaaggaattagaggaacagatgccaatgccgaggtcatcggtgaaattggaacaagttacaataaatggacggaaaccgaacaaaaagtttttgaagcggttgttgtggcacataagcaaacaaaaaaaccaatatcaacccatacttccataggaacattaggacatgaacaagtagaattttttaaaaaacatgaagttgatttaaaccgagtggtgatagggcatgttgatttatctggggatgccgattatatattgaaaatgctgagagaaggtgtatatgtagaattcgatacaataggtaaagaaaattatatgcctgatcgtgttcgggccgaaatattgaaaaaaatacaggataaagggtatatagacaaggttctgttgtccatggatatcacaagaaaatcacatcttgtatataaaggcggggtgggctattcatatttgatagacacgtttatccctctcttgcaaacctatggaataactggtgaatcaattgataagatgttgattaaaaatcctcgcgcttttatgaaaggggagagtgaatga

SEQ ID NO: 824 - DNA, 1143 bp, Bacillus licheniformis
atggatacttatcctctagatagcctatcaattgaagaagccatgcatagacaatttaaattggttgatgtcatgacaagacattttcgaggagaagaattgctttcacttggcgatttaggcgttgtaaaaggaatcaataaaccgcggttcacaaaaaaaatagaagagacactagctgatttctttggcacagagaaagcaatgttagttcgtggtgcaggaacaggggcattgaggtttggttttatgagctttttaaagccgggtgacgagatccttgtccatgatgcaccgatatatccaacaagtaaaacaacgttagagtcgatggggatcttgccaatatacgcggattttcacgattctgaacaaataaaagaagccatcctcaaacacccgaagttaaaaggtgtattgattcagcatacgaggcaaaaaatagatgaccattatgatttggctgaaacgataaaaaaaatacgttccatttattctgatctagttattattacggatgacaactatgctgcgatgaaagcagaaaagattggagcgcaactcaaagccgatttgtccaccttttcattgttcaagctattaggtccggaaggtattggagtcattttaggaagaaaaaatttaatagaaaaaatagaaaaaataaactattcaggcggaagccaagttcaaggttatgaagctttagaagctttaaggggtctgatatatgctccggttatgctggcaatacaagcaagtgtcaatgatcagttagttcactcgcttaataatggagccattaagggtgttaaaaaggcttatttggcaaatgcacaatcaaaagtcttacttgtagagtttgttaaaccaattgcagaaaaagtgcttcatcatgctaatgaattgggagcagcaccccatccgataggtgctgaatcaaaatacgagtttgcaccaatgttttatagagtgtctggcacttttttatctgcggatccatcactggcaaaaaaaatgatccgcattaatccattaagaagcggtcctgagaccattttaagaattctaaacacatccgttcatcgagcaacagaagatctcagcgtaaattcttcaaaaggcgatgatataaatgaataa

SEQ ID NO: 825 - DNA, 1227 bp, Bacillus licheniformis
atgaataaaagagtcattatcataatattagacagcttaggtgtcggttatatggaagatgcaagcgattatcatccttcagatgttggcgccaatactttctatcacatacttgatacggtgccctctttaaacattccgaatctcgaaaaattgggtattaataaaatattgcaccatcctaaattgaaaaaaacagatcatattgccagctatggtgttttaaacctgatgcatcaaggagcggacagttttgaaggacataatgaaatcatgggaacaaagcctaaaaagacatatttagctccttttgcggaacatctcaatcatgttaaactcgctttggaagatcaaggttataaagttaacataccgaattcagatttgccgtatctattggtaaacgatttagtggtcgtggctgataatatcgaaacagattacgggcaaatttataatgtaagcgctccgctggattatattccgtttgatgaagtattgaaaataggaagatgcgtccgtcatcatgttaaagtaaatcgcgtgattgttcttggaggagaaaacgtaacacctgaacacttgcagagatcggttgaaagaagagaagacggattaataggggtgaattcgcctaaatctaacgtatacaagcaaggatatcaagttcgtcacttaggatttggtatctctcccgaaaatcagttgccgacattggcgagaaataggggaatggaagtctctcttatcggaaaaatgcaggacatcatttattgtgaaggtgcaaatagatttccaggtgtagatacagaacaagtcatgaaggatattattcaggagatggaccgcgtcaaaaaaggcttgattgctgccacagtacaagaaaccgatttggccggacatgcacagaatcccgtccgttatgcgaatcggattgaaatggtagatcgatatttgccggaaattctccggaaaatgacagatcaggatctgctgatgattagtgcagatcacgggaatgatcccacgatcggccacaaccaacacacacgggaaaaaacatatttgctggcttatcacaaaaaattatcgcctgttcacatcggggaaagaaaaacgctatccgacattgctgcaacttctgctgattatctagggcttcgcaatactgaaaacggcagttcattccttcatttaatgcaaaaaggaaaagaggagacatactga

SEQ ID NO: 826 - DNA, 1152 bp, Bacillus licheniformis
atgtttttggaatctacattaaaatataacaaaaaattaatagaggctgcattgagttttcatcagcagggaatcatttcacctaacacttatgtattagacttggacaccgtcaaaaaaaatgcaaaagtgttaagtgaaaaagccagaaaacaggatattgaactgttttttatgacaaagcaatttggtcgtaatccgttggtggcacaagctatagccgaaagcggaatcggcaaagcggttgctgtagacccgtgggaagcaatcacactcagccaaaatggaatcaaaattgggcatgtcggacatcttgttcaaatacctattcatatgatacccgcaatattggagcttcatcctgattatgttacggttttcagccttgaaaatgctcaaaacattaatagagtcgctaagaaaatgggaagaaaacaaaaagtttttttgcgtatcgcaaacaaagaggattatatatataaaggtcaagagggagggttcacttttgagcaaatcgttaaggatatcgaatcgattgaacaattagaaggacttgaaattgcaggtttaacaagctttccttgcatattgatccaagacggccttccagcagttactccgaatgtagcatccatgcaaaccgtaaaatcgtttttaatggaaagagggtataaaaagcttgagatgaatatgccaagtgcaacatcttgtgcaacaatgaaattgttaaaggaaaatggtgcaactcaaggcgaacccggccatgctttaattggaacgacacccatacatgcaacgaaacaacttgcagaaaggcctgcgatggtatatgtaaccgaagtgtcccacatatctaatcatcatgcttatgttttcggcggcggtttctatccgcgttcacatatgaaagcggcgctcgttggaacaaacaaagatcatcttaagaaggttcaagctattgaaatgacgcctgatcatattgattattacggttcattaaacacagttgaagcaaaagtcggcgatacggcaatatttgcttttcgtacacaagtctttgtcacgaatgcacatatagccatcttaaaaaacgttgctgaagatcctgaacttatcggtgtatatgattctaaaggaaatgtaatcgagtga

SEQ ID NO: 827 - DNA, 138 bp, Bacillus licheniformis
atggattgtcttactgaaaaaggtgtggcgaaaatgcttggcctttttgcagtgcagtttaatacagtagtcagtcttggacattttattttgtggaaaggagaaaaacgtgaaaattattcatgtatcaggttatga

SEQ ID NO: 828 - DNA, 729 bp, Bacillus licheniformis
gtgaaaattattcatgtatcaggttatgaagaaatgagtggaaaatcggctgatctaatggctgagctcattcaaaattcaaataatcctgttatcggctttgcaacaggttcgacaccgattggtttatataaatgcctgataaaaaagtatcggcaaaaggaaatttcatttaggaatgttactgcttttaatttagacgagtacgttggattggctaaagaaaataaaaacagctaccattattatatgaatgaaaaattattcaaacatctggatattagtcgaaggaatatcaatatccccaatgggatggcggaagatttggaacaagaatgcctcagctacgacagacttgtttctgaaaaagcaattgacatacaaatattaggaatgggattgaatggtcatatcggttttaatgaaccggggacaagctttaaaagcagaacccatatcgttgatttggatcaatcaacccggcaggcaaattcccggttctttcgttccttggacgaagtaccgacaaaggcattaacaatgggcattgaaacaataatggaaagtaagcggatccttctgctcgtgtctggaaatgaaaaatctgaagccttggcacggctgctgaacagcacccgtgtctcccaagagttccctgcttcaattttaaggaaacataaagatgtgacggtgatggcagatgacgcagccttaaataaaattcattaa

SEQ ID NO: 829 - DNA, 213 bp, Bacillus licheniformis
atgtctattacgatatcaaagcgatcgacggcgttgtcggagttaaatgtgatacgctgtaaacgcaagcttgattcaaaagaagcagccgaaaaaaaggctgctttttcttttatgaatcatcaatatgaacggtcggttcttgaggatgatggcttcctctcgcctagaattgattatccactcttctctccttttcaactgttcgagtaa

SEQ ID NO: 830 - DNA, 693 bp, Bacillus licheniformis
atggattggcatattgaaactgaaacgctgttaaagcttggaatcgcaacattaatcggaatggtcatcggtctcgaaagggagctgaaaaacaagccgctcggcttaaaaacgtgcatcgtgattgcgatcagttcctgtgttctgacaatgatcagcattgatgcggcataccattttccaaggtcgaacagaatcatgatggaccctttgcggcttcccgcacaaatcatatcggggatcggcttcatcggagcgggcgtgattttacgcaaaagcaacgacgtcatttccggcctgaccacttcagcgatgatctggggagcggccggcctcggcgtcgccatcggagcgggcttttataaagaagcgtttgtcagtctgattttcattttaatcagcgtcgagtttttgccgtggatcgtcggcaaaatcgggcccaaccgcttgcaggaaaaagaaatccgcgtccgcatgtccctgaatgacaaggataaactgacggatatcttaaaggaaatgaaagcgaaaaaaatccggattcattccgtccggatcgatgatatgcgcgataatgaatttccgatcatggaaacgaaaatcatggttcataagaaaaggtatgtcaccgatgtctattacgatatcaaagcgatcgacggcgttgtcggagttaaatgtgatacgctgtaa

SEQ ID NO: 831 - DNA, 141 bp, Bacillus licheniformis
ttgaagtgccgggggatgtcctggaaccattcatctgcaagaagcctatactcctatcattatattgccggcgtggcatcaaaagaattccgtctgagcaaaaaagccgccggatatcgcccggcggctttcgtaacctga

SEQ ID NO: 832 - DNA, 1482 bp, Bacillus licheniformis
gtgagtgttgaagtatttatttcgttggggatttattttgccgcgatgctcttaatcggctggtactcctatagaaagacatccaatttgaatgactacatgcttggcggcagaggtcttgggcctgctgttacggctttatcggccggcgcgtctgacatgagcggctggatgctgatgggactgcccggagccatgtatgtgacaggactttcaagcgcctggcttgccgtcggtttaacaatcggagcttatgtgaactatttggtggtcgctccccggctgcgcacatatacagaagtagcaaacgatgcgattacaattccggactttttcgaaaatcggtttaatgatacaacaagaatcttgcgcctggcatcagccatcgtcatcatggtgtttttcacattgtacacgtcggcgggtatggtgtccggaggaagactgtttgaaacggcgtttggcctcgattataaaatcggtcttttcttaacggccgcagtcgtaattgcctatacgctgttcggaggatttttggccgtcagtctgacagacttcgtgcaaggtttgattatgtttatcgctttagtgctcgtgccgatcgttgcctttactcaattaggcggaattacgccgactttcaatgtgatcgaagaaatcaatccaagcttgctcgatttcttcaaaggaacgaccgtcattagcattatttcatttctcgcctggggactgggctatttcggtcagccgcatattatcgtccgctttatggcgatttcatccgtaaaagaactgaagcctgcgcgccgcatcgcgatgggctggatgatcatctccgtaatcggcgctctgctcgtcggactgaccggtgtggcgtatgtccatgagacgggtacagcgcttaaagatccggaaacgatttttatcgtgttttcaaaggtattattccatccgctcatcaccggatttttgctttccgctttgctcgcggcgattatgagtacggtgtcttcccagctgcttgttacatcaagcgccatgacggaagatttttaccggacgtttttccggcgcaaagcttcggataaggaactcgttcttgtcggacgtctgagcgttctgcttgtcgccgtcatcgcgatccttctgtctctgacaccgaataacacgatccttgatctggtcggctatgcgtgggccgggtttggttctgcattcggacccgccatccttctcagcttgtactggaagcggatgaaccagtggggcgcattggccgggatgattacaggggccgtgaccgtgctgatttggattctgaccggcctgcaggagaagacgggtatctatgaaatgatccctggtttcttcctgagcttgattgtcgtttacgctgtcagcatgatcacgaacaaaccggcaaaagaggcaagagatatgtttgaagaaatggaacagacgcatgaggaagaacattcttaa

SEQ ID NO: 833 - DNA, 141 bp, Bacillus licheniformis
atgaaagcgtttacaaatgatatacaaagtaaaaatattctgaatattagtacgtgccgttttactgaatttttcatgtacaatgaaataaaaggcgccaaatggggcgaagatcgcggttttgttgatttagaaggctaa

SEQ ID NO: 834 - DNA, 291 bp, Bacillus licheniformis
atgtcgcgtatttctatagaagaagtaaagcatgtcgcccatcttgccagactggcgattacggacgaggaagcggcgatgtttaccgaacagcttgacagcattatttcatttgcagaagagctgaacgaagtcgatacagagaatgttaaaccaacaacgcacgtattgcaaatgaagaatatcatgagggaagatgtacctgataaagggcttccggttgaagacgtcgtcaaaaatgcgcctgatcataaagacggctacatccgcgtgccgtcaatcttggactaa

SEQ ID NO: 835 - DNA, 1458 bp, Bacillus licheniformis
atgtcactgtttgaccataaaatatctgaattaaaacgtctcatacataataaagagatcagcatatcagatttagtcgatgaatcttacaaacggattcacgaagttgacggaaaggtacaagcctttttgcagcttgatgaagaaaaagcccgcgcatatgccaaagaattggacgaagcgcttgatacccgggatgagcacggtcttcttttcgggatgccgatcggcattaaggacaatatcgtaacaaaagatctgcggacaacgtgcgcaagcaaaattctcgagaattttgatccgatctatgatgcaaccgttgttgagcgtcttcatgaagctgaagcggttaccatcggaaagctgaatatggatgaattcgcgatgggctcttccacagagaactcaggctttaaaaagacaaaaaacccgtggaacctcgaaactgttcctggcggatcaagcggaggctcagcggctgcggttgcggccggggaagtgccgttttcacttggatctgacacgggcggatcgattcgccagccggcatctttctgcggcgtcgtcggcttaaagcctacatacggacgcgtttccagatacggccttgtcgcatttgcatcttcattggatcaaatcggcccgatcacaagatctgtcgaagacaacgcctaccttctgcaggcgatttcaggcgttgacaaaatggattcaacgagcgccaatgtggacgtgcctgactacctgtctgcgctgacaggcgatattaaaggcttaaaaatcgccgttccgaaagaatatctcggcgaaggggtaagcgaagaagcgaagcagtccgtgcttgaagcgctgaaagtgctcgaaagccttggcgcgacatgggaagaggtatcgcttccgcacagcaaatacgcgctggcgacttactacctgctttcttcatctgaagcgtcggcaaacttggcgcgcttcgacggcatccgctacggctaccgcacggacaatgccgacaacctgatcgacctgtacaaacagacgcgttccgaaggattcggaaacgaagtcaaacgccgcatcatgctcggtacgtttgctctgagctccggctattacgacgcatactataaaaaagcgcagaaagtcagaacgctgatcaaaaaggactttgaagacgtatttgcaaactatgacgtcatcatcggaccgacaacgccgacgccggcatttaaaatcggcgaaaaaacgagcgatccgctgaccatgtacgccaacgacatcctgacgattcctgtcaaccttgcgggcgttccgggaatcagcgtaccgtgcggatttgcgaacggcttgccgctcggcctgcaaatcatcggcaaacactttgacgaaagcacagtataccgcgtcgcccacgcattcgaacaggcgacagaccaccataaagcaaaacctgaactgtaa

SEQ ID NO: 836 - DNA, 1431 bp, Bacillus licheniformis
atgaactttgaaacggtaatcggacttgaagtccacgtggagctcaaaacaaaatcgaaaattttctccagttctccaacgccattcggcgcggcggccaacacgcagacaagcgttatcgacttaggctatccaggtgtactgcctgtgttgaacaaagaagccgtcaatttcgcgatgaaagccgcaatggcgctcaactgcgaaattgcgacagaaacgaaattcgaccggaaaaactatttctaccccgacaacccgaaagcttatcaaatttcacaatttgataaaccgatcggcgaaaacggctggatcgaaatcgaagtcggcggaaaaacgaagcgcatcggcattacccgccttcatttggaagaggatgcgggaaaactgacgcatacaggcgacggctactcccttgtcgactataaccgccagggaacaccgctcgttgaaatcgtctccgagcccgatatcagaacgcctgaagaagcttacgcctaccttgaaaaactgaaatcaatcattcagtatacaggcgtgtccgattgtaagatggaagaggggtcgctccgctgcgacgccaacatctcgctccgtccgatcggacaagaggagttcggtacaaagacagagctgaaaaacctgaactcattcgcctttgttcaaaaaggccttgagcacgaagaaaaacgccaggcgcaggttcttttgtcaggcggtgtcattcagcaggagacgcgccgctatgatgaagcgtccaaaacgacgattttgatgagggtcaaagagggatctgacgactaccgctacttccctgagcctgatcttgtcgagctttacatagacgacgagtggaagcaacgcgtgaaagacagcattcctgagcttccggacgagcgccgcaagcgctacatcgaagagcttggcctccctgcctatgacgcgaaagtgctgactttgacaaaagaaatgtccgacttcttcgaagcggccgttgaaaaaggcgcagacgcgaagctggcgtcgaactggctgatgggtgaagtatcggcttacttgaacgcccagcaaaaagagcttgcggatgtcgaactcacacctgaaggccttgccggattggtcaagctgatcgaaaaaggaacgatttcatcgaaaatcgcgaaaaaggtcttcaaagaattgattgaaaaaggcggagacgcagaaaaaatcgtcaaagaaaaaggccttgtgcaaatctctgacgaagcgacgctcagaaagcttgtcacagaagcgctcgacaacaatccgcaatcaatcgaagactttaaaaacggaaaagaccgcgcgatcggcttccttgtcggccaaatcatgaaagcctcaaaaggacaagcgaacccgccgatggtcaacaagcttcttcttgaagaaatcaataaacgataa

SEQ ID NO: 837 - DNA, 303 bp, Bacillus licheniformis
atggaaagaaaggatgtacccgagtggatcttagctttagaagaagaagatgtagaatttattaaaaactttatgctgaaatctggatctttaaaagaaattgcaaagagttatcaagtatcttatccaacagtcagggttagattggatcgattaattcaaaaaattcaactaattgacgagttagaaaatgagacttttgttaactttataaaacagttagctatcgatgatcagattagtctggaaaatgcaaagctaatcattgagaaatacaaaaaagagcggggtgttcataaatga

SEQ ID NO: 838 - DNA, 282 bp, Bacillus licheniformis
atgaatcctatttatatactactcattggctttacaatactagggattcaatattttttatcgaccagaaatcataccttttggggagctatactgcctacagcttatatcgtttttctcgtggcattatccatttatgaaggaaaatctttcgcatcattctttcttcctcttatcggcggattggctttattgttgggagaatggattaaaggcagagaagctttgaaaaaaaagcgggaaagagaaatgagaataatgaaagccatggatattaaataa

SEQ ID NO: 839 - DNA, 1083 bp, Bacillus licheniformis
gtgaaaaaaaacatcgtttgttcaatcttcgcgctgctccttgcttttgccgtttcgcagccgagctatgcacacaccgtttctccggtgaacccgaatgcccagccgacgacgaaagcggtgatgaactggctcgcccacctgcccaatcggacggaaagccgggtgatgtccggggcgttcggaggatacagcctcgacacattttcaacggctgaagccgaccggatcaaacaggcaacaggacagctgccggccatatacggctgcgattatgcaagaggatggctggagccggaaaagatcgccgatacgattgactacagctgcaaccgtgatttgatcgcatactggaaaagcggaggcattccgcaaatcagcatgcacctcgcaaacaccgcgtttacttcgggtcattataaaactcagatttcaaacagccagtatgagagaattttagattcttccactcctgaaggaaagcggcttgaggcgatgctgagcaaaatcgcggacggcctccaggagcttgaaaatgaaggcgtgcccgttctattcagaccccttcacgaaatgaacggcgaatggttctggtgggggctgacgcaatataatcaaaaagacagcgaaagaatctccttgtacaaacagctctatgtgaaaatctatgactatatgacaaaaacaagaggcctggatcatctcttgtgggtgtatgcgccggacgccaacagagactttaaaacggacttttatccgggcgcatcatatgtggacattgtcgggcttgacgcttattttgatgacccgtacgccattgatggctacgaagagctcacatcgctgaacaagccgtttgcctttacagaagtcggaccgcagacgacaaacggcgggctggattacgcgcggtttatccatgccatcaaagaaaaatacccgaaaacgacgtacttcctggcgtggaacgatgagtggagcccggctgtgaataagggagcggacaccctctatcttcatccatggacgctgaataaaggagagatatgggacggcgattctttgacgcctgtcgtggaataa

SEQ ID NO: 840 - DNA, 849 bp, Bacillus licheniformis
atgacagaaaaagaagaaaaaatcattaaagcaggcctgcacctgttcgcgaaaaacggttttgcttccacaacgattcaagacatcgccaatgaatgcaacatctcaaaaggggctttctacctgcatttcaagtcgaaagaagctcttttgctcgcaatcattaagtattatatcgatcgaatgatggaaaatatgaagatcattcagcagaagaatttccctcctaaggaaacgttcaaggagcagattgcttatcaattcagcgagagcaaggagcaccgcgattttattctcgtgatgatcagcgaacacagcataccggaaaacagcaagatcgaagaatattttaaaaatgtcagccaaaaattccacgagacgtatcaaaacgcgctgtcagccgcctacggtgacattgtgaagccttatctgtcagacttgtccgtgatcgttcaaggcatcgtgcagtcttatcaaaatttgtttatctttaatgaactggatatcgatttttacgaacttgcggattttattatgagaagaatcgatgacatgattgatggcatggttcaaaacggggagcagccgatcttggccggccggacgtacagctattaccggaacgccggcaatacggccgataaacatacgattttgcgggagcttgaagatgccaaacgtcagccggagctttcggaagacattctcattacactggatgtgatcgaggaagagctgagaaaggattcgccccgcgcacccgtgctccaaggcatgctgacaaacttgcagcatcaggacaatgttcagcatctatatggaatgatcacccgtttccttcattcataa

SEQ ID NO: 841 - DNA, 3159 bp, Bacillus licheniformis
atgaattctatcattaattttgtactaaagaacaagttcgctgtgtggctgatgacgattattgttacggttgccggcatttatgcgggtttaaatatgaagcaggaatcgattcctgatgtgaacatgccttatttgaccatcagcacgacatatcccggagccactccgagccaggtagctgatgaagtcacaaagccggttgaacaagccgtgcaaaatctggacggcgtcagcgttgtgacgtccacatcgtatgaaaacgcatcatcggtgatgattgaatacgattatgaaaaggatatggacaaagcgaagacggaagccgctgaagcattggcgaatctcgatctgccggacaatgcgaaagagccgagcatttcgcgctacagcatgaattccttcccgattctcgcgctcagcgtgtccagtgataaagacgatcttcaaagcttgacgaaaaaagtggaagacagcctcctgacgaagcttgaaggccttgaaggcgtagcttccgttcagctttccggtcagcaggttgaagaagtcgaattttcatttaaaaaagacaaattgaagcaatacgggcttgacgaggatacagtcaagcaagtgattcaaggatctgatgtgacgactccgcttgggttgtacacattcggcaaagaagaaaaatcggtcgtcgtcagcggcgatatcgacacaattaaagacttgaaaaatatgagaattccagcggcgtctgccggaggcgcaagcgcgcaagccggagcgcaaagtgcgcaggcggcccagggggcgcaggctcaagccggggcacagagcgccggacaagctcagcaaagcgcgggagtcccgacggttaagctgtctgacatcgcaacgattaaagatgtcaaaaaagccgaatccatttcacgaaccaatggcaaagacagcatcggcatcagcgtcattaaagcaaacgacgccaataccgtcgaggtagccgacaacgtaaaagctgaactcgaacaattcaaaaaagaccacaaaggcttcaaatacagctcgacatacgatcaggccgaaccgatcaccgagtcggtcgagacgatgctgagcaaagcgattttcggagcgatctttgcggttgtgatcattctcttattcctaagggatattaaatcaacattaatctcggtcatttcgattccattgtcattgttaatcgcactgctcgtcctgaaccagcttgatatcacgctgaatatcatgacgctcggcgccatgacagtcgccatcggacgggttgtcgacgactcgatcgtcgtcatcgaaaacatttaccgccgcatgaggctgaaagatgagccgctgcgcggaaaagcgctcgtgcgcgaagcgacgaaggaaatgttcatgccgatcatgtcatcaacgatcgtgacaatcgcggtattcctgccgctcgcacttgtcggcggtcaaatcggcgaattgttcatgccgtttgctttaacgattgtattcgcgctcgctgcatccctcttgatcgcgatcacgctcgtgccgatgcttgcgcacaccctcttcaaaaaatcattgacaggcgcgccggtaaaggcgaaagaacacaagcctggggtactggccaacttctacaaaaaagtgttgaattggtcgctcagccataaatggatcacatcgatcatcgcggttctgatgctggtcggaagcttgttcctcgtgccgctgatcggagcgagctacttgcctgccacaaaagaaaaaatggtgcagatcacgtacacccctgaaccgggagaaacgaaaaaagaagcggaaaaggaagcgcaaaaagctgaagaaatcctattggaccgcaaacacgtcgatacggttcagtatacgttaggagcgggaaatccgctgatgggcggaagttcaaacggcgcgttgttctatatcaaatatgaggaagacacgcctgattttgatcaagaaaaggacagcgtcttaaaagacattcagaagcaatccaaacgcggagaatggaaaactcaggatttcagctcctcaggcaacaacaatgagttaacgtattatgtgtacggggattctgaaaaagagattaaaggcactgtaaaagagatcgaaaagataatgaaagaccaaaaagacctgaaaaacgtaagctcaggcctgtccagcacatatgacgaatatacatttgtcgctgaccaggagaaattaagcaaactcgggttaacggcatcacagatttctcaggcgctcatgaaagaaacatcgcaggcgccgcttacaaccgtgaaaaaagacgggaaagatcttgatgttacgattaaaacagaagaagaaacatataaaagcgtcaaagatttagaagacaaaaaaatcacaactccgaccggccaggaagtgaaaatcggcgatgtcgcgaaagtgaaggaaggcacgacatccgacacaatttcgaaacgggacggcaaaatctatgccgatgtcacggcggaagtcacatcagacaacgtcacggcagtatcagtcgacgtacagaaaaacatcgacaagatcgacctgcctgacaatgtcacaatcgataccggcggcgtatccgctgatatcgaagattcctttacaaaactcggactcgcaatgcttgcggcggttgcgatcgtctacctcgtgcttgtgattacattcggcggagcactggcgccatttgcgatcctgttctcgctgccgtttaccgtcatcggcgccttggtgggactttacgtatcaggagaaacaatcagcttgaacgcaatgatcggaatgctgatgctgatcggtatcgtcgtcacaaacgcgattgtcctaatcgaccgcgtcatccataaggaagcggaagggctctcaacgagagaagcactcctggaagccggctctacaaggctccgtccgatcctgatgacggccatcgccacaatcggcgccctgattccattggcgctcggatttgaaggcggcagccaggtcatttcaaaagggctcggcgtcaccgttatcggcggtctgatcagttcaacgctcctcacccttctgatcgtaccgatcgtatacgaagtactggcgaaattccgccggaaaaaaccgggtatggaagaagagtaa

SEQ ID NO: 842 - DNA, 201 bp, Bacillus licheniformis
atggaatcgaaaggaaacagcgaaccaagccccaaaatcgtaaagcggctcacctggatcataccgatcgtgttgataggagtcatttttctcttaaaaaatatgagaaatcctgtgactgatgttttattttatattgtatgtgcaggtgtcatcatcttagtgattttccgcatcataaaagagacaaaaagcagatga

SEQ ID NO: 843 - DNA, 543 bp, Bacillus licheniformis
atgattaaaaaagggacaaacatttacatcaggccgctcacggctgaagacgccgaggcatgcctcgaattgcagaacgcaaaccgcccgttctttgaacagttttcaatggagcggaacgaggagttttatacaatcgaaggacaaaagaagaggcttcaaagattatatgaaaatatggagaacgatgaagattattattttggcatctttgatccggcaaacgatgcgctgatcggaacgatcaaccttttccaagtgctgcgcggttccttgcaaagcgccttcatcggctattttttggatcagaagcacaacggcaaaggctacacgaccgaagccgtcaagctgatggtcgagttcgcctttcacgatctcaagctccatcgcatcgaagccggcgtcatgccccgtaatattgcctcgatccgggtgctggagaaggcgggttttcacaaagaaggcatcgcccggaaaaacgtcaagatcaacggaaaatgggaagatcatcagctgctggctgtgatcaatccgcatgattag

SEQ ID NO: 844 - DNA, 954 bp, Bacillus licheniformis
gtgaaaaagcccgtttattttaaccatgacggaggcgtcgatgatctcgtctctttatttctgctattgcagatggaaaatgtcaaattgatcggaacatccgtcataccggcggattgctatttggagcctgctctcagtgccagtcgaaaaatcattgaccgcttcggttcgtaccaggtcgagactgcggcatccgattcgagaggggtgcacccgttcccgaaggagtggcgcatgcacgccttttatgtcgacgctctgccgattttaaatgaaaaaggcgaagtccggactccggtgtcagacccgcccgctcaccttcatctaattgaatgcgtgaggcagagcccggaaccggtgacactgctgttcaccggcccgctgacagacttggcgagggcgcttgaggaagagccggcgatcataaagcacattgcaaaacttgtctggatgggtggcaccttccttgagaaaggaaatgtagaagagcctgagcacgacgggacggcggaatggaacgctttttgggatccttacagcgtgaagacggtattcgagagcgacattcagatcgaaatggtcgcgcttgaaagcacgaaccaggtgcctttgacaaacgaaatccgctcacattgggcgagcctcagaaagcatatcgggatcgactttatcggccaatgctatgcgatgtgtccgccgcttgtccataacgaaacgaattcgacatactacctttgggatgtgctgacgacgctgacgctcggcacagtcgatatgacacgctcgcgcagcatcaaggcggttgtccatacacaaagcccgcgccaaggaacgacagaagagcatcctgacggcagaatggtcaaagtcgttgatcaagtcgacagggatcaattttttgcgtattttgaagagttgatgaaaagagccgaccgcattccatctttataa

SEQ ID NO: 845 - DNA, 915 bp, Bacillus licheniformis
atgaaacgtgcacgaatcatatacaatccgacttccggacgagaaatcttcaaaaaaaaccttgcccaagttctgcagaagttcgagcaggcaggctatgaaacgtcatgccatgcgacaacaggggaaggggatgccgtacaggccgccagacacgccgctgagcgggaatttgacttaattgttgcggccggaggagacggcacattaaatgaagtcatcaacggactggcgccgttggaacaccgccccaagctcggagtcattccggtcggaacgacgaatgactttgcgagagcgctcggcattccgcgcgaggatattttaaaggcggttgacacaatactagagggagaagcccgtccgattgacatcggccgcgtcaacggccaatatttcatcaatatcgccggcggcggacgccttacagaactgacatatgacgtaccaagcaaattgaagacgatgctcggccatcttgcctattatttgaaaggaatggaaatgctccttccttcactgcggccgaccgaggtcgaaatcgaatatgacggcaagctgtttgaaggagaagtaatgctgtttctcgtcatgctgacgaactcagtcggcggctttgagaagctcgcccccgactcaagcttgaatgacggcatgtttgacctcgtcattttaaaacggacaaacctcgccgaattcatcagacttgtcggacttgccctccgcggcgaacatatcaatgacgagcatgtcatctacacgaaagcaaaccgcgtcaaagtgacggtcaaagacaaaatgctcctgaaccttgacggcgaatacggcggcgaactgccgggcgaattcgagaacctctaccgccatatcgacgtcgtcatgtcaaaagaaaaagcgagaaaattggatgaatga

SEQ ID NO: 846 - DNA, 1383 bp, Bacillus licheniformis
atgaaacaaaaagcccccgttcaaaaaaatgaatattacaatgtcgtatttgaagatttaacacacgaaggagccggcgtcgccaaagtcgacggcttcccgattttcgtgccgaacgcgctgcctgacgaaaaggcgcagatcaaagtgacccgggtcaaaaaaggcttcgccttcggccgcctcatcgacttgaaagaggaaagccgctaccgaacggacgcgccgtgcccgatctacaagcagtgcggcggctgccagcttcagcacatcaactacgaaggccagcttctttacaagcagaagcaagtcaaagacgtgcttgagcgaatcggcaagcttgatttaagccggatcaccgtccacccgaccctcggcatggaagacccgtggaactaccgaaacaaagcgcaggtccctgtcggcgaaagagaaggcggtctgatcgcaggcttctaccagcagcgcagccatgaaatcatcgacatgaacgaatgcctgatccagcaatcggaaaacgaccgcgtcgttcaagcgattaaagagatctgtggcaaatacggcatcaaagcgtacaacgaagaacgccacaaaggctggctcagacacatcatggtcagatacggcgccgcgacaggcgaaatgatggtcgtcttcatcacaaggacaaacgacttcccgcacaaagcgaaaatcgtcgaggagatcaccgcggcattcccgcacgtcaaatcgatcgtccaaaacatcaatccgaaaaaaacaaacgtcatcttcggcgacgaaacaacggtcatctggggagaagaatacatttacgacacaatcggcggcatcaaattcgccatctctgccagatcgttctaccaagtcaaccctgagcaaacaaaagtgctctacgacaaagcgcttgaatacgccgaactaaacggcgaagagaccgtcattgacgcgtactgcggcattggcacgatttcgctgtttctggcgaagcaggcgaagaaagtgtacggcgttgagattgtgccggaagcgattgaggatgcgaagcggaatgctgagttgaatggcattgagaacgctgagtttgaagttggcgaagcggaaacggtcattccgaagtggtatgaggaaggcattgcggctgacacgctagtggttgacccgccgcgcaaaggctgcgacgaggccttgctgcggacgattttggagatgaagccgaaacgtgtagtgtatgtgtcttgcaacccgggaaccctggcgcgcgatttgcgggtgctggaggatggcgggtatgcgacgcttgaggtgcagcctgttgatatgtttccgcatacgagccacgttgagtgtgttgtcttgatgtcaagggttgagaaatag

SEQ ID NO: 847 - DNA, 311 bp, Bacillus licheniformis
atgatgacagctaaggaattcttaaaacaggcctatcgtctgaatgaattgattaattccgaccttgaagagttacaaaacttaagggaactatcaagaagtgtttcatcccccgttcttgaggaaaaagtcgaaccaagtgtactgacccaccctttgaaaagtatgtgattagaatagtagatttggagcaacagatacaacaagaggttgaacggctagtaaagcttaaatcagatatccgtgaagcaattaaccagatggaaaacgtagatgagaagctgattcttcgctaccgatacattaacttt

SEQ ID NO: 848 - DNA, 360 bp, Bacillus licheniformis
atgtcttctggtgcgttaagacattatttttcaactcaagatgaaatgttattatttattatgaatgaacatgctaaaaaggaagccgcacggtatgaaaagtacgaccgtgacccagcaacccgtaagcgttatggtcgtgcttggaaaaggatacgtgacagctacattgcagctcatcctctttgtgaggaatgtaaacgacaaggaaagctgaccccagcaaatgaagtccatcacattcttcctcttgcaagaggagggactcacgatagaagtaatctgatggctctttgtactccttgccactctgctatcacactgtatccatcttgccgcactcatggcatatcgctctag

SEQ ID NO: 849 - DNA, 237 bp, Bacillus licheniformis
tatgatgtaatgagtaaaagatacttaacagcagaaagtgtatgcgccgggcatcctgacaaactatgcgacatcatagcagatagcattttggaagcttgcctacgtaaagatagggcatcaagggtggcttgcgaggttatagcgactaaaggaaaaattatcgtggcgggcgagatctcctgcagcgggaaaatcgacatccgatacattgttagaaatgtcctaaaagagatt

SEQ ID NO: 850 - DNA, 762 bp, Bacillus licheniformis
ctccctcttgtactatcccacagaatagtaaaaagactggatgattgtcgcaaaggaaagctgataaaagggattcttcccgatggtaaagcacaagtaacggtagaatatgaagctgacactccagtaagaataaagacgattgtgatatcggtacagcacgataagaataaaacacaggaagaacttaaggcagatatccttaacaatgtcttatggcagtgctttgaagacttcccttttgatgatgaaacagaaattctcatcaatccatcaggtcagttcgtacttggtggacccgctgccgatacgggtttgactggaagaaaaatcatggtcgatacctatggagggcttgcatctcatggaggtggtgctctttgtggtaaagacccaacaaaagttgaccgaagcggtgcttacatggctcggtatattgccaagcatatcgtttggtgtggctatgccaagaaatgtgaagtgagtatttcctatgccattggtaaggcaaacccagtagcctttactgtaaatacccttggtactggcactatttctgatgaaatattaactcttgctgcccaggaaactttcaacttaagacctgcggccatcattgaaaaactgcgtcttagaaatgtgatttactctgacaccgcggcttatggtcactttaacagttgtctgttcccgtgggaggatgtaaataaatacagtgaatttagaaaggcggtggaaaagtatgttgatagagaagattaa

SEQ ID NO: 851 - DNA, 1242 bp, Bacillus licheniformis
atgttgatagagaagattaaaacgaaacaactcatccccgctgaatataacccaaggaaagatttaaaaccgggtgattcggaatatgagaaacttaaacgctcccttgaggagtttggttatgtagaacccgttatatggaataagactacaggcagagttatcggaggtcatcagcgtttaaaagtcctgcttagtatgggtatagatgagatagaatgcgtagtagttgaaatggatgagcaaaaggagaaggcgctgaacattgcactaaataaaattagtggtgattgggttaaagacaaattagcacttctcatcacggacctaaatgcttcagactttgatgtgtctttgacaggttttgacccgggagagttggacgatcttttcaaggattcccttaaggataatataaaagaagatgattttgatgtagacagcgagctgaaaaagcccgctgtttcgcatttaggggatgtttggctacttggacagcatcgattagtctgtggagacagtacaaagaaagacacctttgatgtcttgatggatgggaaagctgccaatctggtagttacggaccctccatataacgtcaactatgaaggcactgctggaaaaatcaaaaatgacaatatggctaatgaagcgttctatgattttctgcttgcggcatttcaaaacaccgaagcagcgatggcaaaggacgcatctatttatgtatttcatgctgatacggaaggactcaattttagaagagcattctccgatgcaggattttatctttccggtacttgtatatggaaaaagcagtcccttgttctcggtcgctccccatatcagtggcagcatgaaccagtactctttggatggaaaaagaaaggcaagcatctctggtattcagaccgcaagcagacaaccatctgggagtttgagaaaccaaagaaaaacggcgaccatccaaccatgaaaccagtggcacttgtggcttatcccattatgaactcaagccttagtaactgcatcgtgctcgatcctttcggtggttcaggaagtacactgattgcctgtgagcaaacagatagaatctgctacaccattgaactggatgaaaagtactgcgatgttattgtgaaaagatatattgagcaagtgggaaactctgatggtgtatttctattaagagatcgcttgaaattcagatattgtgacctgccagaggtgaatgaggatgagtaa

SEQ ID NO: 852 - DNA, 1239 bp, Bacillus licheniformis
atgagtaaattgacacttggttccctctttgatggcagtggtggttttcctttgggtggtttgctttgtggcatcgaacctttatgggcatctgaaattgagccgtttcctatacgggttacgactaaacgtatccctcagatgaagcattatggagatataaacaaattaaatggtgcggagcttccgcctgtagatatcataaccttcggctctccatgcacggatatgagtgtggcgggtaaaagagctggtttggacggagagcaatccgtccttttttatgaagcaatccgaattattaaggaaatgaggtgtaagaccaatggacaatatccaaggtacgcagtctgggaaaatgtccccggtgcattctcgtcgaataaaggagaagacttcaaagcagtcctcgaaacggtcatcagtgtcaaagaaccgaatacctcggtgcctttacctgaaaaaggacgatagccatacgctgacatctatatgggagacggatggagcgtggcttaccgaactatcgatgcgcaatatttcggagtcccccaacgtcgtcgtagaatctaccttgtcgcagattttgcagacggatgtgccggagaaatactatttgagtccgaaggcttgtcaagggattttacgccgagcggcagcccgtggcaaagaactgccggaaatgctaaaaaccgctctggaaaaacaggcgatagcataacttgcctaaatgaccaaggcggaagagtgatgtctgtttcgaaggatattacagcaacacttcgagcagaggaacatggacatcagccttgcgtaatgcagtcaagcggattttgtactgaacacagtgccaagagcagaagtgtaggatatgaggaagaacgttcccctacacttagaacaggtgttgtcccaggtgcagtcatgtcctttgaaccgggtgctgcttctcgagttggtggccatactgacgaaaacttaagtggatcacttcgtgcaaacatgggagataatcaaacagctgttgtcattgaaaaccatccaactgatagccgtgtgaaactctcggaggataataaagtacagacgctgacctctcggatgggaactggtggcgggaatgtaccccttaaggattatatcaagcaggtgcacggaaacgtcattccgaatgatgaactgacatacttggcagtccatattcatcgattgatttcttatcagcaattaaaataaatg

SEQ ID NO: 853 - DNA, 1113 bp, Bacillus licheniformis
atgagcaaggtcgcttcagaggtggttgcgggggtgttgaacgaattccatttggccattaaaaagcacgatactgagcaggcaaagcatctttttgatgaggcgaagtcgatgttttccgagatggaagaggatcagaatgtgctggcttatttttcgcttcttgaggagcggtaccggatgatgctttatgatgcgaggggagagcggctgccgcgggagtcttattttaatgcttcgcagatcgagtgcatcgagcagacggatcatatgattgattactatttctacttttttgaggcgatgcatgaagcgtacaacaagaatgttgagcgggcgatcagtctgtacaaggttgccgagaaaaaactggcgaaggtgcccgatcagattgaagcggccgagttttattttaaagtgtcctggctgtatatgtctcttcggcaaaatgcggtttctctcaattatgcgagagacgcgatgaatatttataaaatgcatgacgggtacgaaaaaaagctggcgatttcccaagttgtgatggggacaaattacatgcagatgcagcgctttaaagatgcggagaagtactttgaagaatcgattgaaatttccaaaaagattgacgattcatttttagaagcgatgcttcatcacaatatcagcattctgtattccaattccggccggtctcaggaatgcattctcgccgtccagcatgctttgagcaacgccgaatggtgcaagtcaagctactatatcaactcgctttacatgctgaccagagagtttttcaaaatcggcgaaacagaagcggccctgttctatcataaaaaaggacaggaggaattaaagaaaaacgggaataagcattatgaaaagaaaataaatattatttatgagctgtattgccatgaaaacgtaaaaagcatcaaagacgacatccattccttggacgagatgaatgatttagacggtgtctgcgatctttctttgctcatctcaagctattttgagaaaaaaggagatgacaagaaagcgctggaatttgttaaaatattcatgaaagccgaaaacaaaatgagatcattagggagtgaggtattgtcatga

SEQ ID NO: 854 - DNA, 123 bp, Bacillus licheniformis
atgaaaaaattaattctttgcttgtcgttaactgctatggtcttaggcggagctgctttatcccaaagccacaatcaggcgtcaggcggcgttcaaacagcggagctgccggttgggggttaa

SEQ ID NO: 855 - DNA, 126 bp, Bacillus licheniformis
atgtctaaaaatgttttaaacgattggagggcctctcgcgaatatggaaggtttttatatttcatgctcttgcagattcactttaatcgcaccccgtttcatggctttaaaaaagaagccctgtaa

SEQ ID NO: 856 - DNA, 759 bp, Bacillus licheniformis
atgaatgacaaaacatttttatcatttttaaaacacgcagataagcctttcagcggctgggatttttctttcattgaagacacaggacgaatgaaaagcgacctgctttcatggtcatacggaagcatggctctgtctcttatccaggattccgaatcaatgttggatatggggacaggcggcggcgagtttttatccaaattggggccgtttccttcgtcagcatacgctactgaatgttatttgcctaatgtgccagtcgccaaggaacgattgacgcctttaggggttcaggtcgttcaaattgatgatgatgaagatcttccatttgaatccggccaattcgacctgatcatcaataaacacgaatcatattcagtacaagaggtgaggagaatcctttcaaaaggaggacggtttctcactcagcaagtcggcgggcttgattgcgaagaaataaatgaaaaacttggcgtgccgctaaatgaagaatttaaggattgggacttggaaacggcgttaaaagagatggaaaagcatgattttaagattttaaaaagcagagaagagtgtccgactcaaaggttttatgatattggggctctggtctattatttgaaagccattccctggcaggcgctcggttttgaagtgaatcaatataaggatgaattgtacgagattcataaaatgatcgaagaaaagggctattttgacgtcacacagtaccggtttatgattttagcggaagcagtttag

SEQ ID NO: 857 - DNA, 153 bp, Bacillus licheniformis
ttgtttacggtgcttgctttttattacattcgttcatttgaccggaatcgtgttttgattgcaggaatttttgttactgtttgtgaaaaaaaagcagaagaaaaacagcggaaaactcgcgtcttagggcggatttccaaaaaaatgtcgtaa

SEQ ID NO: 858 - DNA, 720 bp, Bacillus licheniformis
atgggccgtaaatggaacaatataaaagagaagaaagcgtccaaggatgcgaatacgagccgaatctacgcgaagttcggccgcgaaatctatgtggcggcaaagcagggagagcccgatcccgaactgaaccagaacctgaaattcgtgcttgagcgcgccaaaacatacaatgtcccgaaagcgattattgagcgggcgatcgaaaaagcgaagggcggctctgaggaaaattacgacgagctgcgctatgaaggcttcggtccgaacggagcgatggtgatcgttgacgcgttgacaaacaacgtcaaccgcacggctgccgatgtgcgctccacatttggcaaaaacggcggaaacatgggagtgagcggatctgtcgcttacatgtttgatccgacggccgtcatcggctttgaaggcaaaacggctgatgaaacgctcgaattattgatggaagcggatatcgatgtccgtgatattttagaggaagacgatgcagtgatcgtctatgccgagcccgatcagttccacgccgtacaggaggcgctgcaaaacgccggcattactgagttcacggtggccgagctgacgatgctcgcgcaaaatgacgtcgcccttccagaggacgcgcgcgcacagtttgaaaagctgattgacgcgctggaagatctggaagacgttcagcaagtttaccataatgtcgatttaggggcgtaa

SEQ ID NO: 859 - DNA, 210 bp, Bacillus licheniformis
atgaaaacgttaataaaggaaaagcgcacttcgctgaacatgacacaagaagaactggctaaaaggcttaatgtgtcgaggcaaacggtgatttcccttgaaaagggaaaatataaaccttcactcgttctggcgcataaactggctcaaatttttgaatgtctgattgaagatttatttatttttgagggggatgaaaatattgactga

SEQ ID NO: 860 - DNA, 315 bp, Bacillus licheniformis
ttgactgaaacgatgacaaacatactgatcgctttagcgggcttaggaataggcgtgctcgggatcgcaattgtttacaaagtaaacagacgaattggaaaaaaagagaggctgttcgatgagcgccagcagaagattagctatcaggctaaggcgctctcctggaacattacaatggcggccattttaattgcctgggcgttggtgatcattttccaaggaatatccttttcatttttcctaataacaggtttatatatcctgcaatatttatcaatgctgatcacaaccgtttatcttgctcagaaaaactga

SEQ ID NO: 861 - DNA, 1458 bp, Bacillus licheniformis
atgattcaaataactgacctcaaccgtcaatacataggaggggaatggagagacggccaaagtgaaagcgtgttggccgatctgaatccttttacccataaaacgattgcctcttttcggaaagcgacgcgggaggatgtcgatgcggcttacaaagctgcgcttgaggcgaaaaagaaatgggatggcgtcaatccctatgaaaaaagggtaattttagaaaaagccgcggcttatattgaagacaatagagaagcgattgtgtttctcattatggaggagcttggcggaacacggctgaaagcggcttttgaaatcgatcttgtcgtcaatatgatcaaagaagcggcgggcttcccgctcaaaatggaaggcaaaattctcccttcaccggttgatgggaaagaaaatcggatataccgcattccggcgggagtggtcggcgtcatcagtccgttcaattttccgttctttttatctgtaaaatcagttgcgcccgcgcttggcgccgggaacggcgttgttttaaagccgcatgaggaaacaccgatttgcggcggcacgctgattgcaaagatttttgaagaagccggtcttccgaagggactgctgaatgtcgtggtcacagatatcggggaaatcggcgacagcttcgttgagcatccgattccgcgaatcatctcgtttaccggttcaacgaaggtcggcagctatatcgggcagctggcgatcaaacatttcaaaaaaccgctgcttgaactcggcggaaacagcgccttgatcgttctcgaggatgccgatttggaatacgccgtcaatgccgcgactttcagccgcttcacacatcaagggcaaatctgcatgtcggccaaccggattcttgttcaaaaagaagtgtatccggaatttttaaagctgttcagccaaaaagtatccgggcttaaaacgggcgatccgctggaccctgaaaccgttatcggccctgttattaatgaacgccaagctgaacatttaagaaaatcgattgaaaaaggcatcgaagaaggcgccacaccgcttctgaaaggcgatattaaaggcaatctcgtcgagccgacgattcttgcggatgtcacgcctgatatgtctgtcgccaaggaagagctgttcggtccggttgtatgcgtcatgccgtttgagaccgaagcagacgcggttgagatcgcgaatgacacgcctttcggactgagcggagccgtacacacgggaaatgtggagagcggcgttgccatcgcaaagcaaatcgagacgggcatgatccatgtcaatgacacgacgatcaacgatgagccgcatgtcgctttcggcggtgaaaagcaatcggggatcggaaggctgaacggagagtggagccttgacgaatttacgacattaaaatggatttccgtccagcaccaaaaaaggagttttccatattaa

SEQ ID NO: 862 - DNA, 852 bp, Bacillus licheniformis
atgaatgaagcagtaaaaacggacatccacccgctgctggatgcttttgtgaaagtggcgccgttcctgaatcagctgattcaggacgatgtgacagtggggatttacgataccgaaaagctgatcgtcaacatcccgggaaagacattttccctgaatgtcaaagtgggtgaccctttgcaggaaggcgatattattacagacgccatccgccaaaacaaaaagaaagtaagcatggtgcctaaggagctgttcggcttccctcttgcggcgagagcgatcccgctccacgacgagaacggaagggttatcggcggagtcgggctcggcacgagccttgaaaaatcggatcagcttcaccgcgtcgcggaaagcctgtcggtcatcgtcgagcagacggcttcggccattcaggatatcgccgaatctgtcagcggcttctccggacaaatgtccgacatctccaagcaggcgaaggaagtcagtgaaagcgccggagaaatcgagaaaatttcagtcaccgtaaaaggcatttcagatcaaagcaacctgctcgggctgaacgcggcgattgaagcggcgagagccggagagtcaggaaaagggttctccgtcgtcgccgacgaaatccgcaagcttgcgacacactcaaaagaaaacgtcggccagattgaccaaatcacgaagaaaatccacgcgttattaaaagaccttgagcattcgatcgaagtcatcaatgaacatacgagcggccaggccgcaggtgttgaacaaatttccgccacgatgcaggagatcagcagcaacgcgcaaaaccttgccaagatggcggaacaccaatttgaagactag

SEQ ID NO: 863 - DNA, 1425 bp, Bacillus licheniformis
atgagagtatatacaacgactaaactgaccggattgttattggggccgatcagttttttgctgattctcggcttgataccggaagctgagctggcttacgcgccgcgaatcgttcttgcggttacagcctggacggccgtctggtggattacggaagccgtgccgattccggcggcatcgctcttgccagtcattttgctgccgacattgggtggtttagatatggaaacgacggccaaagcatacggcgatccgattgtgtttatgtatatggggggatttatcattgcgatcgccatcgaaaaatggaatcttcataaacggatggctttgcacattttaaagcggatcggggctgaaagccaccggatcgtgcttggcgtgatggcggcgactgcgtttttatcgatgtggatttcgaatgctgccaccgctttgatgatgcttcccgtagcgctagcagtcattaaagaagtgcaggaaaaagaaattttaaaaggcgaatcgctgcagaagttcagcaaaagcattttgctggctgtcgcgtatgcggcgtcgatcggcggacttgccacattggtcggttccgttccgaacgcggtgtttgccgcgatgtccaagcagattctcaatcacgaaattatgttttttgaatggtttttattcgggttcccggtttccattctgtttcttgccattttatatgtttatttaacgaaaataaaatttaaagtgagcgcttttcaaggaaaaaagcctgattttatcgatcatgatttaaaggcgcttggcgcaatgacgagggaggaaaaatcggtttttaccgtttttttattaaccgcatgtttgtggatgttcaaatttatccttccgtttcaaatatcagatacgtcgatcgcgattttcggagcggttctgctgtttttaattccgagtacaaaggatgaacggattttggaatggaaggatatgcagtcgctgccatggggactgcttctattgtttggaggcggcttgtcgcttgcggccggtttttcggcgaccaatctgacagcatggatcggcggcaagctcaagctgttggaaggccacccttacttatttgtcctgattattttgacggctgcgattttatttatgactgaaatcatgtctaatacggctgtcgccaatatggtgattccgatgacgatcggccttggcgccgcgcttcaggtcgagccgtacgggctgatggcggcagctgcgcttgcttcatcgtgcgccttcatgcttccgatctccaccccgccgaatgcggccgtcttcagctccaatctgctgacgataaaggatatggtcagggcgggcttttggctcaatatcgcaggtgtcttcttgattgtgatcagcgcatatttttggcttccggccgtctttcaataa

SEQ ID NO: 864 - DNA, 1890 bp, Bacillus licheniformis
atgagcatttttaaagcggaaggtttatataaaacttacggagacaaaacattatttgaccatatatcgttccatattgaagaaaacgaacggatcggcttgatcggaccgaacggaacgggaaaaagcagcttgctgaaagtgatcgccggccatgaatcgaccgaaaaaggagacatcacaaagcccggcagcctccatatcgagtacttggatcaggatcctgatttggacggtccggaaaccgtgcttgagcacatttattcgggagattccgtgatgatgcggacgatgaggacgtatgagcaggcgcttcaggagctgaatacggcgcctgatgatccgaagaagcaggaaaacctgctggcggcgcaggggaaaatggacgaacatggcgcctgggacgcgaatacggcggcaaaaacgatattgacgaagcttggcgtcgcggatgtggcaaaagaagtgagctccctttccggggggcaaaaaaagcgtgttgcgattgcgaaaacattaattcagcccgctgacctcctcattttggatgagccgacaaaccaccttgacaatgaaacgatcgaatggcttgaaggctatttgagcgggtatccgggctccgtcgtcctcgtcacccatgaccgctattttttaaaccgggtgaccaacaggatctatgaactggatcgagggcgcctatacacatacaaagggaactacgaagtgtttttggaaaagcgggccgaaagagaagcgctcgccgaacaaaacgaaacgaagcggcaaaaccttctcagaagggagcttgcttggctgagaaggggggccaaagcccgttcgacaaagcaaaaagcaagaattcagcgggtggaggaactaaaggagcaggacgcgcctgaaaccggttcttcccttgatttcgcgatcggctcccaccgtctcggcaagcaggtgattgaagcggaaggcgttgacatcagccgcggcgggaatcagcttgtccgttcattcaatgaactgattgtgccgggggaccggatcggcatcatcggaccgaacgggatcggcaaaacaacactcttaaacgcgcttgccgggcgcattaagcctgacggaggacagatcacgatcggccagaccgtaagaatcggctattatacacaggatcacagcgaaatgaacgatgcgctgcaggtcgtcgaatacatcaaggagacggctgaggtcgtcaaaacggccgacggacaagtggtcacagcggagcagatgctggaaaggttcctctttccgcggagcgtgcagcgcaacttgatccgcaagctgtcaggcggggaaaagaggcgcctttatctcttgaaagtgctgatggaggagccgaacgtcctgttcctcgatgagccgacaaacgaccttgataccgagacgctcggcgtgctcgaagattatttggagcagtttcccggcgttgtcgtgaccgtatcccatgaccgctatttccttgaccgcgtagtcgacaggctgcttgtatttgaaggcggcggaaacgtatcgcgttttcaaggttcctacagcgaatatatggagaagcaaaaggagaacagccgtcaaaagccggcgtctgaagccgcagaacctgtcaaacctgagaaaaagaaaaggaagaaactgtcttataaagatcagctggaatgggacggcatcgaagacagaatcgccgctctggaagaaaagcataaacggcttgaagaggaaatcgccgccgccggcagcgattttgccaaaatccagacattgatggaagagcaggcgcaaacagccgaagagctcgaagcggcaatggagcgctggacagagctgtcgctgttgatcgaagagcttgaacaatcgtaa

SEQ ID NO: 865 - DNA, 195 bp, Bacillus licheniformis
atgccttttgaagaattgctcagctgtctgctgatggccgcattatgtgttctcttgtttataaaagcaatgggctgccgcaaagaaaacagaagaggctcgctggcattctttatgatgttcagcatcgtctgcttgaccacgctcatcattaaaattgtaaagctcggccattttttcggccgagctttttaa

SEQ ID NO: 866 - DNA, 903 bp, Bacillus licheniformis
atggaacgcaaactgcatttccccgcaaaacccgaacgccaccgccgcttcggatctgtcgaagccgtgaaaggaataaaaccgactgataaagaacagatgaaggatattcaaaatacaccgaacgactatttttttgacattgaccatgtcggtgtctcaaacgtttcgcatccgattttgattgcttcctcgctcaagccgtttacacaaacgacgatcggcgctttttcctttacgacgagccttgcgcgcgaccgcaaaggaatcaatatgagccgcctgacagaacagctgcagcgctatcacgaagcaaactggacggttgacttccatacactgaaagattttgcaaaggatttagccggcaatatggaacaggaaagcgcatccgtctccgtcagttttccatggtatttcgaacgcatcagcccggaaaccaaattgtccggactgatgcatgccgatatccatatgacagtctcttatcatgaaaacaaaggcttttcgcaaaccgccggcatcaccgcccatgcgacgacgctctgcccttgttcaaaagaaatcagcgaatacagcgcccataaccagcgcggcataatcaagatcaccgcgcatatcaatgaacaggcggagatgccggacgatttcaaagccgagcttcttgccgcagcggaaacgaacgcaagcgcaaagctccatcccgtcttaaaaagacccgatgaaaagagagtgactgaacaggcttatgagaatccaagatttgtagaagacgtcctccgcttaacagctgccgacttatacgaaatggactggatctccgcctttgagatcgaatgccggaacgaagaatcgattcacttgcacgatgccgtggcgcggctgtcgttttccaaatgttaa

SEQ ID NO: 867 - DNA, 1113 bp, Bacillus licheniformis
ttgcagcatagcgaaatcgtcattgttggagcgggacccgcaggtattggaatggggatcgttctgaaaaaactcggttttaaatcgtttacgattttggaaaaagaccgtgcaggagcttcattccgaagctggcctgaagaaatgaaactgataacgccgtcctttaccgggcagggattcggggctttggatttaaacgctgttgctccgggaacatcccctgcctttacttttcaacgcgagcacttgagcggacgggagtatggagattatttggcgcttttggccgatcattttcagcttccaattcaagaaggcacatcggttcgcagcgttcataaagacgacggcggtttttcagttgaaacagataaaggcactatgaaggccaaagacgttatttggggagccggtgaattccaattcccgaaatattcgtttcatggtgcagagattggcatccacaacagcaaggtcgccagatggagccaatttgaaaaagctcattattacgtggtaggcggctatgagagcgcaatggatgcggcggtacaactggcgtcctatggcagcgatgtgacggttgtgatgccgaattcgctccgcgaaaacgctgaagccgatccgagcaggtcgctttcaccttacacatgggagcgtctagaagatgcgtatgaaaaagggaaggttcagtttttggaaaaagccgttgtagagaaactggcgaaaaacggaccagcctatgatttatatttgtcagacgcgaggaagatccgttcggaaacacggccgattatcgcgacaggctttcattccggcgcaaaacaaatcgagcatttgtttgaatggggagagaacggcaagccgcttttaacaaatgaagacatgtcgaccgtgacggacggtctttatttaatcgggccgagcgttcagcatcaaaacgcggtcttttgcttcatttataaattcaggcagcgattcgccgtcatcgccgagcatttgttgaaaaaacgaaggttttcgatcgatgaaaaggtgctgacagaatacagggaaaatcaaatgtttctcacagatttgagctgctgtgaggtgcagtgtgaatgctga

SEQ ID NO: 868 - DNA, 1644 bp, Bacillus licheniformis
atgctcttcatcggactcgaatcggtcggaaaaacaacgcttttttcagcgatcactgatcagagggcaggcgaagcagcaaatgtgaaaggatcgacgatatttgcggctgaacgggagatcaaaagccttccgggctggcaagccattgatacaccgggcattcgggaggatggcagcgtgtcgaaacgagcgctgaaaaaagagatcgaaaaggccgatgaggtggttgccgtcttgcgcggcacccatttttctgaagagctgaacgcggtcttggagctgattccgccggaagcccggcgcgtctgctttatcgttacgtttcaggataaaatgacggacgccatgcgccggaagctttctgagcaagtggccaagcacagtctcccggtcctgctggttgatacgagaaccgtgacagacgataaaaaagagcggatcatcgcttttttaagaaaagaggctgaatttcatccgctcaaacggaggcggatgaaacagattgaacttgaaagtgtggctgttcagcagtctgtgtttcatcgtcccgtagcggggcctgtagtgagcgctgcacttttatgtttgttgtttatggcgccgatcgtattggcttatcatacatcagagtgggtgcagcaatctgcggacaaatgggcggttgaaccgctccaaaatgcggtcgggggcttgccgtcatggctgggcgcggcattggcggggaactatggcctgttatcccttggcatttactcgtttgtttgggcgtttcctgtcgttttgtttatgtctatagcgaatgcggcagcggatgattcgggtttaaaggaccggatcgtcgattcattggacccgctgatgcggaagatcggtctgaacggccgtgatttagttccgcttttgaccggatttggctgcaatgtcgtggccgttcagcagacgcggtcatgcagcatgtgtacgagaaagcgctgtgtatcgtttatttctttcggatcagcgtgcagctaccaaatcggtgcgacgctgtcgatttttcatgctgcgggaagggagtggctgtttattccttacctcgctgttcttgttgccgcagcggccgttcataaccggatatggtatcgcatcgatcagaaatgggccgcttacttcgagcgacggcaaacgtttttgcagaagccgtcctggaaagggatcgtctttcgagtaaaagaagtgcttcagcaatttatctttcaggcgatgccgatctttctcatcatttgcctggcggcgaccgtattgaatgaactcggtgtcatccgtcttgtgacattgcttgtctcgcctgttttaagcctgttcggcgctccagaagatgcggcgcctggccttgttttttccctgatcaggaaagacggcattctcttgttcaatgaagggaatggagcgcttcttgacatgctgccgggagcaacgctctttctgctcatttacttggcatcaacctttactccatgcatggtgacggtttggacaattgccaaggaactggggatgaaaacggcggcagccattatgggaaaacagatggccacttcagtcgtttcggttttgatcatcatgatcatcttgaagctgacgctttgcatttttaaataa

SEQ ID NO: 869 - DNA, 1203 bp, Bacillus licheniformis
atgagtaaaaagattcctgtgacagtattaagcggatacctgggggcgggtaaaacgacgctgctgaatcacatattgcaaaaccgccaagggctgaaagtcgccgttattgttaatgacatgagcgaagtcaacattgatgcagggcttgtcaagcaaggcggcggcctgtcgaggacggatgaaaagctggtcgaaatgtcaaacggctgcatttgctgcacactcagagaggatttgctggttgaagtcgaaaagctggcgaagcagggaaatattgattatatcgtgatcgaatcgaccggtatcagcgaaccgatcccggtcgctcagacgttctcttacatcgacgaagaattgggtattgatttgacccggttctgccgtttggacacaatggtgacggtggtcgacgccaatcgtttttggcacgattttcagtcgggggacagcctgctggaccggaaagaggctgtcggcgaagaggatgaacgcgacatcgccgatctgctcatcgatcaaatcgagttctgcgatgtgctgattttgaataaatgcgaccttgtctccgaggaagatctgcaaaagcttgagaaagtgctgaaaactttgcagcctaaagcaaacatcatcagagcggtcaaaggagaggtcgatccgaaggccgtcttaaacaccggtctcttcaattttgacgaagcgagcggttcagcaggctggatcagggaattaaaccaaggacaccaccagcatacgcctgagactgaagaatacggaatatcttcgtttgtatacgaagcgcgccgtccttttcatatagagcggttttataactggattcattcgctgccggaaaacgtcgtcagggcgaaaggaatcgcctggtgtgcgacgcgcaacacccttgcccttttgatgtcgcaggcgggtccttccgtgtcgctggaaccgatctcttattgggtggccgcactgtccaaaccggaacaggaacaaattctcagacagaaccctgagcttttaaaagaatggaatgaagaattcggagaccgccatacaaagctcgtctttatcggattggatctgtcgccgtctgaaattaccgcagaagcggatcgatgccttttaacagattcggagatggcggccgactggtcgcttttatctgacccgttcgattggcagattgaaagagctagataa

SEQ ID NO: 870 - DNA, 786 bp, Bacillus licheniformis
atgaagggggaagcgtattacagtgtgagaatgagagcctccgagaacggtccccatgaagaggggggaaaacacatatccggaggagagcggcttgtgcctttcatcggtttaaatgatgccgtcagcgatttattggaaaaaggtatgtctcattcgcggggcaggccggactttatgcaaattcagttcgatcttgtaaacgaaccgataaagcttgttcaacctttgcgcattgaaacgaatgaaacggtatcagcggaagaaggacaagcgctcgcccgtgagctgatcagccgcgccggcgtgccggaaagcgcggttgaaaaagcgtttcaaggcattgccgaatactggggcgtgaggggcgccgttttgtttgatattcattccggccggcggattgacggaagaaaagaaaaaggagtgcgcgtctcgcggctcgattggccggaagccgattttcaaaggtgggccgctttgtgcggggtgccgccaaatccacggttgaaagaggcgcttgccatcgcctcaaaggtatgtgagcacccggccgtcatcgccgaattatgctggtcggatgaccctgattacataacgggctatgttgcggctaaaaagctgggttatcagcggatgacaaagatgaaagagcatggggacgaaagcggctgccggattttttttgttgatggatcagcagatgtaaaaagctgcatagacgatttggaaaaacagcctgtattcattggtcaggaggtaaatcatgaatcaatcattcgttga

SEQ ID NO: 871 - DNA, 1347 bp, Bacillus licheniformis
atgaatcaatcattcgttgagaaaagcaaacaatatctttggctgccttttacccaaatgaaagactatgacgaaaacccgctgatcatcgaaagcgggcagggaatcaagctgaaagatatcgacgggagggtgtactacgacggattttcttcagtatggctcaatgtccatggccatcgcaagaaggaactggatgaggccatcaaaaaacagctcggcaaaatcgctcattcgacattgctgggaatgacaaatgttccggcgacagaacttgccgaggtgttaatcaagatcacgccggaaaatctgacgcgtgttttttattcggacagcggcgccacagcaatggaaatcgcgctgaagatggcctttcaatattggaaaaacatcggcaagccggagaaacaaaaattcatttcgatgaaaaacggctatcacggcgatacgatcggcgctgtcagcgtcggtgcaatcgagctcttccaccatgtatacgggccgcttatgtttgaaagctttaaggtgaacgttccatacgtataccgctcgaaaagcggcaacccggacgagtgccgcgatgaatgtctcgcagaactcgaacggctcctgagcgagcggcacgatgagatcgccgcgatgtcggtcgaatcgatggttcaaggggcatcagggatgatcgtgatgcctgaaggatatttggcaggcgtccgggagctctgcacgaaatatgacgttttaatgattgtcgatgaagtggcgacaggattcggccgaaccgggaaaatgtttgcctgtgagcatgaacgtgttcaacctgacttgatggcggctggaaaggccattaccggaggctatttgccgatcgccgtaacgtttgcgacagaggaaatttatgaggcgttctatgatgactacaacaaactcaaaacgtttttccacggccactcatacacggggaaccagcttggttgtgccgttgcgctggaaaatttgcgcctgttcgaatcggaaaaaatcgtcgctcaagttgcggaaaagtcgaaaatactggaatcgctctttcatgatctggcagcgctccctcatgtcggcgacatccgccagctcggttttatgagcgggatcgagctcgttcagtcgaaggaaacgaggcagccttatccgcccgaagagcgaatcggataccgggtgtctttgaaaatgagagagcttggcatgctgacgaggccgctcggggatgttgtcgcatttcttcctccgctcgccagcaccgccgatgacctgcgcgccatggtgtcgattatgaaagaagcgattcaagaggttacaggccgtgcgtattga

SEQ ID NO: 872 - DNA, 1140 bp, Bacillus licheniformis
gtgcgtattgacgaatggctcagcagccggctcgcaaagacgaaagcagccgggctttaccgctcgcttaaactgcctcaagctgaacgtacgaattgggcgtcaaacgattatttgggcctggcgaacgacaaacggctgattcatgccgcagaaacagcgctccgccgctttggagccggaagcacaggatcaaggctgacgtcaggcaataccgcatggcatgaaaaacttgagcggaaaatcgccggttttaagcagacggaagcggctctcttgttttcaagcggatatttggccaatgtcggcgtgctttcgtctttgcctgaaaaaggagacgtcatattaagcgatcaattgaaccacgccagcatcatcgacggctgccgcctttcaaaagctgatacggttgtttaccgccacaaggatatgaatgatcttgaagaaaagctccgcgccgcacagagccgtgcacgccgctttattgtgacagacggcgtgttcagcatggacggcacgattgcgccgcttgacgaaatcatgctgctcgccaagcagtaccgggcctttgttatcgtagatgatgcccatgcaacaggggttttgggagaagccggcaggggaacgagcgagtatttcggcgtctctcccgatgttgtgatcggtacgttaagtaaagctgtaggcgcagaaggcggcttcgtcgcaggttctaaaacattgatcgattttttgctgaatcatgcgagaacgtttatctttcaaacagctgtcccgcccgcaagctgtgcggcggcatgcaaagctttaaatatcatcgaagacagccgggctaaacgccggcttttgcaatcatcggtgaacacgatcaaacggagtctcgtggatatcgggtttacggtcaacggagaagatacgccgatcatacccgttatgatcggagatccccaaaaagctgttcaatttgcaaacggcctgaaggagaaggggattgaagccccggccatccgaccgccgactgttgcagaaggagagagccggatcaggctgaccgtcaccgcagaacgcaggttgaaagatattgaagatctattagaggggtttaaattaatgggaagagagttgaacttggtgaaatga

SEQ ID NO: 873 - DNA, 708 bp, Bacillus licheniformis
atgaagggtttttttgtaacgggaacagatacgggagtcgggaagacgtttatcgcttgcggtcttgccgctttactgaaagagcagcatgtagatgtcggcgtgtttaagccgtttttgagcggcgagctcgctagcgatccgcagagtgatacagctcttttaaagaacatgtctgaaacgcctcttactgatgaagaggttacgccttttatttttaaagagccgcttgcaccatacacagctgcgaagctcgaagggaggacagtcgggctggaagatgccgtgaaccattggaaaaagataaaggatcggcacgagtgcttcatcgttgaaggggcaggcggaattgctgtgccgctcggggaggattatttcgtcagcgacttgatcaaagcgctcgatttgccggccgtcattgtggcgcgtcccaatctcggaacgatcaaccatacgtatttaaccgcccaatacgcaaaacaaatggggatacgcgtgatcggcatcgtgatcaacggcatcagcagccggccgggacttgacgaacagacgaatccggacatgattgaaagattttgcggtgtgccgctcctcggcgttacaccgaagcttgaagacgcttcaccaacacaaattcaccacatgatcaaggatcatgtcgatgtttccttgattatgaatcaaatgcaaatgggggcagaaaaatga

SEQ ID NO: 874 - DNA, 1002 bp, Bacillus licheniformis
atgaatcagtggatggaacttgcagaacgtgtgctggatggcggggaagtaactgaaaaagaggcgctttccatcttggaatgcccggatgacgacgttcttctgcttatgcatgccgcttttcaaatcagaaaacgctactacggaaaaaaagtaaagctcaatatgattatgaatgcaaaatccggcctttgtccggaaaactgcggctactgctcgcagtcttcgatatcaaaagcgccgatcgacagctaccggatggtcgacaaaacgaccttgcttgaaggcgcaaagcgtgcgcacgatttaaatatcggaacatactgcatcgtggcgagcggcagaggaccgtccaacagagaagtcgatcaagtggtcgacgccgttaaagaaatcaaagaaacgtacggtttaaaaatctgcgcatgcctcggactgctaaagcccgggcaagccgagcggctgaaggaagccggagtagaccggtacaatcacaacatcaatacatcaaaaaccaaccattcaaatattacaacgtcccacacttatgatgacagggtgaacactgtggaaacagccaaaaaatccgggatgtccccatgttcgggcgtcatcgtcgggatgaaagagacgaagcaggatgtcgttgatatggcgaaaagcttaaaggcgctggatgccgactcgattccagttaattttttgcatgcgatcgacgggactccgctggaaggggtcaatgaattgaatccgctttattgtttaaaggttttagctttgttccgctttatcaacccgacaaaggaaatccgcatttcaggggggcgcgaagtcaacctccgctccttgcagccgttggggctgtatgccgccaattcaatcttcgtcggagactatttaacgacggcaggacagaatgaaacagaggaccataagatgcttcatgatttagggttcgaagtcgaatcggtcgaagaaatgaaagccagtttacagcggtag

SEQ ID NO: 875 - DNA, 1197 bp, Bacillus licheniformis
atgacgacagaactgcacgaggcagggccgagcctgaaatcggattcggatttttggagagatccatatctgttttacgatcagctgcggtccattcatcctgtatataaaggaaccgttttaaagcatccgggctggtatgtcaccggatatgaagaagcggcagcgattttgaaggaaccggcatttataaaccgcgttcctctcccagaagcttctactaaatatgaacaacttcagcgattgcagcgaaatatgatgctgtttcaaaatgagtccggccataagcggatgcggacgattgccggcaaagaattcatgccgcagaagacggcaactttccgccctgctatagaagaaaccgtccatgaattgctcgatcagcttgaaaacaagaagacggcggacatggtatcggaattcgcctttcctttggcaagccttatcattgccggcatgctcggcgtcccggaagaggaaaggtaccaattcaggcaatggacggcggatctcattcaaacgatcgatttgacccgtacaagaaaggtaatggcaaaaggcggtgataccgttgccaagctgaaggcttattttaaaaatttaattgaaaagcgaaaagcgcatccttctgaagacctgatcagcacattcgccggtcatgagcagcttgctgatgaagaagtgcttgcgacgtgcatcctgcttgtgattgccggacatgagacgacagtcaaccttttgacgaacgggttgtttttgctcatgacacatcctgaccagctcagtgagctgaaagaaaatccgctgctgattgagtcggccgtcgaagaatgtcttcgctatgaaagcccgacacagctgacagcgcgcaccgcgtcggaggactgcgaaatcaacgggaaaatcatcaaaaaaggagagcacttatatatccttttaggcgccgccaaccgcgatccaaagatatttcaaaacccgcatctatttgacatcacaagaaagccgaatccgcaccttgcctttggagccggtgcgcacgtatgtttaggctcggcattggcgcggctcgaagcgcaaattgccattcccgcactgttggcgcggctgcctaacttgaagcttgcttcaacagacgttccatttcgcaggctaatcggctttagatcgctggccgagctgcctgtcatcctcaattaa

SEQ ID NO: 876 - DNA, 831 bp, Bacillus licheniformis
gtgaacactcatcaaaatcgatattcggttcaaagcaaggtttcggcattgattaattgccggctgtttcagtcattcatcacgacggtcattgtgttgaatgccatctcgatcggtttggaaacttacgctttctttaagccttatcaaaaagtattttttattgtggattgcttgtttttaacgatatttgtaatcgaactttctcttaaactgttcgttcaaaaacagcacttttttaaaaacaactggaacgtttttgacttcgtgatcgtcgccggcagtttgattctttacaatacgaatttcgtcagcgttctccgtattttccgggtgctgcgggtcctgcggacgatcacttcggtcccctcattaagacggatcgtcaacgcgctgtttatggcgattccgaccatcagcagcgtcattatcctgatgagcatcattttttacgtgtacgccgtcatcggtacgatgttcttctccgccatcgcgccggaatacttcggcaacctgcagctcagccttctgacactgtttcaaacctttacgctcgaatcgtgggcaagcggcatattcaggcccatttttgccgagagcggctggtcatggctctatttcgtttcatttatcgtcattgcgactttcattatgatcaacttgatcgtcggggaaatcgtgaataatgcgcaaaaaatttctcaggaaatagaggatgagacaggcgagctgaaagaggatacaaaagaaatcaaagaactgcgcgcagaagtcaaagaattaaaggcgcttctgcaaacctatattacccaaaatgaaaagaaagattaa

SEQ ID NO: 877 - DNA, 423 bp, Bacillus licheniformis
gtggagtggatgaagattgatcaaatggccaagcgaagcggcctgacgaaaagaacgatccgcttttacgaagaaatcggtctgctttcttcaccgaagcggacggaaggcggagtccgtctttactctgaagacgatcttgaggaacttgaaagagtgatcagcgcgaaggaagtgctgggattctcgctgcaggagctccagcagttcatggaaacgggcaagcacctggagatgaataaagaaggatacctattgtcgctggataaacgggaacgaaaagaaaagcttgaagacattcagaggatgctgaatgaacagatgagaatgattgatgaaaagattgaaaaatttcaatcattcaagaagcgcttggaaggtatgcaggcaaaagccgagaatgccctacaatcaattgattaa

SEQ ID NO: 878 - DNA, 1185 bp, Bacillus licheniformis
atgaatgaacaaccacctgagaactccagtatgtttaaacagccaaaagcggtctgggcggtagcctttgcctgcgtgatctcgtttatggggatcgggctcgtcgatccgattctgccggcgatcgcgcagcagctgcatgcttcccccagccaggtttcgcttttatttacaagctatctgttagtcacaggttttgccatgcttttatcaggcgctgtctcgagccggattggagcaaagctgacgttaatcagcggtttgatcctgatcatcgtctttgcgggcctgggcgggctctcgcattccatctctcagcttgtcggcttccgcggcggctggggactcggaaacgccatgtttatctccactgcgcttgccgtcattgtcagcgtggcttctggcggaagcgcaaaagccattattttgtatgaggctgctttgggattgggcatttcggttggaccgcttgccggcggagagcttggcacgatatcgtggagagcgccgtttttcggtgtatcggttttaatggccgctgctcttttggccatcttttttcttttgccgcctgtccaaaagccgcagaagaaaatttccgtcagtgcgccgatcaaagcgcttcgttataaagggctgttgacgctgtcaggagccgcattcttatataatttcggtttcttcaccctgcttgcatattcgccgtttgttcttgacttaaatgaacggggcctcggctatgtctttttcggctgggggctgtttcttgcgatcacttccgtttttatcgctccggccgtacagcggatcttcggaaccgtccgatctctgatccttctgtttatgctgtttgcagctgatttgctcgcgatcgggatttggacggagcacatggcgctcgtcatcggggcgatcatcatagccggaggtattcttggcatgatcaatacgattttgacaaccgcggtgatggaagccgcgcctgtcgaacggtctgttgcttcatctgcctacagctccatccggttcatcggcggggccattgcgccttggatcgccggtgtgttagccgatcattttactgcgcatactccatattttgcaggatgcatcgccgtgcttgccggcatcgccgtcttggctggaggccgccgttatttggcgggcatcaaagccggtcattaa

SEQ ID NO: 879 - DNA, 1557 bp, Bacillus licheniformis
atgagtttacttacagttacaaagctgagccacggttttggcgaccgggcgatctttcatgatatatcctttcgcttgctgaaaggcgaacatgtcggtctcatcggaggaaacggcgaaggaaaatcgaccttcatgaatatcattacgggcaaacttgagcctgacgaaggaaaagtagaatggtcaaaaaacgtccgggtcggctatcttgaccagcatacatcgcttgagcgcggacaaacgatccgcgatgtgctgagaaacgctttccattatttatttgcgatgaaagaagaagtgaatgccatctacacaaaaatgggcgaggccgaccccgacgagcttgaaaagcttctcgaagaagtcggaacgattcaggacgccctgaccaacaacgacttttacgcgattgacgcaaaagttgaagaaatcgcccgcggcctcgggctcaacgatctcggacttgacagggatgtcgcggaattgagcggcggtcagcggacaaaggtgctgctcgccaaactgctcttggaaaagcccgacatcctgctgctcgatgagccgacaaactatctggacgaacagcatatcgaatggctgaaacgctatttgcaggagtacgagaacgcctttattttgatttctcacgacattccgtttttaaacagcgtcatcaatctgatctaccatgtggaaaaccaggagctgacccgctatgtcggcgactacaaccaattccgcgaagtatatgaagtgaaaaaacaacagcttgaagccgcctacaaaaaacagcagcaggagatttcagagctgaaagacttcgtcgcccgcaacaaagcgcgcgtcagcacaagaaatatggcaatgtcacggcaaaaaaagctcgataaaatggatatgatcgagctcccttcggaaaaaccgaagcctgaatttcactttaaacaagcaagaacatccggaaagctgatttttgaaacgaaggagctcgtcatcggctatgatgagccgttgtcccgcccgctgaacttgagaatggagcgcggccaaaaaatcgctctgtacggagccaacggcattggaaaaacgacattgctgaaaagcctcctgggggaaatttcaccgctgtcgggagaagtcgaacgcggcgaacaccttcatatcggctatttcgagcaggaagtcaaagagaccaacaacaacacatgcatagaagaagtgtggaacgacttcccgtcctttacacagtacgaaatccgcgcggccctggcgaagtgcgggctgacgacaaagcatatcgaaagcagggtttccgtattaagcggaggggaaaaagcaaaagtcagactatgcaagcttatcaattcagaaacgaatctgcttgtactcgatgaaccgacaaaccaccttgatgttgaagcaaaagaagaattaaaaagagctttgaaagaatacaaaggctctgtcctgctcatctctcacgaacctgaattctatatggacatagcgacagaaacatggaattgcgagtcatggacaacgaaagttttataa

SEQ ID NO: 880 - DNA, 1131 bp, Bacillus licheniformis
atgacagaaagatggccatttttaaataaagcaaaaccgtttattcaagaaaactggaaggcgtcgggctttcaagatccgacgaatgtccaaaaaaacgcggtcgatctgattttggacgggcgtgacgtgatcgccgagtcgccgactggaacgggcaaaacgctcgcatacgtcctgccgattctggaaaagctggaggcggatcaaaagaacgtgcaagctgtgattctggctccatcccgcgagcttgtcatgcagatttttgatgtgatcgttgaatggaaaaaaggctcggatatcagagccgcttccctgatcggcggcgccaatatcaaaaagcagcaggaaaagctgaaaaaacacccgcacatcattgcaggtacgcctggacgcgtatttgagctgattaaaatgaaaaagctgaaaatgcacgaagtgaaaacgatcgtccttgacgaaaccgatcatctgcttacgccggagcaccgcgggacgatacaaagcatcatcaaatcgacgctccgcgacaggcagctcctctgtttttcggcgactttaaaagacgatgtcgaacgcgagcttcgtgaaatgaccaaggatgcggaagttctcaagatcaagaggtcgaaagaagaatcggcaaaagtcaaacatcaatttctcgtatgcgaccagcgggataaggtgaaaattctgcagaaattctctcggcttccaggcatgcaggcgctcgtctttgttaaagacatcggcaatttaaacgtatatgccgaaaagctcaaatttcatcatgtagaaatcggcgtccttcacagcgaggcgaaaaaaattgagcgcgccaaaatattgcaggcatttgaggcgggagagttcacactgcttctcgcgaccgatatcgcagcgcgcgggatcgacatcgaagatctcccttatgtcatccacgccgatttgccaaacgttgaaggctatatccaccggtcgggaaggacgggaagaacggggaatgaaggaaccgtgatcagccttgtcaaccgcattgaagaagaaaggctgaaaaagctggcgaagaagcttgaaattccgcttcagcggatcgtgtatgaaagaggacggattattgaaagataa

SEQ ID NO: 881 - DNA, 1023 bp, Bacillus licheniformis
atgccgcaaaagcaaattgaacttgcaagacgtccgcagggcatacctgttatggacgatttccgcataaaagaaacggaaattccggaagcaaaaaacggtgaagcgcttgtaaaaacgctttatgtctcagtggacccttatatgaggggaagaatgcaggatacgaaatcctatgtcgagccatttccgcttgatgaagtgatcaccgggggcgtgatcggcgaagtgatatctgcaaaaggagacaagctcaaaaaaggggatattgttttgggccgcttgggctggcaggagtattcagcggttcgcgaagacaatctccagaaaatcgatccgtccctcgcacctgttaccgcttttcttggaattctcggcatgaccggtttgacggcctatttcggacttctggacatcggacagccaaaagccggtgaaacggttgttgtctccggggccgccggagcagtcggctccgccgtcggacaaatcgccaaaatcaaaggggcaagagtcgtcggaattgcgggctctgatgaaaaaacggcatatttaaaagaaaagctcggttttgatgaagcaatcaattataaaacaacggaaaatatggcttcagcgcttgaacaagcttgcccggacggtgtcgatgtttactttgacaacgtcggtggcgcgatttcagatgccgtcttcaccctgatcaataagtttgcacgaattccggtctgcggggcgatttcttcttataacgtcaaaagcgcagaagaagatatgggaccgcgcgtacaaacggccttgattaaatcaagcgccctgatgaagggatttgtcgtaaacgattacagggaccgctttcctgaaggaatcaaacagctcgccgaatgggtgaaaagcggacagcttcaatatgaggaaacgataacagaaggtttcgagcggatacctgaggcatttttaggcttgtttgaaggaaaaaacctcggcaagcagctgatcaaagtcgccgattccgacaatgcctga

SEQ ID NO: 882 - DNA, 384 bp, Bacillus licheniformis
gtgtattatttttcaccggaacagcaatacaacgcatggatcattagcgatttggtcaagcagattttttcaagagagggtcatcaggaagctgatactcatcgatttgaatcatttgccgccagacgattcggcatcaatatcgattatgtcttttcgatcatcatgaacatcggcgatccggaagaaaggagaacggcaagcagcaccgaagacctcctctcttcttatctcctgtcattgcttccttttatcacaaaagacatgttccaatattcaagagaaaatgccaatcaatatcttttaaatgaaagaaatgccgatgtttttcacctttttctgcccgattctgtactgaagaaaacatttcgtgcaatccgctga

SEQ ID NO: 883 - DNA, 348 bp, Bacillus licheniformis
atgaaaccagtagtaagacaatatacaaacgatgaaaaactgatgaaggatgttgaggaactcagggaaatcggagttgcaagagaagatatttacgttttgtcacatgacgacgaccgtactgaaagacttgcagacaacgcggatgccaatacgattggagccgaagagacaggcatcaaaaatgccgtcggcaatatcttcaacaaaaaaggggacgagctccgcaataaaattcatgagatcggcttttcaaaacaagaagcagaacaattcgagaaacagcttgatgaaggaaaagtcctcctcttcgttacggatcatgaaaaagtgaaatcctgggtataa

SEQ ID NO: 884 - DNA, 1437 bp, Bacillus licheniformis
gtggctaaagaaaaagatgcagaacaaaaatcggcactgaacatcattcctcttgcggtcacgattttagtcggagcggttatttggtttattccgtcgcccgccggattggacccgaaagcatggcacttatttgcaatctttgtggcaacgattatcggctttatatcaaaaccgctgccgatgggggcaatcgccgtattcgcattggcgatcacggcgctcactggaacgctgtcgattgaagaaacgctcagcgggtttggaaacaagacgatttggctgatcgtcattgccttttttatttcgcggggatttattaaaaccggtttaggtgcgcgaatcgcctatttatttgtacggatgttcggcaaaaaaacactcggactctcgtattcactccttgtcagcgatttgattttatcgccggcgatcccgagtaataccgcacgtgccgggggaattatttttccgattatccgttcgttatccgaaacttttcagtcgacgcccaaggacggcacggaacggcgcatcggcgctttcttgctgaaggtgggctttcaggggaacttgatcacttctgcgatgttcttaacggctatggcggcaaacccgctgattgccaaacttgcccatgatgtggcaggtgtgaatctgacctggacaagctgggctgtggcggccatcgtcccgggacttgtcagcttgatcatcaccccgcttgtcatttataaactgtatccgcctgaggtgaaaaaaacgcctgatgcggcgaaaatcgcaacagagaagctcaaagaaatgggcccgttcaaaaaatcggaactctctatggtcgcggtctttttgctcgtcctttttttatggattttcggaggcaacctgaatattgacgcgacaacaacggcattgatcggtttagccgtcctgcttttgacacaggttctgacgtgggacgatattaagaaagagcaaggcgcatgggatacgctgacatggtttgccgcgctcgtcatgctggcgagcttcttgaatgaactcggcatggtcggctggttcagcgatgcgatgaaatcgtatgtttcaggattctcctggatcagcgcatttctcattttaattgcggtttactattattcgcattatttctttgcgagtgcaaccgctcatatcagcgcgatgtattcggcctttctcgccgtgattatcgctgcaggcgctccgccgcttctcgcagcattaagccttgcgtttttcagcaacctttttgcttcgacaacgcattacggagcgggagcggctcccgtctttttcggggccggctatattccacaaagcaaatggtggtcaatcggctttatcctgtcgattgttcatattgtgacatggcttgttgtcggagggctatggtggaaattgttgggtatatggtaa

SEQ ID NO: 885 - DNA, 120 bp, Bacillus licheniformis
ttggacaatcaaaaagaagataaaaaggaagaggggattatttatgaaaagattattaaagagaaagaaaatatttggtactttctctgtggtagctttggtctttattttcggctttag

SEQ ID NO: 886 - DNA, 684 bp, Bacillus licheniformis
atgagacaagataataaaattataatatcgacaaatcaagtaacaaaaacatatggggagggtgcttcattatttaatgcgttgcaccctactactctttctataagcaagggttcaattaatgtaatcttagggaaaagtggatcaggtaaaacaactttgctgagtcttcttggtggcatggaggaacctaccaacggccatgtgtggtttaaacagcaaaatttttacaaattaaaggatcctgaacaagctaatattagaggcaataattttggtttcatttttcaaaattatcatttaatacctgaaatttcagtgtttgataatattatcctaccactaatgattaataaaaaggaaaaagacatttcggacattaagaaactgacaaatattttagggattgggcacaagttgaaatcttttcctttccaactgtcaggtggtcagcaacaaagagttgctattgcaagagcaatggcaaatgatccagaaatcatttttgcggacgagcctactggtaatttagatcaaaaaaatgcggaaaaagttattgaacttttagtttctttatgcaaagaatttgataaaacattagtgattgttacacacgaagagaacttgatagagaggccagatcagctttttttaattgaagatggacgagtcaaaactttataa

SEQ ID NO: 887 - DNA, 2559 bp, Bacillus licheniformis
atgttttgggttaaattagcttttaagtcgttgttccaaagaagaaaaatatcttatttaatggttttaataatctctatctcaatggtctttcttattatggtgaacagcgctacagaagaaattctgaaatacacaaaagaaaaggcctatgaaaaatatggtgagcatcatgctataattaacaatcttagtgaaaaggagttcaaagagttaaaaggaatacatagtgtaaaaaaaggaggaggaatttttttagttggttacactgaagattttaatgaatcttcagtcggagcttctattggatggtttgacaaaagtgctttagaattagggcatatacatattttacatgggaggatgcctgtacacaaaaatgagattgccattgaatcatttttaactgactcttttaaaacaaatgacgttattggagcggatgttaaattaaaaataggtgctgttgaggaagtttatcaaatagtaggtattgtgaataactattcctcaaattggtctactccaataaatatagaaaaaggaaagaatacatatccaaatgtttttataagtccgacaaaatttaatgcagataagcacattgatatacaaaaaagttttatcttttcacttcaaaatgaaaatgtagaaaagatcgaacaagaaataaatgaaaattttgagcaacatttgtctagccctgaacaattatatgaaaatgagaatctttttaatgaaggatataaaaactataataggattttctatatatgtttatttttttcgatcattctaatatttggttcgttgtgttgctgttttcgaatatttgaggtgttctatcagaattaccggcaaaaaattgcgatactgagatcccacggagcaaaaaaaaatcatataaggcttcttgttttttttcagagtaccattattgttttagtgagtttcttaatatcttttcctgttggggtgtacttgaaaaagatattaaatcatcaaacatatcgtactgaaaactacagttcttcacctctgttggaatctactctgttcgtcacgatttggctcaccttattatttttttcattatgtataacagcactaattgtaacggaaaaaataagcaaagaaacaattcatactaatttaaaagggaatccgcttatagcaaaaggataccgtgtttatcaatttatagaaaagtttccttttaaattgaagtctttggtgattcaacttacgtttcgatggaaatcttctatattatttattgttatactgtctttctcgatcatgatttttttcttcacccagttaatagccgatgaaacaattgaaaaatccgaagaaacaacaccggattttatactttcatctaagcaactgactgctgaggaacatgtaaatggctatattatcgaaaccaatcaatctgtttcttttgattataaaagtgtagaagatcttcaacgcttgccaggagttgtttatattgataaagttccaaactccctagggagcaccttgctcctaaccaaacaacaactttcacccaatattaaatcttggataaatacctataagctggagaatataaatgttgaaatatctgaggacacaatagataatttagtaccaaataatcttatacctattcctaacgtgaattttgtattagtgaatgacagtgaacttaaacatctccaacgcatgtatagttttgatgaaagttccgtaaggaaagtgaaaaaatcaagatcagcctttattttctttcctgaaataaatcaaaaagaaatgaataataaaattataaatggagacgaagtgaaaatcggcaggattgcatattctgatgaaaaaaaaccaaaatttgaaaattgggatttgaaggtagaacggattatcttgtctccttacttgatgaaacaaaatcagatttctcaagaacgtgagggaattacagttttaatttatgaagaagtggctaaaaaaattggggtttttgatggctataaagaattgacaatatatactgaccattcaatttctaaacaaaaaaagaaggggattattaataagacgaaacaaatggtttcatcaattcctggaagtctgtattattcagaaacagaagataataagagacttgagtcaatttctaattatctatccatacttgggactgtgttatttgcggttactgcattttactctgttttaacattagctgcaacaatgtattctagaatcattcaaagaaaagctgaaattgcaattaatcgagcctttggaaaaagcgtcacagccgtcttgaaagacctgataattgaaatgactatttatttaatattagcttttcttttaagcggaacgatcattctttttcttacattatcaatgcctgaaaactataataattataattatttcaaatattatttttattcagttgctttcacaagtactttatctttgatttcactgtctatcttattttttgtattgaaaaaaataagtatttctgacgctttaaaaactaaggaagaatag

SEQ ID NO: 888 - DNA, 579 bp, Bacillus licheniformis
atgttttggtcagttgatttaatgctgctcggtttcatgtgcgcaatcgtctactttttgtacgacattgtgaaaaaccgaaaaaaaacaagtttttttagaaaaatggtgtttgccagttttattgtttatttgagcgtcgtttatcactatacgataggcggaatcaacattccgccgcagccggcatacgctcaaatgaacattcagctcattccgttttattttgttgctgaatgggtgcaaatgcatcagcagagcgggtttgattggtttttttggaattctgtcaagcttacattttttaatgttttattgctcattcctttaggtgtgtatctttccgttctatggaggaaaattccgctgaaaaaagcggcggtttttgtttttttgacaagctttttgattgagagtctccagcttgtgctatctgtgactggattcataatggcgagaacctttaatgtggatgatttaattttaaatacggccggcggtgtaatgggtttctgcctgacgtctttcatgttcggagctaaaggatcaggttaccgcaggaaaggtctgcatttttga

SEQ ID NO: 889 - DNA, 783 bp, Bacillus licheniformis
atgggagatggtcaatggtttactgtaacagagcttgatgaatccacatatgcgatcagcgaatacgggcattgggaaaatgtgcactcttacttgctgattggggcgaaggaagccgttttaattgatacaggtcttggtatcggaagcatgaagacggtaacggatagtctgaccgatctgccggtcagcgtcatcacaacccatgtccattgggatcacatcggaagccacggtgaatatcagcgcatttacgttcatgaagccgagaaagactggctgacggacggaatcaaagggcttccgatcgagcacattcgccgcgatgtctctcgagatatcactaaacctgtaccggccggcttttccgctgaaacatacaccccgttcagaggtgaaccgtcgggaacgctgcaagacggcgacacagtcggctgcgattcaaggccgctcgttatttatcatacgcccggacactccccggggcatatctgtatctttgatccggcgtcaggctacttgtttaccggcgacctgctgtataccggagcccccatctatgcattctacccgacgactgatccggtccaattgattcagtcacttgaaaaaatctcggctatcgggcgcgtgaaaaaagttttcggcgggcatcatcagctcggtcttgctcctgacattttgcaggaagccgggcatgcggcactgcacttaaagaaacacgggctggcaaaacacggcacaggcacgcaccgattcaatagccttagttttcagttttaa

SEQ ID NO: 890 - DNA, 795 bp, Bacillus licheniformis
atgagtgatccttacatgcctttgacatccatcaacagcggggtcctggaagagtatgccgaaggtgtattcggtttgacggtgcaaatcgtcaatgtgtattttattttcgatcccgattcgcgggaagccgttttaatcgatgccggaatgcccaagtccgctccatttattttaagagaggcaaaggagcggttcggcgattttagcctaaaagcaatcgttttgacgcacggacatttcgaccatgtcggcgctttggaaggtcttctcgaaacatggccggttccgatttacgcccatgagaaagaaatgccttatttaacgggaaaagccgattatccgcctgccaaaccgcaagtgaaaagcgggctggttgcaaagatgtctccgttgtttccgaggcactcaatcaacatttcgtcccatgtaaagcagctttctgaagatggttcgcttccgtttcttaaagggtggaaatggattgagacgccgggacatacaccgggtcatgtttcgcttttccggcagtcggacagaaccttgatcgcaggcgacgccgttacaactgtagagcaggaatctctgtttgaagtggcgattcaaaagcaggagctgaacggacccccggcttatttcacaatggactggacaaaagcggcggactcagttcggaagctgtcagaattaaaaccggctgcattgttgacgggacacggtgtacggatgaaaggaaacgatttttccaaagagctccttgatctgtcaggccgccttcccgcttctgattcgtaa

SEQ ID NO: 891 - DNA, 1644 bp, Bacillus licheniformis
atgaacattcaaaaaagggtccaagctttgctggcagctgcggcaatgtttgcaggactgatggtgtctgatgcggttcacgctgcggaaaccccttactatggaaagaactatactcagccagagcaagtgtcatcattatatccggagccggaagaaactttctcgacccctgcttttgtgaaagaaggggaagcctttacgacacaagaagaaatgatgaagtttataaccagtctgacaaagaaaagcccgaatgtcaaaatcgggaatatcggtttttcaattgaaaaaagaaatattcccgtgctttatttcacaaaggataagcaaatacgttccatatcaaaaaaaccgaccgtctggctgcaaggacagatacacggaaatgagccggcagcgggagaatcggtcctggcgatggctgaaaaactggccgggccgtacggcgacaaagtgttggacaagatcaatgtcatcgtcgttccgcgggtcaatcctgacggctcgtatcagtttaacagacggctggcgagcggaatcgacggaaacagggatcatgttaagcttgaatctccggaagtccgcgccattcaccaggagttcaatcaatattcgcctgaagtcgttattgatgcccatgaatacggtgtcggccaaaacgaatttcaaagcgtaggcgaaaaagggtcattaaaataccatgatattttaattttatcaggaaaaaacttaaacattcccgaatcgatcaggtatgcgtctgacagcctttatgtgaacggcgtcagagctaaacttgatgaaaaaggtttttctaatgatgcatattatacgacaggaaaaagcaaggacggaaaaatcgaaatctatgaaggaggtactgaagcgagaatcggacgtaatgcattcggcctccagcctgctctttccttcctagtggaaagcagggggatagacatcggacgcgaaaattttgcaagaagagtcgcggctcaggttgctacacatgagacgatcatcgacacgacagtgaagcatgcagccgagatcaagcgccttgtctccaaagaaaaattaaagctgatacaaaacggcgctaaagtgagcgataaagaccaagtggtcatcaacagtgagtttgcaggcccgtttaaagacacgcttaaagtcgctgatattgcctcaggacaagcagttgacgttcctgtccaatattacagcgcctcagaggccgttcctgtgctgtcaagaactcggccgaccgcttaccttgtccttccgggccatcaagatatcgaacagaagctgaaggatcagggattaaagagcgtgacactggctttcaaacaaaaactcaccgctgaagcgtatgaggttttatcgaaagaaacagcgggagaatctgagggccggccagtgatcaaggtagaaacgaagctcaaaaaacagaaaaaagagtttcctaaaggaacaaaaatctattttacagctcagcagcaaagcaatctgctgtcaatcgcacttgagccggagtcggttgacagttatgtaagcacaggttacattccttctcaaaaaggcaaagagctgccggtttaccgcttcatgctgaacaccaaaacgcttaattttaaggaataa

SEQ ID NO: 892 - DNA, 1098 bp, Bacillus licheniformis
ttggaatcacatgaagaattatggagggaagccaaggccttcatcgagctctgctacggggaactgtcgaagtccgaagaagaaacaaggatgcgcttacataaaatagataaagaaatcagagaaaccggaagctatacacatacattagaagaaatcgaacatggagccagaatggcgtggagaaacagcagccgctgcatcggcaggctgttttggcactctcttactgtcatcgatcaaagaggcgttcaaaccgaggcagaggtgcgggatgcgcttttccaccatattcagcttgcaacaaacggagggaaaatcagaccgttcattacggttttccccccggaacaaaacggacaaaaaaaagtgtccatttggaaccaccagctgatcaggtatgcggggtatgaaactgagcaaggcgttatcggcgatccggcgtcattggaactgacaaaggcgtgtgaagcgctcggctggaaaggcgaaggtacgccttttgacgtattgccgcttgtttttcaaatagatgggcgtcctcctgtgtggtatgagctgcctcgtgaaatcgtcaaagaggttcggattgaacatccggagattgaaggcttcaaaagtttggggctgaagtggtacgctgtaccgattatagccgatatgaagctggaagtcggagggattcattataatgccgccccgtttaacggctggtatatgggaactgaaatcggagcgcgcaacctcgcggatgcagaccgctataatgcgctcgaaaaagtggcagccattatggggcttgatacggagcggaatacttcgctgtggaaagacaaggcgcttgttgaattaaatactgcggtgcttcactcctataaaaaagccggcgtcagcatcgtcgaccaccatactgcggcaagccaattcaagcggttcgaggagcaggaggctgaagccggaagggagcttgcagcaagctggacgtggctgattccgccgttatcgccggcagcgacccatatctttcacagctattatgaaaataaaacgctgaaaccgaattacttttatcaggaaaagccttaccttaacaaataa

SEQ ID NO: 893 - DNA, 639 bp, Bacillus licheniformis
atgagaaaacacattttttcgctcgctataatcgctatgaatctaatcatgtgggcaatcgcttatccgcacatttccggtcaagttccaatccattggtcatcttcgggggaaatcgacaggtatgcttccaaaatggaagcgatgcttgccatgattgggctgctcgtttttgtatatgtcttgatgttcttaacgccgaaaatcgatccgcgcagaaaaaactatcagcttttttcgaagacttattacattctcatcaatgccatgctgcttatattttctctgatcaacgtgcttgttatcatgaccgggctcgggtatgatctgccggcgggcagcatcgtaccggttcttgtaggcgctctattaatcgtcataggcaattacctaccgagagtccgctccaacttttttttcgggatcaagaacccttggacattgagcagtgattcaatctggaaaaaaacccacagatttgcggcgaaagtatttactttggcaggacttctaatagctgcggacgggttgttatcaatcagtccagaaatcatgcttccggttattttggcaacggttttggcgccctatatttattcttatgttttgtaccggaaggaaatcaatatgaaaagctga

SEQ ID NO: 894 - DNA, 285 bp, Bacillus licheniformis
atgaatcaaacctttaaagctctagctgatccgacgagaagaaagattttgaacctgctgaaggaccgggatatgaccgccggtgaaatttccgaccagtttcaaatgtctaaaccaagtatttctcagcatttaaaaattttaaaacaggctgaattaattcaggatgaaaaaaaaggccaatacatcatctactcgctaaacactacaatgtttcaagaaatcatcggctgggctttcagttttactgaacaagccggcaaagataaaggggatgcaaaatga

SEQ ID NO: 895 - DNA, 273 bp, Bacillus licheniformis
atgcttcaatacagaatcattgtagacggacgcgttcagggcgtgggatttcgctattttgttcaaatggaagcagataaacacaaattgacaggctgggttcgaaaccgcgacgacggcacagttgaaatccgcgccgagggacttgaggaaagcctgaagcaatttttaaaagcaattcaaaaaggaagtccattctcaaaagtaacggatgtaaaagtggaagaaaccaaagaattggacggattccaaaagtttaatatcagctattga

SEQ ID NO: 896 - DNA, 651 bp, Bacillus licheniformis
ttggaaaatcaggagtatgaaatcatatctattcatgtaggccgtccgcgtacatacgaattcgacggtaagcaggtggaaacggcaatcgtgaaggagcctgtcagcggacctgtctatttgagccgtacgaattttgaaggggacgggcaggcggatctgattcaccacgggggagaggataaagcggtttgcgtctatccggcggatcactacatgtattgggaaagcgtcttgaagcgaaagctgccagaggcggcatttggagaaaacgtgacagttaaagggctcaccgaaaaagaagtgtgcatcggcgatatctttaagctgggggaagctcttgttcaagtcagccagccgcgccagccttgtttcaagctggccaaacgtctgaatcaaaaagatatggtgttaaaagtgagggacaccgggtacagcggattctatttcagggttctcgaagaaggaattgttgcgcctgattcgcggctgcagctcgtttcaagagatgcgcatgaagccacggtctcgtatgccaatcatttgatgtaccatgacatgggcaatcacccagccattcggaagatccttgaggttgaagcgctgtcggaaagctggagaagctcatttttaaagcagctgagcgcataa

SEQ ID NO: 897 - DNA, 132 bp, Bacillus licheniformis
atgcattacggaagcaaaggctggtatgtagaagaactgaaaaagctgggaatgacgaagtatgaaggaagaaagcttcaaagctataaaaaacactttttggccaacctgcttgaaagcgtcaaaaaataa

SEQ ID NO: 898 - DNA, 156 bp, Bacillus licheniformis
atgctgtttgccatcatcgggctgatcttttttatcgagagcatcctgttaatcgtatatgctcataaaaaaaagaacggcttcttaaaatatattgggatcgtcctcagcatcgcgatcattgtgatgatcgtcaccagtttgacacacggctga

SEQ ID NO: 899 - DNA, 753 bp, Bacillus licheniformis
gtgattgtaacgaatgaccaagagctggaagggctcaagaaaatcggcagaatcgtcgctttagccagggaggaaatgaaggcaaaagcagctcccggcatgagcacaaaagagctggatctcatcggaaaagaagtgcttgaagcccatggcgccgcatcggctccggaaaaagaatacgacttcccgggaacgacgtgcatcagtgtgaacgatgaagtcgcccacggcatcccaagcgaatccagaattttaaaagaaggggatttgatcaacatcgacatctccgctgaatttggcggctactattctgatacgggcatttcttttgtactcggaaaaggcgatgaaatgctgcacaagctttgccaaagtgcggaaagcgcttttcaaaaggggcttttgcaggcgcgcgccggcaagaaacaaaaccaaatcggcagagccgtatacaatgaagcaaaagcaaacggatttaccgtcattaaaaacctgacgggacacgggattggaaggaacctccatgaagcgcccaaccatatcttaaattactatgacccgtttgataatgcgctctttaaaaacggaaccgtcatcgcccttgagccgtttgtttccacaaaagcagaacataccatcgaagccggagacggctggacattcaaaacgcctgacggcagctttgtggcgcagatcgagcatacgatcgtcatcacgaaaaacgaaccgatcattttaacacagcttgactga

SEQ ID NO: 900 - DNA, 1962 bp, Bacillus licheniformis
ttgaaaagatttattaaggaaagaggccttgccttcttcctgatagccgctatattgctatggctaaaaacttatgctgcgtatgtaattgaatttaatttaggaataaccaacacagtacaacacattttgctttttgtgaatccgattagctcaagcttgttctttcttggattgggactcttgttcaagaaaaaaatacagcagacagcgattatagtgattcattttttaatgtcttttttgctatatgcgaacgttgtatactacagatttttcagcgactttatcacgctgcctacaatcatgcaggcaaaaacaaacggaggacagctcggggacagcatcttctcgcttatgcacccgcttgatgttctgtatttcatcgacacctttattttaatcgggctggctgttttctataacagaccatctgaaacagcaacgaagcgtccgtttaaaattgtgatgggagcaagcatcctcgtcttcctcgccaacctggccgttgccgagatcgatcgtccggagcttctgacccgttcttttgaccgcaactaccttgtgaaatatttgggaacctacaacttcacaatctatgatgcggtgcaaaatatcaagtcaaacagccagcgcgcactggcaagttccagcgacgtaacggaagttgagaactatattaaagccaatcatgataagccgaatcccgaatacttcggaaaagcgaaaggcatgaacgtggtttacatttcactggaatcacttcagaccttcctgatcgattataagctcgacggcaaagaagtcacgccattcttaaattcactggcgcacgacaatgaaacgttttattttgataactttttccaccaaaccggacaaggtaaaacgtccgacgccgaatttatgatggacaactcgctgtatcctttatcgcaagggtcagtgttcattaataaagcgcaaaacacgctgcagtcggctccggccattttgaagtctcaaggctatacatcagcggcgttccacggcaactacaaaacgttctggaaccgcaatgaaatgtataaagccatcggttatgacaaattctttgacgctacgtattacgatatgagcgaagataaaacgaaaaactacgggttgaaagataaaccgttctttgaagaatcaatgccgctgttgaaaagcctgaaacagccgttctatacgaagtttatcaccctttcgaaccattttccgttcgagatggatgaaggcgatacagacttccctgccggggataccggcgacagcgtcgttgaccattatttccagtcggccaactacatggaccaggcgcttgaacaattcttcaacgacctgaaaaaagccggactgtatgataatacgattgtcgtcatgtacggggaccactacggtatttctgaaaatcacaacaaagcgatggccaaagttttgggcaaagacatcacaccatatgaaaacgcccaattgcaaagggtgccgctgttcatccacgcgcctggggtcaagggaatcaaatcccataaatacggcggcgaagtcgatgtagcccctaccctgcttcatttgatgggcgtgaatacgaaagattacctgatgagcggttcagaccttctgtcaccggaacaccgtgaaattattccgttccgcaacggcgatttcgtctctccggaatatacgaaaacgaacggaaactactatgacacgaaaacaggagagctactgaacgaaaaagacatcgatccgaacatcgaagaggccgtgaaaaaagaactcgaaatgtcggataaaatcgtcgacggagatttgctgcgcttctataaaccgaagggctttaaagcgatcaatccgagcgactacgactataccaaccacaatccgaaaacatcagaatctgatgcggcgcaaacaacgaaatcggattccggacaataa

SEQ ID NO: 901 - DNA, 135 bp, Bacillus licheniformis
atgaaataccgatttagaaaagcggaaaccggccttgcgaaaaaaatcgcaaaacctctgtcaaatcagggttttacagctttaaaaaagatgtttgggaatattttacgcttgtattgcattggcgggaactga

SEQ ID NO: 902 - DNA, 387 bp, Bacillus licheniformis
atggatttttcgagcatcgtttctgaagacaagattaagcaggccattaaggacggcgaattcgaagggcttccgggaatggggaaacctttgaaaaaagacgatgccgcccatgttccagagcatctccgcatggcttacagagtgatgaaaaacgccggaatggcgggggatgaaggcgctttaaagaaagaactgatgacgattgacgacttaatcgcaaagtgcgcggatgaagacgagcgcgagcgtttaattgagagaaaaacagaaacccggctcaggctcgacaggctcgccgacaaaaaaggcatgttttccaagcctgcctcagcgttttataaagaaaaagtgtaccgaaggctgagcggaaataaaaagcgctaa

SEQ ID NO: 903 - DNA, 1411 bp, Bacillus licheniformis
atggaacgattattgaattgggttgaatacatatcagattggctgtgggggccaccgctgatcatactgctgacagggacaggagtctacttgacgatcctgctgaaattttttcaatttcgctatcctctctatatctttaagcagacgatcggaagtgtcggcaaaaagccgaaaggagaagggacggttacaccgctgcaggctttgacatcggctctcagctcaacagtcggcgccgccaatatcgtcggtgtgcctgcggccatcatgttcggcggtccgggagccgttttttggatgtggctggtcgcgctgtttgccatggcgatcaagttttcggaaagcgtcctcgccgtccactacagagaaaaaaatgaagaaggcgaatatgtcggtggaccgatgtattacattacaaaagggctctccatgaaatggctcggcgtctttttcagtagcgctgatgatcgaacttgtaccgagcatcatggtgcagggaaattcggtttccgcatcgctggctgagacgttctcgttcaatcgtttatacaccggaatcgggattgcttttttgatcggtttagtggtgatcggagggattaaacggattggaaaagtgacggagctcgcagttccgcttatggcaggggcgtacatcggggccggtttcctgattgtcgtcacaaacctttcctctgtacccgcttttttctctctcatcttttcgaatgcgtttacatcttcttcggcattcggcggctttgcaggtgcggcagttgccgaaaccgttcgctgggggtttgcacgaggcctttattccaacgaagccgggatggggacggcgccgattgcccacgcagcggcgatgaccgaccaccctgtgagacaggggttctgggcggtgatcggcatcgtggtcgatacgctgctgatttgcacgaccaccgccttcgtcgtgctcacatcaggcgtctggaccggcgaaaacgcatcaagcgatccgggggcgctggccgcagccgcatttcgcagctattttggccctgtgggcggatacttcgtctctgtctcgctcgttttctttgtcttatcaacgatcacagtagtcattttttacggtgtaaaacaagctgaatttctgttcggacggctcgcgggacatgtgattaaattcatctacctggccgccgtcgtcatcggtgctgccggaggagcaaaggcgatatggggattcctcgatctcgcgctcgttttcattcttcttccgaatattttggcggtgctgctcttgagcagaaaagtaaggtctttatatgatgagttttttacatcagaaaagtattatttgaaagacatcggtcagcaggacggcgtttatgaaggtgacgaaaaagtgaacaatttatga

SEQ ID NO: 904 - DNA, 1413 bp, Bacillus licheniformis
atgactgatttgaatcaatcagcgcgacggattgtcgatgctgtcggcggtgctgacaacattgcagcggtaacccattgtgtaacgcgtttgcgatttgcattgctcgatgaaagcaaagtcaatcaagaggtgctggagcaaatagatgttgtcaaaggatcgttttcgactaacggccaatttcaagtggtgatcggccaaggaacggtcaacaatgtgtacgcggagctggtgaaggcaacaggaatcggcgaatcgtcaaaggatgatgttaagaaagcctcagagaaaaatatgaatcctttacagcgtgccgtgaaaacgcttgcagatatatttattccaatattgccggcgattgtcactgccgggctgctgatggggatcaacaatatcctgacggctcaagacattttcttcagcggaaaatcaatcgttgaagtctatccgcaatgggcggatctcgctaatatgattaacttgatcgcggggactgctttcgcatttctccctgcgctaatcggctggtcggccgtcaagaggtttggcggaaatccgctgctcggcatcgtgctcggcgtcatgcttgtgcaccctgatttgttaaacgcctggggatacggggctgcggagcaaagcggagagattcctgtctggaatttattcggtttggaagtgcagaaggtcggctaccaggggcaggtgcttcccattttgctcgcttcttatttgctggcaaaaattgagcgctttttgacaaagcggacgcctgagagcattcagctccttgttgtggcaccgattacgctgcttgtcacaggttttgcttcatttattgtcattggaccgattacatttgccatcggaaatgttttaacatcaggccttattgctgtctttgaacaattcgccgtactgggcggactgttatacggagggctttacgccgctctcgtcattaccggaatgcatcatacattccttgccgttgaccttcagctgatcggctcaaagctcggcggaacatttttatggccgatgctcgcgctgtccaatattgcacaaggttcagccgcgcttgcgatgatgtttattgtcaaagatgagaagcagaaaggcctgtccctgacatccggaatttcagcttatctcggaattaccgaaccggcattgttcggagtgaatctcagatacagatttccgttcgtgatcgcgatgatcagttcggggattgccggtatgttcatttcctcgcaaggggttttggcaagctctgtcggcgtcggcggcgtacctggaattttctctattatgagccaatactggggagcgtttgcgatcggaatggcgatcgtgttgatcgcgccgtttgccggaacatatctctacgcaaaattaaaaatgaaataa

SEQ ID NO: 905 - DNA, 1689 bp, Bacillus licheniformis
atggaaacaaaagaaaatccatggtggaaaaaagcagtcgtctaccaaatttatccgaaaagctttaaagatacaacaggaaacggtgtcggcgacatacgcggcatcatcgaaaagctcgactacatcaaggagctcgcctgtgatgtcatttggctgacgccgatttatcaatcgccgcaaaacgacaacggctatgacatcagcgactattacagcatccatgaagaatatggaacaatggccgactttgaagagcttcttgaagaggcccacaagcgcggcataaaggtgatcatggatcttgtcgtcaaccatacatcaacagagcacagatggtttaaagaagcggcgtccggcaaagaaaatctgtaccgcgacttttatatttggaaagacatgaagccgaacggcgctccgccgacaaattgggaatcgaaattcggcggctcggcgtgggagtttcatgcagagagcggacagtattatctccatctctatgatgtgacacaggcggatttgaattgggagaatgaagcagtcagaaaaaaagtgtacgagatgatgcatttctggtttgaaaaaggaatcgacggcttcagacttgatgtcatcaatgtcatctcaaaagaccagcgtttccctgatgatgacgagggggacggacgcagattttatacggacgggccgagggttcacgagtttttgaatgaaatgaacagggaggttttttcaaaatatgacagcatgacggtcggagaaatgtcatcgactacaatcgcagattgcatccggtatacaaaccccgaaagccgtgagctcgatatggtgtttaactttcatcatttaaaggccgactatccaaacggggaaaaatgggcgcttgcggattttgattttctaaagctgaagaagattctttctgaatggcagacggaaatgaataaagggggcggatggaacgcattgttctggtgcaaccacgaccagccgcggatcgtctcacggtacggggacgacggaaaataccgcaaaaagtctgcgaaaatgctggcaaccgtgattcatatgcttcagggaacgccatacatttaccagggagaagagcttgggatgaccaacccgaaattcgatgacatctccctttacagggatgtcgaatctctcaatatgtaccgtatcctgaaagaagcagggaagccggaagccgaaatcatcgaaatcttgaaagcgaaatcccgtgataattcgcggacgccggtgcagtggaacggagaagaaaatgccgggtttacggcgggcacaccgtggattccggtgcctgacaactacaaagaaatcaacgcagaagaagcgctcaacgatcctgattcgattttctaccattataaaaagctgaatgagctccgcaaggaattcgatatcattacaaccggcgattatcagctcatactggaagacgatcaagagctttacgcgtatttgagaaacggagcggatgaaaaactgctggtgatcaataatttttacgggaaagagaccgagtttcagctgcctgacgatattgatattgaaggctatgatgccaaggttctcatttccaatgacaccgatcttcccgagtcatttaaacgcttcacagtgaaaccatatcaatcgattgtttatcatcttgccaaaccatgctaa

SEQ ID NO: 906 - DNA, 717 bp, Bacillus licheniformis
atgaagatcaacaagtatatgatgatttacaaacaaatcgcggaacaaatcgatcaaagcatactgaatgccggagatatcctgccgtctgaaaacgaccttgccgaacagcacgacacctcgagggaaaccgttcggaaagcgctgaacgtgcttgctcagaacggatatattcagaagattaaagggaaggggtcagtcgtgctgcacagggagaaaatgcagttcccggtttccggtttggtcagctttaaggagctttcagaaacgctcggaaaagagacaagcacgacggtccatgagttcggcttgacgcatccggacgcatatattcaaaagcagctccgcacttccggagatgaagaggtatggcgggttgtcaggtcgcggaacatcaacggagagcgtatcatcctggataaagactattttatccgcaaacacgtgccgcttttaacgaaagaaatatgcgaggactcgatctatcaataccttgaagatgaatgcgggctcgtcatcagctatgctcataaggaaattgtagtcgagccatgtacggcagaggatcaagagtatttggatctgaacggatacgagcacattgtggtcgtgaaaaatttcgtttttcttgatgatacgaccttgtttcaatatacggaaagcagacaccgccttgataaattccggtttgtcgattttgcaagaagagaaaagtag

SEQ ID NO: 907 - DNA, 693 bp, Bacillus licheniformis
atgattcatgaaactgcaaagatcggaaagaacgtggtattgggagagcatgccgttattgaagaaaatgtggtcatcggggacaacgtaacaatcggtcatcatgccattattaaaaaggacactcatatcggcagcggggtgaaaatcggcgatttggccgtccttggcaaagcggcttcttcaaataaaaaaatggctcgccagccgaagcaggcaggagcccctttgcggatagaagatgatgccatagttggagcaagcgctgtgatttaccgagacgtgctgttggaacaaggcgtcttcgtgggggatatggcgagcattcgcgaaaatgtcgcgatcggcagagaaagcattataggacgcaatgcgatggttgaaaacaataccagaattggaagtaaaacaacaattcaaacgggctgctatatcactgctgatatgacgattgaggatgaagtgtttatcggtccctgctgttccacgtcaaatgataaatatatgggaaagggaaactacccgtatcaaggtccaactattaaaagaggagcgaaaatcgggaataacgcaacattgctgccggcggttgtcgtcggggagggggcggtcattggagcgggtgccgtcattacaaaagatgttcccgcaggcaaaacggctgtgggcaatccaggccggttgatgaagtga

SEQ ID NO: 908 - DNA, 1227 bp, Bacillus licheniformis
atgtccattcgaaacgcggtgatgaacgggggttttgagacaggtaccctctcgtcctggttaggcgtaaacgcatctgttacaagccagttttcgcattcaggttttttctctgcgagatttcttggcggaacagtcacatcatatattgctcaatttgttccggccagggcgggggaaggaagcgaatttcttgtttctcttgcgagagcaagctttctcccggcaccttctgtaacgatacaggttacttattttgacagtcaatttaattttctcggatacgggctgtttgccactgtgccgtcaagcagaataccggcagccgaaaatgggacatggcttgaagtctatcaaacaacttcaccggctccctctggcaccacccaggcattcattttgatcaacaacattccgcaggcgggaactgcaagtgtgcttgtggatgatgttgctctattgagtgttgagggtggaggaggtccaacaggagcgacaggtccgacgggagcaacaggagtaacgggagccacgggagcgacaggagcaacaggagtgacaggtccgacaggagcgccgggtccaacaggagtaacaggtccgacgggagtaacaggcgcaaccggcccgacaggtccaacgggagccaccggcccgaccggagccaccggagcgacaggtccgacaggaacgacaggtccaacgggagccaccggcccgaccggagccaccggagcgacaggtccaacaggagtgacaggtccgacgggagcaacaggtccgacaggagcaacaggtccaacaggcgcaacgggtccgggaagtctgttgggaacactggcgcagtcaactgaccctgtttcactcacagttggcagcgaaacaccaattctaacgacaactgttacctcttcagctggacagaatataaaactcgattctatggctgaagttgatattatcatagggccagctactacttttgaatacagtataatttttacattgtatagaaataacagcgctatcgcacaagtgtctgttgattctcaggatgaaaaatcggcaggttcggttcgtgtatatggtgatattcctaaccttacatgggttgatacaccaggggcaggaacacaaacttatgaggttagaattaatgtaacagggactaaccttttggcagccaatgttaatacaagagcgctaaatgctgtaatctttgattga

SEQ ID NO: 909 - DNA, 1458 bp, Bacillus licheniformis
ttgctcccgttgggcctgtcactccggttgcccctgttggtcctgttgctccggttgcccctgttggacccgtcgctcccgttgctccggttgccccggttactcctgttggacctgtggctccggttggacccgttggtcctgttgccccggttggacccgtcgctcctgttgccccggttgctcccgtcgggcctgtcgctcccgttgggcctgttgcgcctgtcgctcctgtcgggccggtggctcctgttggacccgttgggcctgtcgctcctgttgggcctgtcgctcccgttgctcctgtcgggcctgttgggccggttgaacccgttgctcccgtcggacccgttggtcctgttggacccgttgctcctgttgggccggttgctcccgttgctcctgttgatcctgttggaccggttgcgcctgtggctcccgttgccccggttactcctgttggacctatcgctccggttggacccgttgggcctgtcgcccctgttggacccgtcgctcctgttgcccctgttggacccgtcgctcctgttgcccctgttggacccgtcgctcctgttgcccctgttggacccgtcgctcctgttgcccctgttggacccgtcgctcctgttgcccctgttggacccgtcgctcctgttgcccctgttggacccgtcgctcctgttgcccctgttggacccgtcgctcctgttgcccctgttggacccgtcgctcctgttgcccctgttggacccgtcgctcccgttgccccggttactcctgttggacccgttgggcctgttgctcctgtcggacctgttactccttttggaccggttgagcctgtggctccggttgctcccgtcgggccggtggctcctggcggacctgttgcgcctgtcgctcctgttggacccgttgggcctgttgcccctgttggacccgttgctcctgttgggcctgttgatcctgttgcccctgttggacccgttgctcctgttgggcctgttgatcctgttgccccggttactcctgttggacccgttgggcctgtcgcccctgttggacccgtcgctcccgttgccccggttactcctgttggaccggttgagcctgttgcgcctgtggctcccgttgcgcctgtcgggcctgttgatcctgttgagccggttgctcccgttggtcctgttggacccgttgctcctgttgggcctgttgcccctgttgggcctgtcgctcccgttgggccagttgcgcctgtcgctcctgtcgggccggttgctcctgttggacccgttgggcctgtcgcccctgttggacccgttgctccggttgctcctgtcgctccggttgctcctgtcgggccggttgctcccgtcgctcctggttgatcaattgttatcattgcaacatcatcaattagtatcggtgccccccccactaagagggagtttttga

SEQ ID NO: 910 - DNA, 2295 bp, Bacillus licheniformis
atgataacaattgatcaaccaggagcgacgggagcaaccggcccgacaggagcaaccggagcgacaggagcaaccggagcaacgggtccaacaggggcgacaggcccaacgggtccaacaggagcaaccggcccgacaggagcgacaggcgcaactggcccaacgggagcgacaggcccaacaggggcaacaggcccaacaggagcaacgggtccaacaggaccaacgggagcaaccggctcaacaggatcaacaggcccgacaggcgcaacgggagccacaggcgcaacaggctcaaccggtccaacaggagtaaccggggcaacgggagcgacgggtccaacaggggcgacaggcccaacgggtccaacaggagtaaccggggcaacaggatcaacaggcccaacaggagcaacgggtccaacaggggcaacaggatcaacaggcccaacaggagcaacgggtccaacaggggcaacaggcccaacgggtccaacaggagcgacaggcgcaacaggtccgccaggagccaccggcccgacgggagcaaccggagccacaggctcaaccggtccaaaaggagtaacaggtccgacaggagcaacaggcccaacgggtccaacaggagtaaccggggcaacgggagcgacgggtccaacaggggcaacaggagcgacgggtccaacaggggcaacaggagcgacgggtccaacaggggcaacaggagcgacgggtccaacaggggcaacaggagcgacgggtccaacaggggcaacaggagcgacgggtccaacaggggcaacaggagcgacgggtccaacaggggcaacaggagcgacgggtccaacaggggcaacaggagcgacgggtccaacaggggcaacaggagcgacgggtccaacaggggcgacaggcccaacgggtccaaccggagcgataggtccaacaggagtaaccggggcaacgggagccacaggcgcaaccggtccaacaggatcaacaggagcaacgggagcaaccggcccaacaggagcaacgggtccaacaggaccaacgggtccgacgggagcaacgggttcaaccggcccaacaggcccgacaggagcaacgggagcgacaggcccaacaggagcgacaggcccaacgggtccaacaggagccaccggcccgacaggagcgacaggcgcaacaggcccaacgggagcgacaggcccgacgggagcaaccggggcaacaggagcgacgggtccaaccggggcaacaggaccaacgggtccaaccggagccacaggtccaacaggagtaaccggggcaaccggagcaacgggagcgacgggtccaacaggggcaaccggagcaacaggaccaacaggggcaaccggagtgacaggcccaacgggagcaacgggtccgaccggagtcacaggtccgacgggagcgacaggcccaacgggtccaacaggcccgacgggagcaacgggttcaaccggagcgacaggcccaacgggagcaaccggcccaacaggagcaacgggtccaacaggggcaacaggcccaacgggtccaacaggagcgacaggcgcaacaggtccgccaggagccaccggcccgacgggagcaaccggggcaacaggagcgacaggagcgacaggagccaccggcccaacaggcccaacgggagcgacaggcgcaacaggagcaacgggtccaacaggagcaacaggtccgacgggagcaaccggcccaacaggcccaacgggagcgaccggaaccacaggagcaaccggcccaacaggtccacagggtccaacgggtccgccgggtgaagcaggaacaatgggagcagctggtccaacaggaccaacaggaccagccagtccacaaactgctatattctttaacaatctatttgggtctactactgtttacaatccgccaacggttcctttaaatacagaagtaactgttgtatcggttcctaatgtatcggtcactagtgggcaaaatattaaggtggattatgcattggctatagaagctgtaaatactgcaaacagtaatataatttttgaaataaggctatatagaggaggaactttagttcaaacaagaatatttaataggagtctcgcggctgccggcactcaaaggtttccattagccagcacaattgttgatacagttcctgccaccgcaacagttgattattcagttagggtagcggtaacaacggcttcaaatgttacttccgctgcagcatttaatagagatttaaatctcattcggttcccttaa

SEQ ID NO: 911 - DNA, 2448 bp, Bacillus licheniformis
atgtcgatccaaaatttggttgtaaacggcagctttgaaaacggggcacttccaccctgggtaggccaaaatgcaaccgtcacaactcaattttctcattcaggtttttggtcggcaagattactgggcggggctgttacttcttttattgcacaatttgttccagtagatgcaggagaaggattggaatttttagtttctctagctaaagaaggttttcctgctccatcgcctcaggtgcaaattcaagtgtcttattttgatagttcatttaactttttaggccaaggtctctttttaaatatcccgttcaacagactaccgattgtccaaaataatacatggcttgaagtctatcaaacgacgaccccagctccagctggctctactatggctttcattttgattaatactttgccgcaggcaggtacagcgaatgtcattgtagatgatgtagcactattagatgtagaaggcggaggaacaggtccaaccggcccgacaggtccaaccggcccgacaggtccaaccggtccaaccggagcgacaggtccaaccggtccaacaggtccgacgggagcaaccggcccgacaggagcgacaggcccaacaggtccgacgggagcaaccggcccgacaggagcaaccggcccaaccggtccgacgggagcaacaggtccaacgggagcaacaggtccaacaggagcaacgggagcaaccggcccgacaggagcaaccggcccgacaggcgcaacaggtccgacgggagcaaccggcccgacaggagcaaccggagcgacaggcgcaaccggagcaaccggagcgacaggagcaaccggcccgacaggagcaaccggcccgacaggagcaacaggtccgacgggagcaacaggcgcaaccggagcgacaggagcaaccggcccgacaggagcaacaggtccgacgggagcaacgggagcaaccggagcgacaggagcaaccggagcaacgggagcaaccggcccgacaggcgcaacgggagcaaccggtccaacaggagcaacaggcgcaaccggagcaacgggagcaaccggcccgacaggtccaacgggagcgacaggcgcaacgggagcaactggagcgacaggcgcaacaggtccaaccggagcaaccggcccgacaggtccaacgggagcgacaggcccaacaggcccaactggagcaaccggcccgacgggagcaaccggagcgacaggcccaacaggtccgacgggagccacaggagcgacaggagcaaccggagcgacaggagcaacaggtccaacgggagcgacaggcgcaacgggagcaaccggcccgacaggtccaacgggagcgacaggcgcaacgggagcaaccggagcgacaggcgcaacaggtccaaccggagcaaccggcccgacaggtccaacgggagcgacaggcccaacaggcccaacaggcccaactggagcaatcggcccgacgggagcaaccggagcgacaggagcaacaggtccaacaggagcaacgggagcaaccggcccgacaggtccaacgggagcaacaggtccaacaggagcaacgggagcaaccggcccgacaggagcaaccggagcgacaggagcaaccggagcaacgggagcaaccggagcgacaggcgcaacaggtccgacgggagcaaccggcccgacaggagcaaccggagcgacaggcgcaaccggcccaaccggagcaaccggcccgacaggtccaacgggagcgacaggcgcaacgggagcaaccggagcgacaggcccaacaggtccaacgggagcgacaggcgcaacgggagcaaccggagcgacaggcccaaccggagcaacgggagcaaccggcccgacgggagcaacgggagcgacaggagcaaccggcccgacaggagcaacaggtccaacaggagcaaccggagcgacaggcgcaacaggtccgacgggagcaactggcccgacaggagcaaccggggcaaccggagcaaccggtccgacaggagcaaccggtccgacaggcccaaccggagcaacgggagcaaccggcccaacgggagcaaccggcccgacgggagcaatcggtccgatgggagcaaccggggcaaccggcgcaacgggagcaaccggcccgacgggagcaacaggtccaaccggcccaacaggtccgacgggagcaacaggtccaaccggagcgacaggtccaacaggtccaaccggagcgacaggtccaacaggtccaaccggagcgacaggtccaacaggtccaaccggagcgacaggtccaacaggtccaaccggagcgacaggtccaacaggtccaaccggagcgacaggtccaactggcccgacaggtccaactggcccgacaggtccaaccggcccgacaggtccaactggcccaacaggtccaaccggcgcttaa

SEQ ID NO: 912 - DNA, 1092 bp, Bacillus licheniformis
atgatcagattgatcgagccgtatattacatttgaagaagtgcaagcagaattaaaggagatattttcctctggcatgctgacaaaaggcccttatgtcagaacatttgctgatcatatgagacagtatgtcagtgcaaagcatgcttttttaacaacatcggcaacaacggctttatcgatgtgccttaaaagcctgaacgtgcaacccggagatgaagtaatcgtctcagacttctcgttccccgccactgtcaatgtaatagaagatttaggagccaagccggtttttgccgatgttgatcttgaaacatttaacatgcttccagaagaactggaaagtcaaatcacgtcccgtacaaaagccgttctttttgtagatgctcttggaaacccgacaggcatcaccaacattaagcaaatttgtaaggagtacggcttaccccttgtggatgatgccgcttgtgcgatcggcagcagcgaatacggctgtaaatccggaaaaattgccgatctcacctgtttcagctttcacccaagaaagctgcttacgacaggcgaaggcggggcaattacaaccgaccgggaagagttgaaagactggctttcggtcaaattaaaccatggcgctgccatctctgacggaaaattggattttatagatttcggctacaactacagattatccgatatccaagccgctcttggaattaaacagctccaaaaacttgatgacatcattcatcggagaaaccttcagcagaaagcatatagtgaacagcttgaacccctcggattccaaagtcaacaaatcggtcctaacgttgtacacaacatacaatccgccgttttcaaagttccaaaaaacatcgttcgcgacgaattgattcaatatttgagcgactgccatatagagtcgactttcggaacttattgtttaagcggcactacctattaccgccgcaaatacaggcagattaaaccgaattccatttttctggaacaaaatacgatcacccttccctgccatgatcaagtcaatgtggatcaggtagtctcagccattcaatcatttagccaacgtaaaggctaa

SEQ ID NO: 913 - DNA, 543 bp, Bacillus licheniformis
ttgaaacaatggaaaagcgaaggaaaaggtgaattcactctttcccagcttgggggctgcggcgaaaatgtcgttatcgaagacggggtccgcatttttcatccggaaaacatctatatcggagataacgtttatatcggccatgacacgattttaaaaggctattataagcatgacctgatcatcggttcaaacagctggatcgggcagcaatgttttatacacggtgccggcggggttacaatcggagaatttgcaggaattggtccgaacgtccggatacatgccgcttaccataccgatcctgataaacccgacagtaccattttgttttcgccgcttacattcgctcctattcatattgaagaaaactgcaacatcgggatcggtgcgtctatcctagcaggcgttacgataggcgcccactccaaaatcggagcaaatgccgtcgtcaatcgcaatattcccccgtacagcatagcagtaggcgtgccggcaaaggtgattaaaaaccgaagaatgaaagatgaggatctctcatga

SEQ ID NO: 914 - DNA, 975 bp, Bacillus licheniformis
atgagcgatatgacagagttatccggccagcatattttcataactggcggagcaggctttatcggatcctctttaataggaaagctgatagagcgcaacagcgtcaccgtatatgacaatttttcaagagactccctccggtataagccttaccgggaccatcctcacttgaaagtgctgcagggagacattttggatttgaacgcgcttaaaaaggcgatccagggggccagccacattgtccacgccgccggcatcgctgggattgacacggtcattcaaaacccggttaaaacgatgcaggtcaacatgatcggttcagccaatctgcttgaagcggctgccggtttaaccgaatgcaaaagggttgtctgtttcagtacaagcgaagtgttcggccaaatcgctttcagagcgcgcgagaccagtcatactgttttaggagcggtgggagaagcccgctggacatatgctgtcagcaaactcgccgaggagcatattgcatatgcctattttaaagaacttgggcttccgaccgtcaccgtccgcccttttaatgtttatggaccggaacaagtcggcgaaggcgccatcaaaacgatggttcacagagctctgttagatgagccgatctatattcacggcgatggaacgcaaatccgggcctggtgttacgtagatgacatgatcgacggaattttgcgttgtttgacgatgaaggaagccatcggagagtctttcaacatcggcaatgaacgcactgtgatcaccgtatacggattggcaagcacgattatcagagttctcggatcaaaatcacaaatcttctttggggagaaaaaagaagccgatattgatctgcgcatccctcaggtcaataaagcaaaagagatgctcggtttcagcgctaaagttgatctggaagaaggcatcagaagaacagctgaaagcattaaaaaaaatttggatcaataa

SEQ ID NO: 915 - DNA, 1374 bp, Bacillus licheniformis
atgaaagatttcaaatcagatatcattcattgtctggaacaaaaagagtggaacaaagccatgaagcgcctaaaggagtgggaagccgagggatcgcataacgagcctgacttttattttcttcaagcctctctttctgtttatctcggccatgaccataacgcttggctgtggctctggagagggctagatctttttcctgaaaacagatctttaaatctgctgatgggaaaagtgtgcctgcgcaccggaagggaaaaagaaagcgcagcctatcttcaaaaaggagatggagcagaaaccgcaagcgcgccgaagcttgaccttcctgttgacgaaaaaaccgaacctccggctgggcaaatccgcattttgcaaggcacaatggaaatcgccaatcaaatgaataccttggctaaagggctctcacagcatggcgcgcttgcccacactttaaattactatccgtattatttaaattacgctgccgactacacctggtcattgctgaaagaacgcaatacgcccgccatgaatgcgaagctgagaaggcttgccaatgatctcctgccatcctatgatttgttccattttcatttcggcacaagcttcacgctggacatgtcggattatcccattttaaaacaggctgagaaaccaatggtcatgcatcattggggcagcgatgtgaggctttattcaacattggctaaaacaaatccatacgccgttgtcaaaacgaaaaacgaagctcgaattcgataccacctcaaacgaatttcccaatatgtccagcactgcatcgtcgccgatatggagctttacgagtatgtaaaagactattatgagcatgtccacatgattccgaccatgatccagcttgaccgctatactcccgactacaggtcaaatgaaaagccgctcatcgttcatgcccccacctctcccggaataaaaggaacccgccacatccttaaggcggttgaatctttaaaagaaaaatacgattttcattttcacctagtacaaggagtttctcatgaacaggcaaagaaaatctaccaaaaggctgatttgatcattgatcagcttcatatcggcagctacggattatttgccgtcgaatcgatggcaatggggaaacccgttatctgctggatcagtgattttatgaaggatcactatccttccgaactgcctcttataagagcaaatcccgccaacattacagaggtgattgaaaatgtgcttaaaaaccgggatatgctgccggaaatcggccagaaaggaagaaagtatgcagaagttcatcatgatatggtgaaaaacagcaaaaaaacattggctgtttatcagtcgctactttcggaatga

SEQ ID NO: 916 - DNA, 2244 bp, Bacillus licheniformis
atggataatgaattggaatatctgctagactctgttgggcttagctggagagaaactgaaatatcccaactgatttttcatcacaaatggcacgatgctgcgcagaagcttgaagagaagctgaaagccgctcccttcgatcccggcttgctgataagcgctgcttttgtctgtgaaaaaaagcagcaggctcagagagcgtctgaattatatgatgatgccctcctatttgtcaggcgcgaacatcgacctcgcctcatgaaggagaaagaagaccttttcaaaaaaatggtcaggcgtccaaaaatcatttttttcgtcaaaccggatttggaccggtttttgaattctgtcgttgagcacctttccggaacttaccggacaaaaaaaatcgtggttcatgacctgaatcaaatcgacgctggcatgcaatgggcggatatttgctggtttgaatggtgcgatgatttattgatccacgggagcaaagtcccttctgcagcggctaaaacattaatatgcagactccacagctatgaagcatttactttttatattaaaaaggtatattggcaagcggtggaccaagtgatttttgacggagagcatttgcgggaatacgtattggatcaagtcaaggcgttgaaaaaagagaaaacggccgtcgttccaaatggaatcaagctagatcaatacacttttaaacaaaggcaaaaaggctttcacatcgcttatgtcggctatatcaactataaaaaagggccgatgcttttgctgcaggctttcaaagcactgattgacaaagacccaagatacaaattgtttatcgccgggacgtttcaggacgcccgctatcagttgtatttcaatcaaatgattgatgagctccggctgactgacaacgtccaatttgacggatggcaggatgacatgaatcaatacttggaggataagcattaccttatttgcacaagccttcttgaaagtcagcatatgtctgcaatggaagcgatggctaaaggcattaaaccgctgattcacaatttttacggggcaaagacgatatacgatgaatcggttgtttggaatacgatagatgaattcgtgtccatgatgacaaacggtgattatacacctctgcaatatcgatcatttattgaagagcattattcatatgatctgagcatgcgcaaaattgaagagatgatttcaggctttgcaaggcagtcagagttgacggttatattaaatccgccgctgattacagtgggcatcatcaactataattacagcagtttcatagatgaatgccttcaatccgttttaaatcaacactaccccaatatcgatattctgatcatcgacgaccattcaactgacggctccatgcaaaaaaccagcagctatcaaaaaacgcatccgcacattcgagcgatatgccacagcgaaaatacaaaacttcctgatctcgcttttaaagaaatcttccaagaggctaaaggcgaatatgttctgcttttaagcgcagatgatttcctcccgcacaatttggtgatccatgactttatgcagtgtttttttgaagaagaggaattggattatgtttacggcgaccttttgctcgttgatcaacacgggaaaaatgcgggtctgtggacatatcaagagtatggcgatgaggagctggtgaggacgatttttcaaaggggcggctcaggcattgtcccgatggtgggcatgtttaaagcatcttattatcagcaaaaaggcttctcttggctggttgatccgcaaaagccgcttgcaggggatgtgctgaattgtttagccaatacgaagcgcggctggaagcggcgctatttaaaaaaacctgtattatgctaccgccgccaccaaaaaaacatttcctaccaattgcataaaagaattcaatcgcttgtgtacgtcatggattatattgtgaaagaatttgacgaaagcgtctattttcctcatatcaaatggaaggagcttgaggaaaatcaaagacagtccttgaaatatttcagcatcgggaaaaccttttggagaatggcccggagatacgcacaaaacggatatacccggcatctagaccatgacggcaaaaaagaatgcattcagccgctcctgaacaaaatggatgagtacttccaattaagcctcgcttcagacaatcagtatgaacgatatatgaaaaatattaaaaaaatccagctgatataa

SEQ ID NO: 917 - DNA, 1083 bp, Bacillus licheniformis
ttggttacaatcagtctatgtatgattgtcaaaaatgaagaagaagtattagcgagatgccttgatacagtgaaagacattgtagatgagattaatattgttgatacggggtcgacagataaaactgtagagattgcgaagcgatacacagaccgcgtctttttctttgaatggatcggcgattttgcggctgcccgcaatgaatcgttcaaacacgccactaaggattatattctctatctggatgcggatgatgttttgcttgaagaagatcagaaaaaactgaaagagttgaaggaaacgcttgatccttccgttgattccgtgtctatgtactatgatgctggaaccgacgaattcggaaatgtgacattaaggtaccgccgcaaccgtctggtgaaaagggagaagaactttaaatggaaaggcgactgccatcaatatttggaggtattcgggaacatcatcaatgccgatatttcagtgacgcataaaaaaatccgccactctgtcggacgaaacctcaatatttaccaaaagaagattgatcgcggcgacacgtttaccccgcgcgactatttttactacggtaatgaattaagagaaaacagacactacgaaaaagcgattgaaagctacaataaaaacattgaaatgaaagaaggatggattgaagacaaagtatacgcctgcatcaacaaagccgactgccaccgctttctcggcgacatggacaatgagctgagatctctgttccagtcatttgaattttctaaaacgcctcgtgccgaaacatgctcaagaatcggctataactttcagcggaggcgggaatacaaggccgctatctactggtatgagctggccacaacattggtgcctgattcaaataaatggagcttcacctatccggcatactatacttggtaccctcatttgcaaatgtgtgtgtgctattacaatttaggagactttgaaaagtcgtatcatcataatgaagaggcgaggaaataccgtcccgaagacaaatccgtccttcataacaaacagctgctggaagggaaattaggcattaacaattag

SEQ ID NO: 918 - DNA, 1110 bp, Bacillus licheniformis
atgatcccgttagtcaatttaaaacgtcaatttcaaacagtaaaacaggatattttaaaagagtttgaacatgtgctggacagcggccaatatatattggggccaaaggttgaagaattagagaaaagaatagctgaaaagcttggtgtaaaagaagcggtcgcggtcgccaacggaacggatgcattggtgctgacgcttgaagctttcggcatcggcaaaggggatgaagtgattacgaccccgttcacttttttcgccaccgccgaagccgtctcaagggtgggggctgaacctgtgtttgctgatgtcgatcctgaaacatacaatcttgatccgaaaaaaatagaagaaaagatcacccctgctactaaagcgatcattcccgtccatatcttcggacagccggctgatatggacgagatcatggagcttgccaaaaaacacggactgcttgtgattgaggatgcctgccaagcgttcggcgcatcgtataaagagcggcctgtcggcagcatcggggatgccgcctgtttttcatttttccctacaaaaaacttgggaacattgggagacgggggaatggtgacgatttcagacccggatgcagcccggcaattaagaacactcagaacccatggcactagcaaaaaatacttccatgacaaaatcggtttcaacagccgtcttgatgaattacacgccgcagctttactcattcttcttgagaaaatcgacggctggaatgaacaaagaagaagagtgtccagccgctacagagaaggtttgaaaacggcggagcacctcacactgccggcagagaaagaggaccgcacacatatctatcatctctattgtatcggcgcgaaaaaccgcgactacatcatacaatcgctgaaagagcaggacattcattcaggtgtgtattatccttgctgccttcatctgcaatcggtctattcttcactgcagtacaaaaaaggcgattttcctatagccgagtccttgtccgaaacccttttcgccattccgatggatccttttctagccgccgaggaacaagatcagattatttctgcgctgctgaaaaaaggaggaggggaaaagtga

SEQ ID NO: 919 - DNA, 1065 bp, Bacillus licheniformis
gtgacggttcattttggtttaatcggctgcggctatatgtcaagaaaacatcttcaagcactggccgagtgcgatgatgcaaagttgtcggccgtcagtgatttgcaggaagaaagaatgaaggaagcggaagaatactatgcttccctcgccggtgaggaaagccgaatgacccgctatccgcagtatcaagcgctgctttcagatcctaaaattgaagcggtcattattgcggcggtttcgggactgcacgccgaaatggccaaacatgcgctgctggcaggcaagcacgtcatcgtcgaaaaaccgatgaccttgtcattacgggatgccgatgagcttatagaactggcggagcagaacgggctgaagctcatggtctgccaccagatgcgccaccggccgatcatgaaaaaactgaaggaaacgattgaggaaggaaagctgggaaagatctacttgggcacggtatcgctccgcttaaacaggtcccccgcttattatgaagcggcatcctggcggggaagctgggaaaaagacggcgggatgctggtcaatcaagggatacatctgatcgatctgctgcaatggtttttaggtgatgtaaaaggcgtttacggagatatgctgggcggctccggagctaaagaaacggaagatgttgctgtcggtattctgacgtttgccagtcaggcgaaaggtgtagtagaagcgaatatcgtcacacagccaaacaatatcggaagctctctctcgatttttggagaaaatggaacgatttcattggaaggtccggcattaaaccggatcagccgctggtacatccacggggagaaggcggatgctgaagaagcggcaaagctgattgacatcagcggcgaacaaaccgcaatgtatcaaaactttataagcgccctcaagcgccaagacacgctattggttgacggctatgaaggaaaaaaggcgattgaaaccatctttggaatctatcaatctgtgctgcagaagcaaccggtgcagctgcctctttcttcatttcaaacaactgatatgaaaaataaatag

SEQ ID NO: 920 - DNA, 1296 bp, Bacillus licheniformis
atgagcaaacaggaaattcataacgaaacgatagcggtcatcggcttggggtttgtcggtctgcccttggccatgttgttgatatcaaaaggaatgcgggttatcggtgttgatttggacaaaaagaaagtcgaggcattgcggaaaggaaccagctatatttcggatataaacgatcaagcggtgcaggacggaataggcaccggtttctttcgtcctgtttcggactacagtttaatcggtgaagcggatgccgtcatcatctgcgtgccgacgcctttgaatgatgatgcgggtcctgatttgaattatgtgaaaagagcggcgcaattgattggagcgcacttgaaaaaagggcagctcgtcgtgttggaaagctcgacatatccgggtacgacaagagacatcgtcaaaccgatcctggaaaaaagcggccttgtatgcgggaaggatttttacttggcttattctccagaacgcgttgatccgggcaatcagttcccgattgaggtcgtgccgaaggtagtgggaggagcgacggatgcatgccttgaaaaggtgcatcaattatacagcggcatttatgaagaggttgtgcctgttacatcgccagaaacagcggagctgacaaagctgctcgaaaatacgtaccggtttattaatatttcattcattaatgaattcgcgatgatatgcgacaggctcggggtgaatgtgtgggaagtcatcgaggcggcaagcacgaagccgtatgggtttgcggctttttatccaggccccggcatcggcggccattgcatccccgtcgacccgctgtatttgcagtttgtcatgaaacaaagcggattatcgagcgactttatcgagctgtcggaagcgacaaatgatagaatcgtccgctatatcgcagagcgctccttgcagctggcagggaaagacaaggcgacagacgcccgcatcttaatctacggcgtcacctataaacgaaatatcgcggatgtccgcgaatcaaaatcgcttgatactatagagaagctgatcggcatgggagcagatgtttcctaccatgatccgcacgttccggacctcgacctcagcggcaaaaagctagcaagcgtgccgatagattcaaagatgctgaaagagtatgactgtgttgtcattttaactgatcatgacgcactcccgaaagagctgttattaaaccatgcaaacgtgatatttgatacgagaggagtgctgagggaagcagccggaaaagcaaaagtcatccagctcggaaacgggcgctcctga

SEQ ID NO: 921 - DNA, 912 bp, Bacillus licheniformis
gtgtggatcggaattctgttgatggtctctgggattgggatcagtattttcgccgttagtctgattgtcagctatttgtttgttttgccgaaccggagcacatatgaagaaacttttttcagcggactcaaacacggcgagatcatcgatgacgtgtttgagtcccacgacaaagaagagctgtttttgacagcaggggatggatgccggctgcatgcgctgctatttcccgttcaaaagagcaggaaagccgtcatcatctcccacggcatcaagtggtcgctgtttggcgggtataaatacgtcgagctgtttcagtccatcggctacaatgtcctgctttgcgacagcaggtgccacgggttgagcggcggttcacacgtttcctacgggttttacgaaaaggatgatttggcgaggtgggctgacgagcttgagaacaggttcggcaaagatctttggatcggggtgcttggcgaatcgctcggagcggcggctgccatcgagctgatgaaacaggatcggagaatcaagttttgtattgccgattcctgcttcagcgatttaacagagctatgccgctttcagctgaaagccgccgtcaaattgtccgtgccgtttctcatcccgttggcaagcgggctgatcaagcggcgccatggctggagccttgctgatatatcgccggtcagcaaccttgagcagtcagacacgccgctgttgatcatccacggcacaaaggatcagcttgttccgccggaaatggccaaaagcctgtatgagaggaaaaagggattcaagaaactgtactggattgaaggcgccggacatgtcggcggatttcgccacaatcctgaggaatacttaaataaaatcaaagactttatcttgaaaatcgagccggccaattag

SEQ ID NO: 922 - DNA, 393 bp, Bacillus licheniformis
atgaaaaaacatccggcagcatgcgaagcaccggacggttattcatgtccggtggaagcaacgatcgaaatcatcggcggcaaatggaaaagcgtcattctgtatcacttgatcgatgataaaaaacgctttaatgaactgcggcgcttaattcccggcgtgactcagcggatgctgaccctccagcttcgagagcttgagcgcgacggcatcgtctgccgtacaatttacaaacaggttcctccgaaagtcgagtacagtttaaccgagttcggcaagacgctgatcccgatcatccggcaaatgatgaattggggaacgtcctacgccggcaaaatcaaggaagcgcgccaaagatcggcagccgctgaaaaactggaatcgcaaggctaa

SEQ ID NO: 923 - DNA, 684 bp, Bacillus licheniformis
atgacagagcaatccaagaagcaagagattcttgacgcattccaatttagacatgcgacaaaagaatttgatccggacagaaagatatcagatgaggattttcagttcattttagaagcgggcagactgtcgccaagctcggtcggcctagaaccgtggcaatttgtcgtcgtccaaaataaagagctgcgtgaaaaactgcgtcaagtctcatggggtgcacaggggcagcttccgacagccagccatttcgttttgctgctcggacgcacggctaaggaaatgcgacgtgattccggctatgttgcagatcaattaaagcatgtgaaaaaaatgccggaggacatcattgaaaatatgctgaaagaagacggcgttctggaaagtttccaagacggcgattttcatttgtacgaaagcgacagggcgatgtttgactgggtatcaaagcaaacgtacatcgcgctcgccaacatgatgacggctgccgctttgatcggcattgactcctgcccgattgaaggctttaactacgacaaagtccacgacatccttgaaaaagaaggggtgttggaggatggccgctttgacatctcggtcatggccgctttcggataccgtgtgaaagagccgcgtccgaagacgagacgggcgcttgatcaaatcgtgaaatgggtcgaataa

SEQ ID NO: 924 - DNA, 4335 bp, Bacillus licheniformis
gtgggaatacagaaaagacggttttcaaggaaaaacattctccgtattctgctaacctcagtgatgatactcagtttactcatgccaaacacccagacatatgcagaagaacaaaacgaacacccgctgatcagcctcagcatcttgggtacgacagatatccacgcccatatgatggattatgactactatgccgacaaagaaacggctgaattcggactggcacgaacggctcagctgatcgaaaagtaccggagccggaatcctaacacgattcttgtcgacaacggcgacttaattcaaggaaaccctctaggggaatacatcttcaaacatgaacgtgaatcgattatctccggaacgaaaacacacccgatcattgatgtcatgaacaaactgcaatatgacgccggcacgctcggaaaccacgaattcaactacggccttgaattccttgacggcacgataaaaggggccgaatttcccatcgtcaatgccaatattaaaacaccggacggaaagaacaaatatacgccatatcatattgaagaccggacgctgacggatgaaagcggccgaaagcaccagcttaaagtcggctatatcggcttcgttccgcctcagattttaacatgggataaaaagcacctggacggcaaaatcacagtgcaggacatcaccgaatcagcaaaagaaacgattccaaaaatgaaacaggaaggcgccgacgtgatcatcgcgatcgcccactccggaattgaaaatggcgaacaggcggcgggagccgaaaacgccgtatacgacctggctctcaagacggaaggaatagatgcgatcatctccggacatcagcacggtctgttccccggcaccgactatcccggtaacggcgtgatcgacaaccaaaaaggaacgatcaacggcattcctgtcgtcatgccgaagaactggggcagccatttaggaattatcgatatgcagcttgaactggacggcggcaaatggaaagtgaaagatgccagcgcaaaaacggaagcgattgccggaaatgtgacgtcgcgaaacgaaaccgtcgtttccgcgattaaagatacgcacgaaaaaacgctcgaatacgtccgcgcgccggttggccaaacagaagctgatattaacagctttttcgcgcaggtaaaagacgatccttcaatccagattgtcacagatgcacaaaaatggtatgcggaagatgtcatgaagggaacggaatacgaaaacctgccgattttatcagcgggcgcgccgttcaaagcaggaggacgcaacggtgctgattattatacaaacattaaagcaggaaaccttgcgatcaaaaacatcggcgatttgtatttgtacgacaatacgctctatatcgtcaaactgacgggaagcgaagtgaaggactggatcgaaatgtcggccgggcagttcaatcagatcgatccttcaaaatcgggtgaacaggcgctcctcaaccccgatttcaggtcgtataatttcgatgtcattgacggtgtgacctaccagatcgatgtcacacagcctgcaaaatacaatgcctcaggcggggtgaaaaatccgcaggcgaaccgcgtcaaacagttgtcttacaacggaaaacccgtccgcgacgaccaggaattccttgtcgtcacaaataattaccgcgcctccgggggcggcggattcccgcatctgactcaggacaaagtcgtttatgcggcggctgatgaaaacaggcaggtgctcatgaactacattatggagaagaaaacggtcaatcccgccgccgacaacaactggtcgatcgctccgattaaaggagccgacgtgacattcgagtcttccctccttgccaaaccgtttgctgaaaaagcgaatgacatcgattttgtcagggaatccgaaaacaaaggatatggcgtctataagctgaactttgacggttcagagcctccagttgatgatgaaaactggacattaaccgtcatgcacacgaacgacacgcatgcccaccttgatggagcggcaaggcgcgctgccaaagtgaaagaaatccgcagtgaaacagaaaacaatctgctgctcgatgccggcgacgtcttttccggcgatctgtattttacaaaatggaacggactcgccgatttgaaactgatgaacatgatgggctatgacgccatgaccttcggcaaccatgaatttgataaagggcctaaagtgctcgcagactttctcagcggaaactatacagccgtcgacccgttaaacagacaccagctggaaaagcccgattttccgatcgtcagctccaatgtggatgtatcaaaagagccgaagctgcgaagctttcagaaagagcctgcagtcttagcagcgggaaaaaagaaagaaagcggcatctatccttatattctgcttgatgtaaacggcgaacaagtcggcgtattcggcttgacgacggaagatacgtcatatacatcaagccccggtccgaacattgcgtttcatgacgcttatcagtcagcagagaaaacggtgaaggaactgaaagaaaaagaaaaggtcaacaaaatcatcgccctcacccacctcggctacaaccgggatctggagtttgccaagaaagtgaagggcatcgatttgattatcggcgggcatacgcatacacttgtcgatcacttgaaagtggtggagaacgaagaaccgacaatcgtcgctcaagtgaaagactacggacagtttttgggaagggtcgatgtggtgtttgatgagaacggcgtcgttcaaacggaccaatcaaggttcaatttgatcgcgatcgacgacaaagtggacgaagaccctcctgggaaagaagtgcttgacggctttaaagaagatattgacgaactgaaaaagaaaaaagtaggctatgccgatgtcccgctggacggaaaacgcgagcatgtccgctcaaaagaaaccaacctcggcaattttatcgcggacggcatgctgaagaaagcaaaacaagccggcggagctgacatcgccatcacaaacggcggcggaatcagaagcggtattgccaaaggcgaaatcacactcggcgatgtgctgacggtcatgccgttcggcaacaccctttatgccgctgatttgacgggggcgcaaatcaaagaagcgcttgagcacggggtgagccaagtcgaagaaggcggaggcgcgtttccgcatgtttcgggtctatccttcacctttacactgagcaagccaaaaggtgagcgaatccttgatgtgaacctagtcaatgacaaaggggacgctgttccgctcgatttggacaaaacctaccgtgtcgctacaaataacttcatgggcggcggcggagacggctattccgtttttaaagaagcgaaaaacggtgtcgatctcggctttaccgattacgacatttttacagagcagcttgccttatacgattctgtttcaccgaacatcgagaacagaatcacagaagtgttccttcccgaccgtcaggcagacggctcttggacgcttgcggaaaagccgttcgaaacatacgcgaaaaacgcaaatcaggcgattgcctatttccctgacacagaaaaggaacacatcatgctgaatatgacaaaagcacagactgaccttgtcaaagaaagaaccggtgatccaagcatcaccctgaaaaacgatcgcattgcgatgcagcttccagccgttaatctggcaagcgaaaagacaaaaatcagcattaaaatcgccaaggatatcaaacaggcggtcacaaaggtatatgatttcaacattcagcagaatggtaaaacggtcagcacatttaaagagcctgtcggactgttgttccaagtcgatgctcctgataaacatttgagcgtctattatgtcgaccgcaaaaacaacagcttcacaaaagtaacaaacggctatacgaaaggccgtaccgttgcaggctatgtcgaccatttcagcgagtataccgtgatgaatgacaatgatgccgggtcgccttcccttccgacgggttccggcgatgatgacactccggatggcggcagcggcggtgaaccccctgcttcgcccggcgccggcagcggcggagacggatcaggcggtcatgacagcggcggagcagatgacggaaatgaaccttccgatggttcaaacggcggttttttgcctgacaccgcttcaaacgcctatcattggctgatgctcggcctgctgttgcttatatccggaagcggcctgtacctttaccaaaggaagcggcgcaagctccagatctaa

SEQ ID NO: 925 - DNA, 516 bp, Bacillus licheniformis
atgagcaaaaaaattgcagttgttctgacagattactttgaggattcggagtataccgagcctgcgaaagcgttcaaagacgccggacaccagcttacggttattgaaaaagaaaaaggcaaaacgctgaaaggcaaacaaggcgaggcgcaagtggaaacagatgcgtccattgacgaagtcagcccggctgattttgacgcattgttgattccgggcggattttcgccggatattcttagagccgaccagcgtttcgtatcgtttgcaaaatcctttatggatgacaaaaaaccggtgtttgcgatctgccacggcccgcagcttttaatcaccgccaaggctctggacggtcgcggtgcgacaggctacacatcgattcaagtcgatttggaaaacgccggggtcaaatttaaggacgaggaagttgtcgtctgccagaaccagcttgtcacaagccggacgcctgacgacatccctgcgtttacacgagaatctttgaagctgctcggctga

SEQ ID NO: 926 - DNA, 216 bp, Bacillus licheniformis
ttgtcagagcaaaaaacagccgagctgaacaaaatgatcgaagagatctcacagaaattaaacatgctgaacatcggcgtcattaaagctgaagacttcagcaatgaaaagcttgaagaccttgaatacctgcaccaaatggtgatgaaaaagaaatctttcagtccgagcgaaatgcaggcaatcgcagaggaactggccgcactccgaaaataa

SEQ ID NO: 927 - DNA, 1359 bp, Bacillus licheniformis
atggaatttatttcacatattgtagatacaatgaacggttttttatgggggcctccgcttttgattctcattgttggaacagggatttatttgactttcaggctggcttttttgcaggtcagacttttgccttactctttaaagctcgccttttcaaggcatcaggataaatcctccgaaggcgatatttcccactttcaggcgctgatgaccgcccttgccgctacggtcggcacagggaatatcgtcggcgtcgcctcagctgttattgccggcgggccgggcgccgtattttggatgtggctcgccgccttcttcggaatggcgacgaaatatgctgaagcggtgcttgctgtcagattccgcgtgaaagataaaaacggcgaaatgtcaggcggtccgatgtattatttggaacacggcctcaagcaaaagtggcttggcgtgttatttgccatattcggggcgcttgccgcttttggaataggcaatatggttcagtcaaattctgtatccggagtcatgagctccactttttccgttcctgcctgggtaaccgggattattgtcacgacttttaccgcccttgtcattctcgggggaattaaaagcatcggcagagtcacctcgctgttcgtgccggtcatggctttattttatgtcatcgccggattgatcattcttgtcacaaactttgaacttgtccccggcgctgtcggtttaattttctctgacgcgtttaccgggcaagccgtggcaggaggcgcgatcggaaccgtgatccgctggggcgtagcgcggggcgtattttcaaatgaagcaggtctcggctcggcgccgatcgccgcagccgcggcaaaaaccgatatgccggcccgccaggcgcttgtctctatgacccaggttttcatcgacacattgattgtctgttcgattacggggatatcaattgtcatgggaaatatgtatctgacagaaaaaaccgatgccctgacatcgatgacattcgcacactttcttggtcctgcgggatcgacaatcgtcgcgatcggactgctgctgttcgcctactcgacgattttgggctggtcgtactacggagaaaaatgcttcacctacctgctgaatgaaaaatatgcgatcgtctatcgtatcatctttgtgatcgccgtctttttcggagcggtctttaaaaatgacttcgtctgggcgcttgccgatatgctgaacggcctgatggcaattccgaacctgatcggcctgctcggtttgacaggcattgtcgtctatgaatccaaacagatcctcgccaaaatcaaagccgaaaaagaagaaaagcaaaacagcgtatctgtttaa

SEQ ID NO: 928 - DNA, 474 bp, Bacillus licheniformis
gtgatgatcaaagtgttatttgtctgcctcggcaatatttgccgatctccgatggcagaagctgtatttaacgatatgctcaaaaaaagcggactggaggaccggatcgaagccgattcggctggcacaggaagctggcatgtcggcaaaccgcctcatgaaggcacaaggtcgctgctgtctgaaaaaaagataagctgcgaaggcctgtatgcaaggcagattactgacaaggacccggaagcgttcgattatatcatcgcaatggatgccgaaaatgcaggccatgtgagaagccttgccggctacgggagcaaagccgtcatccggaggctgctcgactatgtcgaagactgcgagacggcagatgttcctgatccatactacaccgggaactttgaagaggtgtacgaactcgtcgcgaaagggtgccgcgaattgctgaaggacattcgaaaagaacacaatctataa

SEQ ID NO: 929 - DNA, 351 bp, Bacillus licheniformis
atgaaaaacgaccgcgttttcatcagaaatatcctcctcggcgcttcggtcggggcggttatgtcactgctgcacaaaccgactagggaagcgtgcggtgcaaagcttaccgcgtgcaaaaacaaagtccgcctttaccgtgcaaatcccggcatgctcaccgaatgcgtgaaagaaaaaatggacgaagccaaaaagctgacggcttccatatcggatgatttgagcttcttaaatcaacagataaaagagctgaaggaaacgacgccaaaagtgatcggcctgatcgaggaaacgagggatcacttcacagccaaatccaaaggacgtacggagccggaaaaagaatga

SEQ ID NO: 930 - DNA, 816 bp, Bacillus licheniformis
atgagttttttgaaagagctgggctggcgttttttccttcatgaaggaccgagcaaatcggcggaacttgcctacttttttctattgtctctgtttccgtttatgattttcctattgacattgatcggctacctgcctgtcaaaacgggcgatgtcatcgggctgatcgaacagtatgccccagaagacacgatgtccgtcattgaagagaccctgaataccggaaacaggggcctgctttctttcgggatcattgcggcgctctggtctgcatcaaacggattgaacgcgattgtcagggcctttaaccatgcttatgaagtagaggaaaaccgctcttttatcatggttcggctgacatcgctccttttgaccgccgcgatggttttcacaatattggtcgcgcttcttctgcctgtattcgggagggccatcggccattttatcgccaatctggacggtacgccggagatgtttctgacggcatggtcagcgcttcgctggggaatcagcccgcttgtgctgctgatcgtctttacggctttgtacttttttgctccgaataaacggctgtcatttaaattcgtgcttccgggagctgttgcagcgaccgccggctggatcctcgtcagcgtcctgttctcatactatgtcagcgaatttgcaaactacagtgcgacatacggaagcctcggcggcatcatcgtcctgatgatctggttttatttaagcggaatgatgattattcttggaggggaaatcaatgcccttttacataagcgtaaaatcattcctgaagaaaatccgcggaattga

SEQ ID NO: 931 - DNA, 1179 bp, Bacillus licheniformis
atgactagatttcactttttcattctcgttttgattgtcagtatatcaggtttttcgcaagggatgctccttccggtcatctctgttattttcgaacaggaaggccattcggctgcactgaacgggcttcatgcgacaggcctctacatcggcgtcctgatcgcttcgcctttcatggaagcgccgcttcgcaggctcggttttaaaccgctgattgtcatcggcggggtgatggtgtgcgcgagtttgttcgcctttgtttttattcagtcgtttatcgtttggttctttttgcggctcttgatcggaatcggggatcatatgctgcacttttcaacgcaaacttgggtgaccacattatcgtctgaaaaaaaacgcggccgcaatatctctttgtacggcctttcgtttggtttgggatttgcagccgggccttttttaacgccgcttgtcaacatcgccccatcattgccgtttatcgtctcaggtgcgttcagcctgctggcatggctgtttattttttgcctgcaaaacgatttccctgagaaaagcggctctgaaagccgcagcgataacagcttgaagcgtttcgctcaagccttcctgcttgggtgggtcgcgtttttgccgacattcggctacggctttttggaaaccgccctgaacggcaattttcccgtctatgcgctccggtcgggcatttccatcgaaggcgtatcgatcattcttccggcttttgcgatcggaagcatcgtctttcagtatccgctcggcgtgttgagcgacaagtacggaaggcgaaatgtactccttgtcatattggctgtcggggcaggctgcttctttgctgcgggcttttccgaatccgttcttctgcttgcggcatgttttttcatagccggaatggctgtgggatcaactttttcactcggcatcagttttatggccgacctgcttccaaaacgccttctcccggccgggaacttgatgtgcggaattacattcagcttcggaagcattttcggtccggttgcaggcgggtggtatatgcagatattccataacagcaacctgttttatttgattacatgcgtgatggtgttgatctggatcggggtgctctttggcaaaacgaagaaaaacggcgctctcgaacaatctgaggcggcgccaatgtaa

SEQ ID NO: 932 - DNA, 381 bp, Bacillus licheniformis
atggaaatcgtgtggaatcagaacggctttgaggctgatctggaatatgggaagcttaaaatatcaagcaatgaagaagcgggattcaggccttatcaattgctggccgcttcgattgcggcatgcagcggaaccgttcttcataaaattttggaaaagaaaaggatacagctgaaagatatgatcatcgaaacaaaagaagaacgcatttccgaagaggctggccgcatcaaaagcatccatcttcacttcatattgaagggagaaaacctcggtacagaacaaatcaaaaaggcgctgagaatagcgctgaaaaactgcgccatggtgaggtctgttgaaaacagcatagacatcaccgaaacatttgagattcgctga

SEQ ID NO: 933 - DNA, 1056 bp, Bacillus licheniformis
atgagccgttttttcttttggatgatggctgcaggtgttccactttctgtcgcagggagccttctgcattggccgcaggttttattgttcatcatatactgcctgacgatcatcgcgcttgcaagctatatgggaagagccaccgaaagccttgcgatcattgcgggaccgaggatcggaggccttttaaatgcgacgttcggaaacgccgttgagctgatcatttcgattttcgcgttgcgggaaggactgatcggaattgtgctcgcatcgctgacaggatctgtcttgggcaaccttctcctggtcgccgggctttcgtttttcatcgggggcctgaaatataagcgccaggaattcaacgtgtatgatgcgagacacaattcaggtctgctcatgttcgcggtgattgtcgctttcgttatccctgaagtgttttcagctgaaatgacagagccgaggaagctgtcgatgagcgtcggcatcagcatcatcatgattttgctttacctggctgcactttatttcaagcttgtcagccaccgcggggtttaccagacgaatcaaaatgagcaggaagaatcgcatgaagagccggaatggtcgggaaagcgcgcaacattgatcttatttttggcaactgttgccgtcgcctacatttccgagcacctcgtccatacgtttgatacggtggccgaacaattcggctggtcggagcttttcatcggggtcatcattgtcgcgatcgtcggaaacgcggcagagcatgcttccgccgtcattatggcctataaggacaaaatggatgtcgcggttgaaattgcgatcggatcaacgcttcagatcgcgatgtttgtcgcccctgttcttgtcatcagctctttgttttttccaacgagcatgccgctcgtctttaccttgccggagctggtcgccatggcttccgccgtccttttgatgatcatcatttccaacgacggggacacgaactggtttgaaggcgcgacattgctggccgcttatatcatcatgggaatcggttttttccttctttaa

SEQ ID NO: 934 - DNA, 792 bp, Bacillus licheniformis
atgaaaaagcttttgtgttttacgctgactgcgtttttatcctttagttttttcgctgtacaggaagctgacgcagccaagccgatcaagattccaagctctgtcacgaatatttccaaagagaacacataccctaacgcctctcaggatcagccgaggctgcagccgagcgaattagccgaagagctgctgaaaacaaccgatattgcgattgaaaatccgcatctgattaaaatgctgaatgagtcaagcatttccggcacaccgctggcaatcggctatcgggcgacgatttatttgggcagatgggcgctaggttacacctcgaatgaaaccgttgcgaactgggaataccgcaaaatcaacacaaaccgctttgacaaccggggcgggaaagcacctgcagaactcacgtattcccaggaacagacgagcaaaatcaaaggcggcttaacagcgaaagttccaaaggcggaagatgtcaaaaatatgatgatgctcaaagccatggaaaaaacaaagctgccgctcgcctttgaaacagtggtcggctccggtacaaaacgcgatcagatttataaagtgcagccgaaaaaactgggaaatttacacgcctatgcacctgccgtcaatgaaaaaggaaaagtcacctacggcgaagtgtacatcgtattaaaaggcaacaaaagaaagctagtcgtcaaaaatatcacctcgcaaggaatcggcgcttggattcctgtacaggatcacctgacattcggctttcagctcagccatcagccgaaataa

SEQ ID NO: 935 - DNA, 1122 bp, Bacillus licheniformis
atgacagaaaaaatgcaggttcgtccgatcaccccggaatatgatccgtgggaagcctacatggacgttgaccaatttggagatatacagctgacgaacgttgaatttacgacgacgactctttgcaatatgcgctgcgagcactgcgccgtcgggtatacgctccagacgaaggacccggacgcgctgccagtcagccttctgttgaaacggcttgatgagattccccgccttcgttctttaagcattacgggcggcgagccgatgctctcattaaaatctgtaaaggaatatgtcgttcctttattaaaatacgctcatgaacgcggcgtgcggacgcagatcaactcaaacttgacgctcgatatcggccgctacgagctgatcatcccctacctggatgtgcttcatatttcccacaactggggaacggtcgaagactttgcagaaatcggcttcgctatgatggataaaaagccgacgtttgcacagcgggcgcgctatttcgaaaaaatgatcgaaaacagccggacgcttgttgatgaaggggtcatggtctccgccgagacgatgctcaacaaacggacgcttcctcatatcgagcatattcaccggcaaattgtcgaagacatgaaatgccagcgccatgaggtccatccgatgtatccgagcgactttgcaagcgcacttgaatctttaagcttaaaagacatgagaaaagcgatccaccgccttcttgacattcgcgacgaaaatacgtggatgctgttcggcactctgccgttttacgcgtgcagccctgatcctgaagatcacgccctcttacagcggctgcgcgaagcgaaaaacgtcaccgtcagaaacgaccctgacggcagatcgcgcctgaacgtcaatatttttgacggcaatatcatcgtgaccgatttcggagatactccgccgctcggcaacattcagacagacagcctgccaagcgcctacgcgaagtggagaaaaacagagcttgccaaagaactcaactgccactgcccgcacgtccggtgcctcggaccgaatgtgctcgtcaaaaacagctattatcaagatgttgattttacttccagaacagcaagagtatga

SEQ ID NO: 936 - DNA, 186 bp, Bacillus licheniformis
atgggtaacgcagtacatgacaaagaacagcaagtcaattatttgaaaaacagattggatatgtttatgtcagtcatcgattctttagacccggaatcgaccgaccttgaagatattgacagactgatcagcatgatcgacgatttggaagccaaatacgagcgctttaaaaaagactggaaataa

SEQ ID NO: 937 - DNA, 792 bp, Bacillus licheniformis
atgaaacgaatctgtgccatatgctgcggattcctgctgacgctgggcttcagcggcaatgctgaagcgatttccaacaaggcgatccattggggtttttcaaaaagcaaaaaccatcagccggcagatgcgggtcaagagctgaacaaccttttacagcagtacgacgccttttatttgggcaacacaaaggaaaaaacgatctatctgacctttgataacggctatgaaaacggctacacccctcaggtgctcgatgttctgaaaaaacaaaacgtcaaagcggccttttttgtgacgggccattttgtcaaagatcagccggagctgatcaagcgaatggccgaggaggggcatatcatcgggaatcattcatatcaccatccggatctgacgacgaaaacaagccgcgtcattcaagaggaattggaatcggtcgatgaggaggtttacaaaatcacaggcgaaaaaaacaacctctacctgagaccgcctcggggcattttcagcgagcgggtgctcgaagaaacgaaaaagctcggctatcaaacggtattctggtctgttgcttttgtcgattggaaaatcaatgcccaaaaagggtggcgctatgcgtacgacaatatgatgaaacaggctcaccccggcgccatctatctgcttcacaccgtctcgagagacaatgccgaagcgcttgatcaggcgatcaccgacttgaaaaaagaaggttatacatttaaaagcctcgatgacctgatgtttgaaaaatctatgatgcttgagaccctttga

SEQ ID NO: 938 - DNA, 1104 bp, Bacillus licheniformis
atgtcaaaatcagtaaaatcagtcacatcacctaaaaaatttattacaggaaaacgactgctggagaacttgaacgactacattgaagattttggcgacaacgcatatatcatttgcgatgaattcattttggaacgcgctcaaaaagaagcggggaattcgattcagaaagccggcaatcaagccgtttttgaaaaattcaattacgaatgcacacaggaagaaatcgatcgcaaccgggagcttgcacgcaatgcaggcgctaatatcatcgttgggatcggaggcggtaaaacgcttgataccgcaaaagccaccgcttattacgagaagctgccggttgtgattttcccgacaattgcttctacggatgctccatgtacggcccttgccgtcatttataaacacgacggatcgtttgaccgctatctgtttttgccgacgaacccagatgtcgttcttgcggactctgagattttggcatccgcgccgccgcgctttttcgcagccggtatcggtgacgccttggcgacgtattttgaagcgcgcgcctgctttaaagcaaacggcgataacctcgtgctgatgaagccttcaacaactggattgggacttgcccgtctttgctatgatacgctgttggaaaacggtgtaaaagcgatgcaggcggttaagcacggcgtttccacacgagcggtcgaagatacaatcgaggcgaccatctatttaagcggcgtcggtgccgaatcaggcggtcttgccgccgcacacgcgatccacaacggaatgacagccgttccttctctgcacagggctcagcacggcgaaaaagtcacgttcggccttttggcgcagcttgttcttgaaaacgcgccggccgaagaattggagaccgttattgactttatcaaaggcgtcggtcttccgttgacattaaaagacctcggagtcgacgaatttgtcgaagaagaatggcgccaagtcgctcaaagcgcttgcgcggaaggcgacacaatgggcaacatgccgttcccagtcacccctgacgacgtctacaatgcgatcgtcgccgccaacgcgattgcagaatcttatcacgattaa

SEQ ID NO: 939 - DNA, 597 bp, Bacillus licheniformis
atgaaggtacatacagggcttgccggcatcatcatgattgttatcggcctgttgatcagcgccgagaatcatcaaggcgcgtctgtagcagacgcgctttcgggctttttaaaactgcccatccggaatttagtggttctgatctgcatgtttatgatcatcgccggcttcattatggcgtggcgccattattatggagtaccgtggatccgctttaagctgtttttgtttatcatcggtatttcagtattttacccgctggtcacagaacagctgatgttctttcaaaaatggaatgcacaaggcgatagcgccgtggaatatatgaaaaggggaagcgcttgcagctatcagggcgatatggaagcaggaagcatggactgtgaggtgaaagtcaacaactacgggaaaaagaccgaacgcgtccagctcacccctgatataataaatgaatttgactttcagccggaagagctggaactgtcgccgcattcacaggaaacgtacagcgtcacttttacggctccgggaaatgaggatgcatttgcatccggaattgaagaagagccgaggttgaagattaaagtggtgaaatga

SEQ ID NO: 940 - DNA, 960 bp, Bacillus licheniformis
atgattaaacattttgcgatgacaaaggacggacggcttttatccgacaacaaagcagaaaggctgacagatcaagatattgagtggttttggaccgatttcgatcagccttcggaagaagaagtctccttgctcaaaagccattttcactttcaccctttatcggtcgaagactgcgtacatcgcttgcagcgtcccaagctcgatcaatacgaagattatctttttttcgtcatacatgcgttgaatcaaaagactttggcgtctgaagaagttgatttattcgttggaaaggatttcatcgttacatttcattttcatcactcagacggcattgaaaaagtaagaagacagctttcggaaaacagcgagttgtggaaaaacggaccgggccacatcgcctatatggtcatggatacgcttgtggacgaatatttcccgattctttacaaaatagaagaccgcctcaatgaaattgccgaaagcgacagcaggaaaacgtatggaacgctgatgaacgaggtgtttgatatccgtggcgaccttttaaagctgaggaaaacaatcattccgatgcgggatttgctttaccggattttaaacattgaaatttcaaaagaaaaccgcgaacgaaaagcgtattacagcgacatttacgaccatctcttgaagctggccgaaatcgtcgaaaacaaccgtgacatgacagccgatttgagggacagctaccagacgctcaactccaaccggatgaacgccattatgatgacgctgacgatcgtctcaacgatttttattccgctcaccttcattgccggagtgtacggcatgaactttgacaacatgcctgaactgcattggcgctacggctattttttcatcctcggaataatggcagccgttgtcgccggcatgatcttctggttccggcataaaggatggtttgacattttcaagtaa

SEQ ID NO: 941 - DNA, 864 bp, Bacillus licheniformis
atgtggaaggaaactgtaagcgtaacaccgccttatcattttgaccgcgtgttggacaggctttcgcttgatccgctcaatgcggtcaacctcgacaaaagggaggtcaagctgccgctccgcaatcaaaacaaagagcctcgggttgtcgctgtgcaggcgacgggaactgctgaagccccggcgtttgccgtcagcggaatagacgatcgagatgacatgataaaagaagtgaaacggatcttcagatgggaagaaagtcttcagcctgtactggatcacttttcacaatcaagcctatcatcgatttttgaggagcatgccggaacgccgctggtgctcgattttcatttgtatcattgcctgatgaaatgcattatccaccagcagctgaacctgtcttttgcttatacgctcacggagcggttcgttcacacttttggagagcaaaaggacggggtctggttttatccgcttcccgaaacgattgcacagcttgactacaacgacctgcgcgaacttcaattcagcatgcgaaaggctgaatatgtcatcgatacatcaaggatgatcgcagacggccgtttagatcttgatgagcttgatcaattatcagatgaagatattatggaaaagctggtgaaaatcagaggaatcggcccgtggaccgtccaaaacgttctgctgttcggactcggccgtcccaatctgtttccggcagccgatatcggcatccaaaatgccatcaaacgccattttggcttaaacgataaaccgacaaaagaacaaatgcttgaaatgagcaaagaatggcacccttatttaagctatgcttccttgtatttatggaggagcatcgagtag

SEQ ID NO: 942 - DNA, 1392 bp, Bacillus licheniformis
gtgaaacgtgacaaaaaaggatcatcagcagaattaaaagtcggacagcaatttccgctgacgatcaagcgcctcggcatcaatggcgaaggcgtcggctacttcaagaaaaaagtcgtcttcgtccccggcgcgctgccgggagaagaagtcgtcgtcgaggcgacaaaggtacatccgaaattttccgaagggcgggtcaaaaaggtgcgcaaacgttcagagcaccgcgtcaagccgccctgcatcatctatgagcaatgcgggggctgccagctccagcatctggcttatgaagagcagctgaaaggaaaacgggacatcgtcattcaatcgctcgaacggcacacccgttttgacatcggcaaaatggacatcaggccgacgatcggcatggaaaacccgtggcactatcggaataaaagccagtttcagctcgggctttcgaaaaacggaaagatggtggccgggctgtacggccttgactcgcaccgtcttgtcccgattacggaatgcattgttcagcatccggcgacgaacaaaacgacgcaaaccgtcaagcaggttcttgaagacttcggcatttccgtctacaacgaacggaagcgcacgggcgatgtccgcacgatcgtgacgagggtcggcttcgagacgggggaagtgcaggttgtccttgtcacgtcaaaagaagacctgccgcgcaaggagctcattgcagaagaaatcaagaagcgtctgcctgaagtgacatctgtgattcaaaacgtcaacaaagccaaaacatcggttgtcttcggcgatgatacaaggctcttagccggcaatatggtcattcaggaatttctcggagaggtttcatttgagctgagcgcccgcgctttttttcagctcaatccgatccagacagtcaagctgtatgacgaagtgaaaaaagcggcaaaactgaccgggcgcgaaaaagtcgtcgacgcatattgcggcgtcggcacgatcggaatgtggatcgccgacggggcaaaagaaatccgcggcatggacgtcatcaaagaatcgattgatgacgccaaccaaaacgccaaaaagcacggaatcgaaaatgcgcgctatgtaacaggaacggccgagcactggctgccgaaatggacaaaagaaggcttcaggcccgacgtcgtcatcgtcgatccgccaagaacaggctgtgaccgcacgttccttgatacgatcaggcaggttaagccgaagcggttcgtttatgtctcatgcaatccgtcaacacttgcgaaagatttgcagtacttggcgaaggattaccatgtagaatacattcagcctgtcgatatgtttccgcagacggcgcacgtcgaatcggtcgtatcgctgaagctgaaataa

SEQ ID NO: 943 - DNA, 480 bp, Bacillus licheniformis
atgaaaagactttgcatcatcccgtgcggggcgaaaaaaatctgggatgttgatccggacatcggcccgtccgccgcaaaggatgtctatctaagcccatttcaccgggcgtgccgcgcatatgcgcagacattttttacggattgggtgattctttcagcaaaacacggttttttaaaacctgaagatatcgttcctgaaaactatgacgtcacatttgggatgcgccacccagagattatgccggatggcgggctgaaggctcaaggtgaacggaaaaacctgatggattgcgatgaaatcgtcatgctcggcggaaaaaaatacaggcctgtactgaggaacgtgtttggcagcggacagcagatcatatacccgctggcgggataccggggaatcggctatatgctgcaggcgctgaagcgggctgtcgatgaaggccgggaacttggtgaacatgaaaaaaatgagtttttttaa

SEQ ID NO: 944 - DNA, 282 bp, Bacillus licheniformis
ttgctaaaaaaacactttcgttcaggagcgtcgaaagccggggcaaacataatgattcaccaagttaaggcagcttgcttatctccggaagaacacttcctgaaaaccgtgaaagagcggcggcttctcgaggaaatcaaccggcttgatgagaatttacaggagattgtcagcctccgcatctacgaaaatcggcatgctcacaggcaaaaccgaaaactatgccagggtggggtttcacagggcgaaggtcaagcttcagcaagaaatggaggggtatga

SEQ ID NO: 945 - DNA, 564 bp, Bacillus licheniformis
atgaaggataaggaacgcagtatattcgaagatttgcttcctttataccatgaggggctgttaagcaaagagacggcagaatggattgaggaagcggccgaaaacgatgaggagcttcaaaagcttttgaagatgacggaggccgagcttccgaaagaacagattgaatcgtctgttcatgaaagtcaaatgtttaaaagaatcaatcggaagctctccttgtaccagctgatgtttatggcgatttcgttttttctcgcgattcgcacatccctgttaaatgagagcttcggctttattctgtggtacgccgtgcttgggtttgcggggtatctgttttaccgggatatgaaactcgtgatgctcctctcctttgcgccgattttcgtttgggggatgggggatattttggccggatgggacgcagccggcggtacaggggttgtggagcacctgctgtatgccgtctttggcgctttcgtgctcgctgttattcactgttttttcgccgcggttgggatgatgatcggctggctgttcttaaagctgaaggaaagaagttga

SEQ ID NO: 946 - DNA, 723 bp, Bacillus licheniformis
atgaaaaagaaagtcttgtatagcgtgttgattgtgctgctcgtttcctttgtgcttgccgcttacaacgccttcaacggaaatcccgtaagcaagaagctgtctcaaacggcgcttgagcattatttgactgaccgctatcctgaaaaagacttgcggatcgacagcggcatctataatttcaagttcacggaatatgtatttgaagtcactgacaccggtgatccaaagcgcaaagatccctatctgcttactttgagagggtttgttcaacctgaagtatacacggacggaatctatgaagagaacctcaatgaaccgctgatggagcggcttggagaagaagcaggaaaagaaatcaaagcgcttttatcaaaaagcatagaccaactgaaagacgttgacgtgcatgtggaagtattaaaaggaaagctgaaaaatgacgcaaaatgggagaaaagcatccgcttagacaagccgatgcagattcatattttacttgatgccgaaaatgccggccgaaaagaagtatacaatacggcgcaaaagattcagcgcctgttgaatgaagaagggtacgactacgaaagcgtgacgattaatgccaacatttttgatggggaagatattaaagacgaggagatcggctgtcttaaatacagcacctcctttgaaaaaaatacggaaatcaagctgaaggatgttgaagagctaaatgattaa

SEQ ID NO: 947 - DNA, 576 bp, Bacillus licheniformis
ttgcaagagacgaacgaacggatcatatctgctgctttagacttaatgcaaaaatacggattcaagtcggtgacaataaaggatatcgcgcttcattcaggcgtcagcgagatgacggtctaccgccacttcaaaactaagcttggacttttggaagcggccgttcaacaattttcttatataccagcctttcagcgcgtatttgaaaacgatatcacttggaacctggagaaagacttaacattgattgcagaatcgtatttgcttcatatggaaaaaaacaagccgctctaccttatcgctgttcaagacggcggaaggatgactgatcttttcggttctctgttaaagcatatggaggagctcctttgttatttaacagactactttcggacgatgcaggacaaaaacctgatgaaaaagggagatgcagattcacaggccttcgcttttctgtcatctttatacggatacttctcgtctggcgcattggctggcggccgttttcaaaaagtcgctaaagacacttatattaaacagataaccgccgccttctgcggcggcttgcatgtatga

SEQ ID NO: 948 - DNA, 1197 bp, Bacillus licheniformis
atgaaaaatattttaatcgtcaattttccggcggaaggtcatgtcaatcctacattagggatcaccaaagcatttgctgacagaggcgacaatgtgcactatctttcaacagaaaagtataaagacaggctggagggcgtcggagctaccgttcatttatacaaagatctggtgagaaacgcgcatattgatccgaattcaccgtccggccttcttgaatttttaaaaattcatctcaaaacctcgctgtatattctagacattgtaaaagagctgtccaaaagcatttcgttcgatgtcgtgtattatgacacattcggtgcgggtgaattggtcagggattatttgaacattccgggaatcgcttcgtcggcttcatttctcttcggacaagaacatatgaagattctgccgttgcatccggattcaggcgcggagctgcacttggacaaagaatgtgaggacctgcttacggaactgaaagaaaagtacggcgtctcgcctaggcatacaggacagtttatgagcaatcaggcggagctgaccgttgtgtatacaagccggtattttcagcctgacagcggccgttttggggatgatgtgctgtttatcggcccgcgttttccaaagcgcctggacaagaccgattttccggtagaatcgttgaagaatgagaaagtcatttatatttcaatgggaaccgtacttggcaaaactgcggattttttcaatatgtgcattgatgctttccgtgatttcgacggcaaggttgtcatcgccgctggcgaaaaatcggactacgcggaaattaaagaagtgccggagcattttatcatcgccccgtatgtgccgcaattagaggtgcttaaagaggccgatgtgttcatcacgcacggcggcatgaacagcgtcaatgaaggcatccattaccgtgtcccgatggtcgtgcttccgcatgataaagatcagccgatgatcgcccagcgcttgaaagagctgaatgcgggatatcctctgtttgcagaagaagtgaatgctgaaagattgagagatgcagcagaacaagtgctcactgacggaaaatatcaggaaggtattcaaaaaattgatgaaagcttcagcaactgcatggacattaaagatgcattggcgcgtattgatgaatatacggcgcggaaaaagtcgctgcagccataa

SEQ ID NO: 949 - DNA, 321 bp, Bacillus licheniformis
atgcgcaaactgtgcgtttgcctgcttctcgtcattccgctgtcatgtacggctgtcatgccctctgcctacggggaaacacgcgtttatcaagagttgacggacaagcagaaaaatgaactggcttctttgcaaaaggacattatggaaaagaaaaaacagctgatcaataagtatgtggagtacggaatacttgatcaggaaaggggaaaggaaatcaagtctcatattgaaaagcgctatgaaaaagagcgggaagacggatttttgccaaagtggaagcaccataaagaaaagtttcgcccgcatcacattcattaa

SEQ ID NO: 950 - DNA, 1203 bp, Bacillus licheniformis
atgaagaaccgtcctgtttcagagcgcagactgcttggcatcgcaggcctcggctggctttttgatgccatggacgttggtatattatcgtttattatcgccgctttgcacgcggaatggaagttgacgccgcaggaaatgagctggatcggcagcgtcaactcaatcggcatggctgtcggggcatttgtctttggccttttggctgaccgcgtcggaagaaaatatgtttttattattacgctgctgtttttctcgatcggcagcgggttgtccgctttaacgacgacattgtgggcatttttagtgctgcgctttttcgtcggaatggggctcgggggagagcttccagtcgcatctacgctcgtatctgaaaccgttgcgcctgatcggaggggaagagtcgtcgtcctgctcgaaagtttctgggcattcggctggctggctgcagcgctcatttcgtattttattattccggcctacggctggcagattgctttattgataactgcgataccggctttttacgccttatatttgcggattgccctgccggattctccgaaatatgagaagcttgcgcaggaaaggaagccgaccatcatggaaaatgtgaaaagcgtctggtcccgcaaatatgcccggcctacggccatgctgtggatcgtctggttttgcgtcgtcttttcctactatggcatgtttctttggctgccgagcgtcatggtgatgaaaggattcagcatgatcaagagctttgagtacgtcctgattatgacgctggctcagctgcccggctatttctccgcggcatggctgattgaaaaagccggtcggaaaatggtgcttaccgtctacttgctggggacggctgtcagcgcctacttcttcggatcggctgaatcgctggcgcttttgcttgtgtcaggcatgtttttatcatttttcaaccttggtgcgtggggtgcgctttacgcttataccccggaacaatacccgacgtcaatcagggggaccggcgcaggaatggcagccggctttggccgaatcggcggcatcctgggcccgcttcttgtcggctatctcgtcgcccggggaacagagatttcaatgatctttttcatcttctgcatcgccgttgttgcggccgtcgcagccatcatctttttggggaccgagacgaagcagaaagagcttgcctaa

SEQ ID NO: 951 - DNA, 1377 bp, Bacillus licheniformis
gtgcagcataaagagattgcaagagaactcttgcccctcattggaggcgcggagaatatcatcagcatcagccattgtacgacaaggctgcgcttcaatgtcagggatgaagaaaaaatcgatatagctgctattgaaaagatggagtctgtgcaggggacttttttcagatacggtttgttccagatcattttcggtacaggtgtggtcaataaaatttataaggaaatgatccaatacagcgatccggctccttttgaagaagcccgtcgggaggcgcggccgaacatgaacgtattgacgcgatttgccaaaacgctgtcagacatctttgtgccgatcattcctgcaatcgttgcgagcggattgctcatgggtctcattagtgtgcttaaagaattcagcctcggcgcttatggcggcccgctgatgaaaatgctcgacattttttcaagctcagcgtttgtcattttgcctgtgctgatcgggttcagtgcggctaaacagtttggagccaatccatttttaggcgccgtcatcggcggtattttgacccatcctgatttgctcgatccttcaatgctcggcagccaaaagccggaatccatcgaagtattcggccttgaagtccctttgatcggataccaggggacagtcattccgattctcttatccgtctacatgatgagcaaaatcgaaaaattcttgaaaagaatcgtccccagttctttagatttgatcgttgccccgtttattacagtcatggcttccgggtttgccgcgctgtttatcatgggcccgctctcactgatgatcgcccatttcataagcgactgtctcgggtttgtttatcattttgcgggggcgtgcgccggatttttatttggcgggctttacgccttactcgttttgagcggccttcaccacagtttttatgtgattgaagcgtcgctgctcgcagatcccgaatacggggtcaattttctgcttccaatatggtcgatggccaatgtcgcgcagggaggagcgggactcgccgtatttttgaaaacaaagaatgccggcatcagaaagattgcgattccggcttctctcacggcctttttgggaatcgtcgaaccggtcatgtttggcgtcaacctgaaactcgtcaggccgtttatcggcgcatcgatcggaggcgcactcggaggtgcatacgccgtcttcacacacgtggcggcaaattcttacggattgtccggcatcccgatgatttcaattattctccctcttggcaccgccaatctcattcattatttaatcgcttttgcgattgcggtgatttcagcattcattgcgactttgtgtcttggctttaaagatgaaaaagaataa

SEQ ID NO: 952 - DNA, 843 bp, Bacillus licheniformis
atgaaagtaaaaaaaatcttaaacaacaatgcgctcgtcgtaaaggatcgcggcgaggaaaagatcgtattagggtccggaatcgcatttcaaaaaaagaagaatgatattgtcgacagatctaaaattgaaaaaatattcgtgatgaaagattcatcagaataccgccaattcgaggagatcttaaaaacattgccggaagatcatattcaggtggcggaggatattatttcttatgcggaaaaagagctcgggatcaaaatcaatgagcgaatccatgtcgccttttcagatcatttatccttcgcgatagaacggttaagcaagggaatggtcattaaaaatccgctgcttcaagaagtcaaagtcctctacacgaaagaatttcaaatcggccgctgggcaaaggctctcattaaagaaaagctgaagatcgatatccccgaggatgaagtcgccaatattgcgctgcatatccacacagccaaaacaaacgcgggagatatgacaaaaacgctcgatctcacaacgatgatcaaggatattatcgagatcatcgaaaacaaactcaacattaaaataaaggatgagacgatttcgtatgagcggcttgtcaaccatctccgtttcgccattcagcatatcgagtcgggagagacattttacgaaatggatggtgagatgatcagcctcattaaaaagaagtttggacaagcgtttatgtgcgcagaagaaatcggggcatttgtgaagcgggagtatggctttgaatttccggaaaaagagctgtgctacattaccatgcatattcagagattttatcagcggtctgctgtcgtgtaa

SEQ ID NO: 953 - DNA, 507 bp, Bacillus licheniformis
atggaagaaaacaaaaaaatactcatgattatcggaatggagaaacagcttgaacagaccatctgccgggcagcaaatattcagccggaggacgccctcgttttaaaaagcgtcttccctgatatttcacagccctacggtgatttcatgagggatatcatcacccttgtccaccggaacaaagcggaagaaatctggattgtccgcgacaaatacgaaccatcggcagatgaagatatttctgaccttttaaatagagacaaagatttaaaagatagaatgcaaactttagagtaccttttccaaaactgcagtccggaatttacgcaaggcagcattgatgaatggctgtcaccgagcgaaaacgtggccgaaggtgtacaaaaaagcgtcgccgccatccgcaggcacccgttaatccctttgcacgtcaaagtgaaaggatttctaatcgataaatcggttttaacggaagttgaagctttaaacaaaaacggagcccgttaa

SEQ ID NO: 954 - DNA, 2622 bp, Bacillus licheniformis
atgaaagcagcacccacattgtctaaacaattgatattccaatatgaacatcagactgcggactttaatatggatgagttggttcaatcagcagcacgggtcatcgcgccgctttggccgattgaaacctttgccgctcgtcatccgtggatgggccttgaagaacaaacatttgaacagacggcccggcagcttaaacagcagcttcatgttgatatctacccaaagtcctccattttccgttccgcaaaacaacggggagaaatcgttgagacgattcttgaaaaaaagctgatcaattggctcgattcacatcagcccggcatgcagagggaaacagcggaggcattttgcaaagccgccctcaagctggacgaaatacctggacagctcttgagatcccggcaagtgaaaaagcttgccaaacaagcggcccgcgggacaatcgatggccgaaaaacaagctttatcaaaccgctcagcgtttttgccggacagaaaagtgctcacctccttgaccatcatgtgattaaatggtgcaagctgttccttgatgaatcacaatcggcatggcggcttccgcatcgtgagaaagggttttacagcgcatggcggcagcttgttgaacatgatcccgctctgtcgcgcgcagaacgccaacgcctgaatggatggccggaagagccgcgggacgctatgaaaaaagcgctccgagcgtttgatatttccaatgcagacgttcaggcataccttgaagctcatctgctttctctgccgggatgggccgggatgatgctttggcgttctcagcaatcgcaggacgaagaagaactgctgctcgagtatttggctgtccggctttcaatggaatggatgcttattgagccttatttaccgatgtctaagccgaatcctgaaaaagagatgcagctcgttcctttgattgcgtcctggctgcattggggcggccttacgcctgaagaatggctcgaactttccgcagcagagcaaaaagcgagattaacactcgcccgccgctttgatgatataacgcgcaggcgtctctggctggaagcttgggaacaaacatacgccgctgaggtaaggaagctcatcacggcaaacaaacctgccgctgctgacaaaagcgaaacggtgctggcccaattcgcattttgtattgacgtccgttcagagccgttccgcagggcattggaaaagtcaggcccttttgaaacatatggaacagcgggctttttcaatatggcaatcgaaacgtgcgaactaggcactaaacacagccacagctctctgccggtcatcctaaaaccgcagcatcgagtagaagaaacggccgaagaattaccctttaagtcgtatcaagaacataaaaaagcggcagcttcactgagctccgcctttaaaacgatgaaacagaatctattggcgggcatgctgcttcccgaagtgagcgggccttggctgagcctgcaaatggccgcgcgcagccttgtcccccgcgcagccgggcaagcattcagaaatgcgcggaaaacatggctgaagaagcctcagacaaagctctcgcttgatcgcatggaaacatctgaagccggcattccagtcggatttacggaagaagaaaaagccgcttatgccagacaggcattgaagatgatgggcatcacagaccggttcgctccgctggttgtcatttgcgggcacggcagcagaagcacgaataacccttatgcctctgcactggactgcggcgcctgcgggggcgcctcaggcgctttcaacgcacgcgtcctagccgctttatgcaatcttccaagcgtcagacagaggcttcgctccgacggcatttttattccggatgatacggtattcgctgccgcagagcacattacaactttggatgaactgcactggctctatgtacctgagctgccggctaaagctcaacaagcgtttgaccgcatcaactctgtgcttcccgatgtgagccgtactgtcggagccgaacgcttagaagagctgccgcagctcggctatcaaaatccgcggaatgaagttgagcgcttcgccgaagattggagcgaaatccgtcccgaatgggggctggcccgaaatgcctcattcatcatcggcacacgccggcttacacggggggccgaccttgagggaagggcttttctgcacagctatgactggcggaatgacgaggacggctccatccttagcggcatcatttcagggcctggaacagtggcccaatggatcaatctgcagtattacgcgtcaaccgttgcaccgcattattatggaagcggaaataaagcaactcaaaccgtcactgccggtctcggcgttatgcaaggaaatgcaagcgatcttttggccggtctcccatggcagtccgtcatgcggtcagatgacgaaatctatcatgcgcctctcaggctgctgatcgtgattgaagcgccggatgatgatatcgaacggctccttgaccgcgatcacagcttccggcaaaaggcggagaacggatggattcatctggcatctattaatccggagggaaaatggaagaactggacaaacacgataaatgaatga

SEQ ID NO: 955 - DNA, 1533 bp, Bacillus licheniformis
atgtttgatatgctagattctttattttggctgaaaatatttttcgcgtcgcttgcgctttgtatgttcagcgcactgctcgtcctgaatcgaaaggttccattggcatatgtacggattcatgccaaaatcatcgccctgcctccgcttgccgcgctggcagcattgataacggcaaatcccgggcaggctgaagcttcttggcgcttggattcgcttgcttggctgatcgccttgtttgtcttgactatcggcttcatcgtccagcgctactctgtccggtatttattcggcgaccgctcctaccgtaaattttttgtgctgctgacgcttacgacaggaggagcttcatgcgcctggctgaacgatgatcttcgctggctccttttatgctgggggatcacgctgctcggcttgactgcgctaatcggcttaaacagcgcgtggcaggcggcgaaaaatgccgctttgtatgcgggccggatctttgcgctcagctggctggcgatagcagctgccgctctttggctgtctctttcgacgggacactggcgattatcatccgccatagcggaagaaagccttgtacagctcagctcatgggagaaaaccgggatcggcctcctcgtcattttaacggtgatgattcctgcggcacagtggccgtttcatcgttggctgctcgattcagcaatcgctccgactcccgtttccgcggtcatgcacgccggacttgtaaatgtaggcggcgtcatgctgactcgttttgcaccgatgttcagcggtgatgtactgcagcttattctgcttgtacccgccgtcctttccgtcttgctcggaacgggcatgatgatcgtccaaacggactacaagcggcagctcgcagcttcaacggtcgcgcagatgggttttatgctcgtccaatgcgcattaggggcctatattgcggctgttattcacctcattttgcacggcctgttcaaagccgcccttttcctgcaagccggatcagcggtgcgccgttatgaatcgttcgcatctaaaccgggcagaccggctcttttttggaacatgataggcggcgtctttgctcttgctctcgtcatcggaatctgggcctcagctgcggacgatggctatcaattgatcagcgcccttgttttaggctgggcactgttcattgcttggaggcagcttgtcacagccaattacggacgcgtcacacgaattgccggacttttcattttaacaggggcttcactcgcgtttgccatcattcattccgttttacacgggctcctgaaggatgctgttgtacagggggctgagccgcctgcaatggcggccgttttgacggcagtcgttttgttagccggcagtgcggccggcgcgttgatcgttcggcagcgctttgcatggtccggcgcactttatttacgtcttgtgaaaacgggtgaaccccatttcgaatcggtcgaagaacggccgaattatcttgaccaatatcttactcagggaggtcgccaatcatga

SEQ ID NO: 956 - DNA, 375 bp, Bacillus licheniformis
ttggaaaaacagaaagtgacgaaggggtctttggaggcggagataagcaaagccttaacccaatgggaaaaagactatttgggacgcggatccgtatctgttaaaacagatattataagaaatatggtcatcgtttccctgaacggtattttgacgcccgccgaatacgaactttgcagtacaaaagaaggcctgctgtcaattaaaagaacccgctccggtttggtggaatcgggtatagagcagctgagccgcatgatgaagaagctgaccggtgaagagacgatcagctttcatacggatatcagcacgcgcacaggcgaacggattatggtgtttaaattggcaaacgacctgcaaaaaaaattgtcatag

SEQ ID NO: 957 - DNA, 198 bp, Bacillus licheniformis
atgctaaagctcttttgcatgagattacgattattgattttacggaattactttttaaatatcatatcttttaagatttatgatgtcaataccgttcttttattggataaaaaagaggaatgccgtcttagcagacgagcattcccttggcgactgcaccggctttttccttgccgttcagcagttcggcaagcttga

SEQ ID NO: 958 - DNA, 552 bp, Bacillus licheniformis
atgaagaaagcgtatgtttttttaatcgacggattcgaagaaattgaagcgatagcaacaattgatgttttacgaagggcagaagttgagaccgtcaccgtctcgcttgatccatcgcgcagcgtgaaaggcggacatgacattgtcgtcgaggcagacgtcatgtttgacgatgctgattggcaagaagcggatatgctgattcttccgggcggaaatgtaggcagcaaaaaaatgctggagcatcaagctctgcataagacgctgacagaagcggcaaatgcaggaaaatatgttgccgccatttgtgcggcaacgatgacgctcggaaaaacggggcttgtcagcggaaaaaaagcgacctgctatccgggagttgaagaacatttaacaggggcggatgtcaccgcacatgaaaacgtcgtcgttgatggaaatatcattacttccagagggccggcgaccacgatcccgtttgccctcaagcttgccgaactgctgaacggcaaggaaaaagccggtgcagtcgccaagggaatgctcgtctgctaa

SEQ ID NO: 959 - DNA, 975 bp, Bacillus licheniformis
atggaagaggcactgacaaaggaaaaagcagtgtggatgtatcaaaaaatgctggaaatccgctatttcgaagatcaggttcatcagctgtttgctaaaggaatactgccgggttttgtccatctttacgccggagaagaagcggtcgctgcgggcgtctgcgctcatctgaatgatgaagacaccatcacgagcacacatcgcggccatgggcactgcattgcaaaagggtgcgacttgaaaggcatgatggccgagatatacggaaaatctgcaggactttgtaaaggaaaaggcggatcgatgcatattgcagactttgacaaagggatgctaggcgcaaacggaatcgtcggcgggggatttcctttggcctgcggagcagctctcactgcaaagtataaaaagactaaaaatgtaagcgtttgcttttttggcgacggcgccaacaaccaggggacatttcacgaagggatcaaccttgccgccatctggaagctccctgtcatatttgtcgccgaaaacaacgggtatggcgaagcgactccgttttcctatgcgtcaagctgcgagtcgatcgcagatcgtgcggccgcttatgggattccgggcgttcgcgttgatggaaaagatgcggccgcggtcttccaggctgcgggccgggcgatagagcgtgccaaaaacggagaaggaccgacgctcattgagtgtatgacataccggaactacggccattttgaaggagatgcccagcgctacaaaacaaatgaagaaaaagcggtgcatcaggaagaaaaagatgccattgccgtgttcaaaagcgaactgctggcaaaagggctgatgagtgaagaagagcagtcgcggattgaaaaagaagttgaagaagcggtcgaggaagcggtcgcattcagcgaaaaaagcgcttatccggaagaaaccgaactgctgacggatgtatatgtatcctattaa

SEQ ID NO: 960 - DNA, 1035 bp, Bacillus licheniformis
atgacgagggaaatcagcatgtcagccgcattgaatgaagcgatcaaacttgcgatgagaagggacgatcacgtcattttaatgggggaagatgtcgcaggaggagcgaatgtcgatcatctgcaggatgatgaagcatggggcggtgtgctcggcgtcacgaaagggattgttcaggaatttggacgggagcgcgtccttgatacgccgatcagtgaagcggggtacatcggcgcagccatggctgctgcttcaaccggtttaaggccgatcgcggaattgatgtttaacgattttatcggaacatgtttggaccaggtgctgaaccagggagcgaaattccgctacatgtttggcggcaaagcggaagttccgattacgatccggacgacccacggcgccggctttagggcggccgcccagcattcgcaaagcttgtatgccctatttacaagcattcccggactgaaagtgattgtgccgtcgaccccgtacgacgcaaaaggattattgctcgctgcgattgaagatcaggacccggttatcttttttgaagacaaaacgctgtacaacatgacaggcgatgtgccggaagaatattacacgcttccaatcggaaaagcagatatcaagcggaaaggcgccgatgtaacgattgttgcgatcggcaaacaggttcatacggcgcttcaagcggcggaacagctctcagcgcggggaatcgaagccgaaatccttgatccgcgaagcctttcgccgcttgatgaagaggccgtccttgcatccgtagaaaaaacaaacaggcttgtgatcgtcgatgaggccaatccgagatgcagcatcgccgcggatatcgcatcattggcggcagataaaggatttgattcgcttgacgcaccggttaaaaaggtgacggctccgcatacgccggtgccattttcaccgcctcttgaagacctgtatttgccgacgccggaaaaagtcgtgaacaccgtgcttgagatgctcggagaaacatcaacacatacggtgtaa

SEQ ID NO: 961 - DNA, 1134 bp, Bacillus licheniformis
atggctgtcgaagtggtcatgccgaaattggggatgtcgatgaaagaaggtacggtttccgtctggaataaaaaagtcggggaagccgttgaaaaaggagaaagcattgccagcatcaattccgaaaaaatcgaaatggaaatcgaatctccggcaaacggaaccgtgttggacatccaagtatctgaaggagagggagtgccgccgggaaccgtcatctgccgcatcggaaatgaaaacgaacaaacgcaggagagccaaacaaaacagccggatcccacgaaagaacggattaaaatttctccggctgcgcgcaaaattgcgcaaagcgcaaatatagacatcaaaacgctgaagggcacaggccccggggggagaattacgaaagcggatgtgttgcaggcgcttcccggccggccgaacaagcaggcggctaaggctgaagctgaagagcggccgccggcaagcccgatgaggaaaacgatagccgcaagaatgacggaaagcctgcaaaacagcgcccagctgacgattacgatgaaggcggacatcacgaaattaacagtcctgcaaaaacagcttaatgaaaccgctcaatcaagatacgatacgaagctgacgatcactgattttgccgccagggcagctgttttttcgcttttggatcatccggccatgaacagtgtttatcaagacggaaggcttgcgacctttgagcatgttcatttaggagtggcggccgctttggacgaaggcctggccgttcccgtcatccgccatgccgagcggctcccgctgatcgaattggccaagaaaatcaaatggtacgccaaaaaagcgcgggaaggccggcttctacacgatgaaatagaaggatcgacatttacgattacaaacctcggcgcatatggtgtcgagcactttaccccgatcttgaatccgccggaaaccgggatactcggagtcggccaaatgtattcggcacccgtttatcaagacggagaactgacaaagggcgccattctgccgctcagtctgacttttgatcaccgcgcgcttgatggtgcgcctgctgcagcattcctttcagatgtgaaaaactatttggaagatccggcatcaattcttttatag

SEQ ID NO: 962 - DNA, 1377 bp, Bacillus licheniformis
gtgacacttgcaattataggagggggacctgcgggttacgtggcggcgattacagcggccaaaaatagcagagaagtcatcctgattgaagatggttccctcggaggaacgtgtttaaatgaaggatgcataccgaccaaagcgcttcttgaaagcgcagatatgttcgagaaaataaaatccgccggcgcattcggaatcgggctgtcaggcgaaagcccgacggttcactgggaggccgtccaaagccgtaagagagagatcattcagcggctcgccgggggtattgaatatttgatgaataaaaataaaatcaaggttctgcaaggaaaagcatcgtttttgtccgaacacgacatacttgttgaaaaggacggaaaacaggaggtcatcaatgccgggcatgtgattatagcggcaggggcagcacctgccgcactgccttttgcgtcttttgacgggagctggatcatccacagcggagatgccatgtcattgccgtccatccctgaaacgatttttattatcggcggaggaatcatcggctgtgaatttgccagtatatacagcaggctgggagcgaacgtgatcatagccgagcaggcggaacagattctgcctgaggaagatccggatattgccgcctttcttcgcacaagtctcgaggagtccggcgtccgtgttttcacatctgtacaagtggagcgtcttgatcctgccaggcagcgcgtctttctgaaaaatggcgatgacagctttaatattcaagctgatcgatgtctcgtcgccgtcggccgaaagccgaggactgatgatctgaagcttgaccatatcggagtccaatatgacaggaaagggattcatgtcaaccagcatatgcagacaaacatcccgcatatttatgcgtgcggggatatcacaggcggggttcagctggcgcatgccgcttttcacgaaggaaccgtcgccgcatcccatgcctcaggcagagacatgaaggtcaacagtgacattattccgcgctgcatctatacttcgcctgaaatcgcaagcgtcggcttaaatgaaaaaaaggcgagggagcgctacagggatgttcgtatcggagagtttccgttttcttcaaacggaaaagcgcttattttgaatgaaactgccggcaaggtcaaaatcatcatagagccggagtatcaggaaattgtcggggtttcgatcgtgggtccgggagcaaccgaactgatcggccaggcagccgtaatgttgcatgcagagctgacggcagacgcaatggagcacttcatcgcggcccatccgactctttcggaaacgattcacgaagctttgctgcaagccgcaggtcgggccattcactgctga

SEQ ID NO: 963 - DNA, 1836 bp, Bacillus licheniformis
atgaatccgacgccctgctatttaaatacgtggaaacgctttgttcaggaagggcttcttgatcaggcccgcttgaacaaaagagtcatggaatcatggtaccgctgcaaaaatcgaaatgtcaatccgtatttagataaaggacagtcaattttaaaaaaggatttattcgacgctcaaaaaaagaaacactcgttattcctcgatatcgccctgccttatctacacaatatcagccgtgaattaaaagagtcggaaatgatggcgctcctgatcgatgccgacgggtacgtattaagcttggccggctgccggaggacgcttgaagaggcgaaaaaaatcaattttgtcgagggcgtgcgctggacggaaacagaagtcggcacgaacgccatcggaaccgcacttgaaatcggcgaagctgtcaccattcacgggaccgagcatttttcggtcgcttcccaccattggagctgttctgctgcaccgattcgcgatgaagacggcaccgttatgggtttaatcgatatttcctgcctcacggatagaaggcatccctttatgcttgggatggctgccactgccgcacacgccatcgaacgcgagatcagcgcacatacgaaaaaaaacgaagccgagctcatcagccattgtcttgaaaaaatcgatttggatcagccgtttatcgtctgcaatgaaaaagacaaaatcgtagccgcgagcagaccggtgcgggaacgtttttccgactggaggagaatggatgtcaatgatctgtatgagcgcgggtttgccggggggcacaagcagacaattttctccgccaaagacgggaggcccctcggtaagtcgattgcactggctgaagtgtcccgcaataaaacagctccatcactcgtatcccgtttcatctatccgggtgaaacaggaacaagccgggcgtttcagcaggcgcttcaccacatgaggcttgcggctaagacggatgcgaatgtatacatatggggggaaacaggctccggaaaggaacttgccgcgagggccattcatcaggcgagcgcacggagaaacggcccttttatcgccgtcaactgcggcgccattcctgaaagcttgatggagagcgaattgttcggctatgccgaaggcgcatttacaggagcaaagcgccgcggttcaaaagggaagtttgaacaggctcaccgcggtacgatttttctcgatgaaatcggtgagatcccttatcagatgcaagtggcgctcttaaggatcatcgaagagcggaaggtcactccgatcggcggaacccgtgaagttcccctcgacatcagaatcatcacagcaacacaccgtgatctgaaagaccttctccaaaaaggaaagatacgtgaagatctgtattaccgccttcatgtttaccccgtaaaaataccgccgctcagagagcgcaaagaggacatacctgatttgttccgccactatcaacaacaacacgagtggaaggccgagtttccgccgaattttttcaagcggcttcaggaatatcattggcctggtaacatccgtgagctctttaatacatttgaaaggctcagggttttatttccggaaggcggactgatcgatccgtcccaatacagcgcggtgctggacggactcgattggaacagcggcgcaccttctgaagaagaccggctcacattcagagaacgtgttcaaaaacaaacgatgatggaagctttgcaaaaaacgaaaggaaatgtgtccgaagcggccaagctggccggaattccaagaagcacattttacaagcggcttcgaaaatataacctttag

SEQ ID NO: 964 - DNA, 327 bp, Bacillus licheniformis
atgatgatcgcaatcggtttatttttactggcgggtttggctgaaatcgcgggcggctatctcgtatggctgtggctgagggaatccaaaccattgtggtacgggttggccggagggctgactttaatcatttacggcgtcatcccggcttttcaggcatttccatcgttcgggcgcgtctatgccgcgtacgggggcgtatttattattctggctgtgctttgggggtggctggtcgacaaaaaaacccccgacctctatgattgggccggggctgtgatctgtttagccggcgtcagcgtcatgctttgggcgccgagaggctaa

SEQ ID NO: 965 - DNA, 1350 bp, Bacillus licheniformis
atggataaaacgtattcaattgtcattgcaggcggaggaagcacatttaccccggggattgtattgatgctcttggacaatctggatgatttcccgatccgacagctgaaattgtatgacaatgatggagagcggcaagacaaaatagccggcgcttgtgaagtgttggttaaagaaagagctccgcatattcaatttttagcgacgaccgatccggaagaggcgttttccgatgttgatttcgtcatggctcatatcagagtcggtaaatatgcaatgcgtgagctcgatgaaaagatccctctgaaatacggagtcgtcggccaggagacgtgcggacccggagggattgcgtacggaatgaggtctattggcggcgtgcttgagctcattgattatatggaaacctattcgcctgacgcgtggatgctgaactattcaaacccggctgcaatcgtcgccgaagcgacaagaaggctgcggccgacatcaaaagtgctgaacatttgcgatatgccgatcggtatcgaagacaggatggctcagattctcggactgtcttcgcggaaggagatggttgtccgctattacggccttaatcattttggctggtggacgtcaatttgtgataaagacggcaacgatctgatgccggcgatcaaagagcatgtcaggaggttcggctatattccggaacaggagcatgaaaaggctgaggcgagctggaatgacacgttcaaaaaagcgcgggaagtatttgaactcgatcctgagacgcttccaaatacgtatttgcaatattatttttatcctgatgatatggtgaaaaaatcaaaccctgaatttacccgggcgaacgaagtaatggaagggcgggagaaattcattttcggcgagtgtgaaaaaatcgcaaaagcccaatccagcgccggcagcaaaatcgaaattgatgatcatgcttcatatattgtcgaccttgcgcgcgcccttgcattcaataccggtgaacggatgcttttaatcgttgaaaataacggagcgatccaaaacttcgattcatcggcgatggtagaggtgccttgcattgtcggcaagaacggtccggagccgatcacaatcggcaaaataccgcagttccaaaaagggctgatggaacagcaggtgtcggttgaaaagcttgtcgttgaagcctggattgaaaaatcgtatcaaaagctttggcaggctctgattttgtcgcggactgtgccgaatgcacgaacagccaaactgattctcgatgatctgattgaagcgaacaaaggctattggccggagctctccgcggaaaatcttcagctgtcgctttaa

SEQ ID NO: 966 - DNA, 771 bp, Bacillus licheniformis
atgcagttggaagaattaatgaacaagcattataaaaaattgaacgaaaacgatttttatgttttgaaatatattttgaaccatcaagacacttgctacaagctgggcatcaacgaattagcaaagaagtgcaatgtatcccgcacatcgattttaagactttctcaaaaactggatttcagcgggtacagcgagttcagggtgtttctgaagtgggaggccgagaagcgggaagaagagcgggaagattgccgttcctttgaaagcctcatgagggatatggaagcgagcatgaaatatttgaaaaatacggatttgcgaaagatatgccagctcattgacgaagcggaccggatttttgtctatggttcaggcacggctcagacgacgtgcgcttatgagctgcagcgaatgtttgtttctcagcaccgttatttgacggtgatcaaagatcaaatcgatttcgacctcatgtttcctgattttagcacggccgatctgatcatcatcatttcgctgtcaggagaaaccccgtcgctgattccgcaggcacagtctttgtcggctaaaggcattccttttatctctttgacgaatttgaaaaataatctgctcgcccagctcactccttacaatctctatgcgccgagccagacggtgacggtttatccaaaaacagagctgaccgcttttgcacccttttttctcgttggggaagcgctgtttcgcagctatgtcgactatgctgaagaaaagaaaaatcaggagtaa

SEQ ID NO: 967 - DNA, 1593 bp, Bacillus licheniformis
ttgatgcaaaaagtacagcggttcggaagcgccatgtttgtgccggttttgctatttgcttttgccgggatcgtcgtgggcctcagcacattatttaagaatgagcagctgatgggatcgcttgccagtcaggataccttttggtatcaattctggtatatccttgaggaaggcggctggaccgttttcaggcaaatgccgctgttgtttgcggtcggaattccgatcgcactggcaaaaaaagcgcaagcgcgggcatgtttggaagcgcttactacttatttgaccttcaattattttgtcagcgctattttgactgtatggggcgactttttcggagttgatatgactcaggaagcaggaggaacaagcgggcttgcagaaattgccggcatcaaaacccttgatacgaacattatcggggcgattctgatttcatcgattgtcgtttatatccacaaccgctattttgataagaagctgcccgattttttagggatttttcaaggctcttcattcgtcgtcattatttcattcgcgattatgcttccggtagcactggcaaccgcgtggatttggccgatggtgcaggacggcattgcgtcgctgcaaagcttccttgtcgcctcaggtgctttcggtgtatgggtttacacatttttagaaagaattttgatccctacgggcctgcatcacttcatatacacgccatttgttttcggcccggccgtagttgaaggcgggattgtcacctattgggcgcagcatctcagcgagttttcagcaagctctgaaccgttgaaagagctctttcctcaaggcggattcgcgctccacggaaactccaaaatcttcggaattctggggatcgcactagccatctatgtaacagccaaaaaagaaaagaaaaaaatcgttgccggtctgctgattccgatcacgctgacagcggtaattgcggggatcacggagccgattgaatttacgtttttgttcatttcgccgctgctgtttttcgtacacagcctcttggccgcgacgatggcaaccttgatgtatgctgcaggggtggtcggaaatatgggcggcggtttaatcgagattttaacgctcaactggatccctctgtttcatcagcacggcagcacttatgtttttcaaattttgatcggcttgtctttcaccgccatttacttcttcgtattcaggttcttgattttaaaattggatattgccacgccggggcgtgaaaaagaccagcaacaggagacaaaattttattcgaaaaaagattacaaggcgaaaaaagaatccgaaaaagaggtttctgcggcgcaggaaattgctgagaccgatcaggcggttctttgcatcaaagcgctcggcggaaaagaaaacattgcggaggtgacaaactgcgcgacaagactgagagtcagcgtgtatgacgagtcaaaagtggagccggacagtacgtttaagtcctttggtgcgcacggtgtcgtcagaaacggaaaagccttgcaaattattatcggtctttcggttccgcaagtccgtgaaagggtcgagaagctgctgaaccaatcataa

SEQ ID NO: 968 - DNA, 579 bp, Bacillus licheniformis
atgggaacggaaatgccagctgaattttatgatcaatttattgaccgacatctgattccgcttgaaaaaagcccgtggagaaaggtgtatgaagaagctgcacgtttattgccggagtccaaagatgaaacgattgtcgatatcggctgcggcactgggagattcgcaaagcttttatatgacaaaggatacagaaaatatttaggcatcgatttttccaaaggaatgcttgaagaagccaaaaggtataatccctcgtttactttcatcgaaggaaatgtatatgacgaggcgatcgtccggatgctgcaaaaatatcatgtttttgttttgctggaagtgttagagcatatagagaaagacaaagcgtttttatcgagtcttcctcaagggagcgacatggtgatttctgtgcctaactatgattcacgcgcccacgtccgccacttcaaacatattgacgaagtcatcgaaagatacgacggcattttggattttcagggcaccgaaaaagttgtcattaaaacatctgaacggctgaagaatgaaatttacgtgctgaattgtaaaaaaaggtaa

SEQ ID NO: 969 - DNA, 978 bp, Bacillus licheniformis
atgcggagatgcttgaaaatattggttctgattaaaacgttttggaagaccatgcccaaacatgaagtaaagtataaaatgatgaaatctcttgaggagtttgccgaagtcatgtactggcatacggacggctatcttccggatatattggacaaaatccaatttcgtcctgatttcattttccactacgacattgcctacggcttctcattgtccccaaacattagggggctcaaagatacaaacatccccaccggcgcgtttgtgatcgattctcattttaataaacagatcagaagcagctatttcgaagacaaccaaattgatttaattttttcagtgacaaaagagcattttttaaatgaatacccccagtacaaagacaaattcagatgggttccatgggcagttgatccagaaatattcaaggactggaagttgaagaaaacgatagactatttgctcatggggcttgtacatgaaggaaacaaaagatatcccccaaaaggaaaatacctttttagggaggctgtattgcagaccatgaagcatgaagaagggtttgttcaccacccccatcccggcaatgtcataactgacgaagaagaaatcaagcaggcttttttgaatgaaaaatatgcccaggaattgaacagagcaaagatatttttcacatgcggaagcgccctccgctacccgttgttaaaattttttgaagcccctgcctgcagaacgctgttgctggcggagccaaatcaagatattttcgatcttggctttaaagacggcacccatttcattgcttgtgaagttgaagacttttatgacaaagcaaaatactatcttcaaaataaaaaagaaaggcagcgtatcacagacaacggctaccgtctcgttcattcacagcatacctatcatgcgcgtgcacaagaaatagtagacacaataatagattttttagagcagcaggaacaatga

SEQ ID NO: 970 - DNA, 339 bp, Bacillus licheniformis
atgagcctatcatctttatgtccgaaatttgaaaaaggaatgaaaatgataagtcagcgctggaacggattcatcattcaccagcttcttaacggcccgcagcggttttgccatatagaatcttcccttcccatcagcggaaggctgttatccgaaagattaaaagaactcgaacacgagggcctcatccaccggcatgtgtatccagaaactccggtgcggatcgaatactccctgactgaaaaagggcaggcgctcgaaccggtccttaaaggaatggaaaaatggtcgcaggaatggatcgatctggacgaagccaatgaacgggaaaatcattaa

SEQ ID NO: 971 - DNA, 444 bp, Bacillus licheniformis
atgaacaacaaatacgaattaggtgcattaattttacgtttggttacaggtcttacatttttgcttcacgggctttcaaaatttcaaggcgggattgaaaatactgtaggattcttcagcagtgtcggaattccgggctttctcgcctatatcgtagcgattatcgaattggccggaggggctttgatgattctcgggctcggtacacgtgtgattggccttttatttgcgattgtcatgctgggggccattttcactgttaagctctccgccggtttcatgggaacggatggaggcgcaggctatgaatttgacgttacgcttcttgcaatgtctgtatacttggccttgagcggaagcagcatgctgtcccttggggaaatgatcctgaaatcaaggaaagaaggaaaaacagatgacgcagcaaatccacccgggcactga

SEQ ID NO: 972 - DNA, 861 bp, Bacillus licheniformis
atgacgcagcaaatccacccgggcactgagctcggatatgtcaagctgaaggtgagccgtcttgaaagatcggtttctttttacagggatgtgatcggttttcaagtattaaaacaggacggcaaaacggcggagttcacagttgacggaaaaaatccgcttttgatcattgaggagattccaaatgctgttgttcttcctgaacgatcggcagcaggcctttatcattttgccattttgcttccaaaccgaaagcagctcggcatggctgtgaagcatttgatccgcgccggcattgaactcggccagggagatcaccttgtcagcgaggcgttttacttgtcagatcctgatcaaaatggaatcgaaatctaccgcgaccgtccgcgagagggatggaagcgcgatgagcaggggaactacgtgatgggtacggagccggttgatgtccaaggacttctggaagaagccgatggccacgaatggcaaggtcttcccccggaaacaaaaatcggacacgtccattttcacgtccgggatttgaagcaggcgaaagaattttaccactctgtactgggatttgatatcacaggagattatcaacacatgtcagcgctttttgtctctgccggaggctaccatcatcatatcggcttaaacatctgggccggacagcatgcgccatttgccccgcttgatgcggcaggcatggcgtattacacggttcttttaccgaatcgagcggaacttgaccgaattgcaaaaaaactgaaaagctcgggttatgccgttgagcatgaagaaaacgcatggtttgttaaagacccggcatcaggtattgatatcagattgaccgtttga

SEQ ID NO: 973 - DNA, 1605 bp, Bacillus licheniformis
atggcaaaaagcctgactggcaaggcgaaacatcatccgcctgtctggaatccgaacattgacggcgggcggttttgcaatcccgttcttttcatggactactcagatccggatgtcattcggaaaggcagcgacttttttatggcggcttcaagtttttcctgttttcccggaattcccattttgcactcgacagatttggtgaactggtcattgatcagccatgtgtttgacgagctccccttcggcgaatatgaggcccctgctcatggcaaaggagcgtgggcgccgagcattcgataccataacggagaattctgggtgtatttcgcaacgcctgatgaaggaatcttcatgagcaaaacatcagatccgtttaaaggatgggagcctctcatacaggtcaaaaagacaaagggctggattaatccttgtccattttgggatgacgatggaaatgcctatctgatccatgcttacgcaaacagcagaatcgggatcaagagcaagctgaatctttgccgaatgaaaaaagacggaacggctttggaagacgatggagaaatcgtctttgacggcacgctgaaccaccctacgattgaaggaccgaaattgtataaaaaagacggctattattatatctttgctccggcgggaggggtgaagacaggctggcagacggttttgcggagcaagcagatttacggtccctatgaagacaaggttgtccttcaccaaggaaatacggtcattaacggtccgcaccagggaggctgggttgaacttgattccggagagtcatggtttatccactttcaagatcgcggagcattcggcagagttgtgcaccttcaacctgtccgctggttcgacggctggccgctgatgggtgaagacataaacggcgacgggatcggagaaccggttttgcattgggaaaagccgaagacgggcgccaaagaagtgaaactgccctttgatcatggcaatgatgatttttcttcttcagaccgccttgcgcttcattggcaatgggaagcgaatccgaagcaagaatggtactctctcagcgccagtcccggccggcttcgcttatacagccgcggcatcgctcatccgttcaaactgagccgcctgccgaaccttctgatgcagaaattttcggggccaagcttcacagcaacggtcaaattgtcgctaaacgccttgtcggaaactatgatggccggcttggctgtcatgggaagggaatacgcctatctcggcttctcgaaatcagaaaacggttatcggctttctgtatacgaaggccgtatagaaggtgatcaggaagatgtcaaaacagaagagcgcggcgtacatgcggaaatggtctatttgcgcgtgactgttgatgaacaggcggtctgccgtttcagctgcagcatggaccggcgtcatttcacacagattgggaattcgtttcaggctgttcccgggctgtggacgggtgccaaagcaggtgtatattgcgccgataccggcggagaagacggacaggacggatggtgcgatatcgaatggttcagtgtcgaaccggcaggaggggaatgccatgagcggtga

SEQ ID NO: 974 - DNA, 1548 bp, Bacillus licheniformis
atgagcggtgaacacacatatacgaacccggtgttgaccggttttcatccggacccttcaattatcagagtcggggaagattattacatggtgaactcaacgttccagtatttcccggcaatcgttatttcccactctaaagatttagtccattggaagatcatcggccacggaatcacggaaaatgaaggattggacctgtcggatatcaatgattcgcacggcatttgggcgcctgatatttcgtatcataacggaaccttctacatcttcgcgacgcacaggctgaacggaccgactgtcatcaacggccgaaagctgatccgcaggcagattatgatcaagtccagccgccccgaagggccttattcaaagcccgttttcattgatgaaggcagcggcatcgatccttctcacttcgttgacggcgacgggaaacactatatgctgctcagtcctgcctgcacgctctttcctctaaatgaagaatgcacagacatctccggcgagccggttcagatatgggaagggactgggagaagggcgcctgaagggccgcatttgctgaaaaaagacggttattactacgcgatattggcagaaggaggcaccggatattcccactcgattacgacagcccgctcaacgcatttgtacggtccttatgagccctgcccgtataatccgattttaacgcagacagacccggatgctccgattcaaagagcaggacacggcaagctcgttgaaacccagaatggagaatggtgggcggtgtatctatgcggacggcccaatcaaggtagctatacaacggttgggagggagaccgctttggatcccgtcgaatggacggatgacggctggtttgtcatcaacaacttgaagggcccgagtcttgttcagcgcgctccaaacctcccccaagtcaaatgggatgaaaagaatttcgacgattttgacgaggatacgctcggtcttgactggcagtttgtcaggaatcccgatcattccagctggtctttgaccgagagaccgggatatctcaggctgtggacaggtgattgggatttacatgacatccgtgcaaaaaatacggtcgtcagaagggaaaagcaccacctatacagcgccggcgtgaaactcgacttttcaccttcggcgtccggagagcaagcggggatcgtctgctactacagcacgaataattatttgaaatgctgcttgatctatgaagaaggattgaagatcaaggtcgtggaaaatcgctccggttgccaaaaaacgctggggaaaaaacatgccgaggccggcccgctgtttctgaaagctgtcatcaataagcaaaagagggatttttactacagttatgaagggaagcattggcaccacgcgggcggtacagaggacgccagttttttaagcgatgagggttcgcgtgacgcaaagggacatacgggaacgatggtcgggatattcgccaataacggcggaagcggcagaaaggctgccgctgattttgactggttccgctatattgcatattaa

SEQ ID NO: 975 - DNA, 846 bp, Bacillus licheniformis
atgctccatcctaaatatttcatagccgagcattctttttcgattcaatatatgcagagaaaaggatttaccgagatgaacgcgccgcatgttcatgaaggctatgaactgtattatctgctgagcggagaacgcacgtattttattaaccaaagcgtctataccgcggaaaaaggcacgatgatcatcatcaatccccacgacctccaccgaacgtcaagcacggaagttcaagagttcgaacgcatcctgattaatttctcgcacgatttcatagaaccattgctgaagtgcagccattatcggcttcttccgtttccggaaaatcaaaacttcatcgcattttccctgcgtgaacaggccgcagtcgaacatatgctgatggagatgaaaaaggagtgcaagctgaaaaaagaaggacacgaggatgtcgtcagggcgctgctgtttcagctgcttttcaccatttaccggagccttgcgggcggcggccgcaatcaaacacggccgcttcacccgatggatgaaaaaatctcggaaatcgcttcatatatcaattgcagctttcaagaaacgatgacgttagacggattggccggacaattttatatcagcccatcctatttaagcagagtgtttaaaaaagtgaccggctttcatcttcaggagtatatccggcacatcaggatccgcgaagcgaaaaaacggcttcgtgatacagacgagaaaatattggacatcgctgcggataccggttttaagcatatcagccatttcaataaagtgtttaaagagatcgtcggcatcccgccgcttcaatacaggaaaaaaagcagagacatttaa

SEQ ID NO: 976 - DNA, 1471 bp, Bacillus licheniformis
atgaaaaagttatgttgcctgatcttggtcttggttttttccgcgggctgtactcagcaaaaggcatcaacggaagaggacggggcgcttgaaatcaattggctcgtaccgctccacacaccgcagcctccgaaagagaaggcgcttgacatcattgaagacaaaacgaatacaaagctgaagctcatctgggttccggattcaacaaaagaagagcggatcaatacaacccttgcaagcggaaacatgcctaaagtaatgacattgcctgatcttgaagattcagcggttgtcagcgcgctgcgctcgggaatgttctgggaaatcggaccgtatttcaaagactatccgaatttaagaaaacttgataaaactatattgaaaaatatttcggttgatggcaaagtttacgggatttatagagaaaggccgatggccaggcagggagtcgtgattcggaaagactggctcgacaatctcggattggaaatgccggaaaccgttgatgacctttataaaatagcgaaagcatttacagaacaggaccccgatcaaaacggaaaagacgacacgttcggtctcgtcgaccgcaatgatctcaccttcggagcgtttaaaaccctggcttcgtactttggcgcgccgaacgaatggggaacggacgaagacggaaatctcttcccctattttaagcatgaggcctataaagacgcaatggcatacatgaaaaagctttatgaagaaggcctgatgaacagggactttgcggtgacaagcaaaacgcagcagcaggatttagtgattcaggggaaagcgggaatctatatcggcgcgatgagcgatgcatgaacttgcgtgatcagggactcgctttgaaccccggctttcagcttgatatcgcaaaccggatcaagggccccgacggcaaggagcgcacatgggcgctcggcgggcatggcgggatgttcgccatttcgaaatcaagcgtcaagactgaaaaagaggtcagaaaaatcctcgcattttttgacagaatcgctgaagaagacctcaacaatttgatgttgtatggaatagaaggcgtacactatgaaaagaaaggggggagcggctattttcgaaagcaggaaaactaccatctgtgggaagcggaaattcagccgttaaaccagctgattggcgtcaataaacaagctttaaaaagcgctgaagatccgctccgcgccaaaaatgaaaagcttgaggaggacaaccgggcaatcgcagtccagaatccggccgaaccgctgtattctgccgcacagatggacaggggaacagaattgaagaaaatcattgatgacgccacatttcaatttattctcggggaaatcaatgaaaaagctttgaccaggcagtcctgaaatgggagaagcatggcggcggaaagatcatgaaagaactgaatgaagatctgaaaaaagcaaactaa

SEQ ID NO: 977 - DNA, 114 bp, Bacillus licheniformis
gtgtgcatatataacggcagtctgcatatcgcttcctccttttcgtcctatgatggaattatattgtttattttgcagaatttaaagaaaatgaacttggagcgaatacgatga

SEQ ID NO: 978 - DNA, 594 bp, Bacillus licheniformis
atgcagactgccgttatatatgcacacccaaatccaaacagtttcaacggagccattttaaatcaagtcataaaggcgcttgaggacggtaagcatttttatgacgtcattgatttgtatagagaccggtttgatcccgttctattatttgatgaaaagaaaaggcgctcagatatgaaacgcgatccggaaactgccgaatatcgaagaattgtcaaaaacgccgaccatctgattttcatttatccgctttggtggggcggaatgccagcgatcatgaaaggctttattgaccgcgtttttgccgccggagaagcctatacatatcaaggaaagctgccaaaaggcctgctgaaggcgcgcacggcatcagtttactacacggctgacgctccgtcttggtatttgcggttttggcagcgggatgccgactgggtgacggttaaagatgtgatgttgaagttttgcggcgtacggcgggtaaagcgcctgctgtttgccggcgtgaaagacagctctgaagaaaaacgcacgcaatggcttgaccgtgtctaccggtctatagctcctgcagatcgggggatcagcaaatga

SEQ ID NO: 979 - DNA, 612 bp, Bacillus licheniformis
atgacaaaggagatgaagtggctggattgggcaaaggaaattcaagctatcgcccaggcggggcttgcctatacaaaagatgactttgatcgtgaacgttttgagcagcttcgcgagctgagctgcgaaatcatcgccgattatacggaaacggacttctctaaagtgaaagagctttttgccggggaatcgggctatcaaacgcctaaagtcgatgtgagagccgtaatttttaaagatcataagctcctccttgtccaggaaaaagcagacggcaaatgggcgctgccaggcggatgggcagacatcggctttacgccgaaagaaatcgcggttaaagaaacgcttgaagagacaggtttgaaagtcaaggcgcataaacttctggcggtcatggataaaaagcgccacaaccaccccccttctgccttccacatctataagctgtttatctcctgtcaaattgtcggaggcaaggcggaagcggggactgaaacacaaaaccttgtttttttctcattggagaatctgcctgaattatcggcagcaaggaatacctatgaacagatcgaatatctttttgaaaaacatgatgaagtgtattgcgactaa

SEQ ID NO: 980 - DNA, 532 bp, Bacillus licheniformis
atggatcagttgaaatatccgatcggcaccttttccaaaccgcttgaagcggacgaaagggaactggaaaaatggatcggggatctgaagcaagcgccgcatctcctgagaagcgcggcggcgggactaaatgaagaacagcttgatacgccgtaccggaccggaggctgggctgtcctccaagtcgttcaccatcttgccgacagccatatgaacgggtatattcgaagcaaattggcgctgacagaagagacgcctttgatccgcacgtttgacgaacagaattgggccgggcttaccgatgccagaacgctggatccggatttgtcgctggcgcttttagacacgctgcatctgcgctgggctgctcttttttgaatctttgacagaagcggattttgaaaaagcgtacatttatcctggcacaggtgaggagatgaagctgtatcaagcgcttgctctctatgtgtggcactcacaacaccatattgcccatattaaagcgcatcgaaaaagaatgggctggaattga

SEQ ID NO: 981 - DNA, 2553 bp, Bacillus licheniformis
atgaaaaaaaatgcgctggcgattttaaggatcgtgattccggcggctgttcttttgtttgtcttttttcaagcgaaaaaagaactggccgggctgtcttttaaagaaacatttttgattatcgatcaaattaatcggattgacctattcatccttgtttttctcggacttgccgccattttggcgatgacattatacgattttgttctggtccgctccctcggaatgaaggtttcgaaatggaaaacgatcaaagtatcatggatcgccaactcacttaacaatgttctcgggttcggcggattgtccggtgcaggattgagaacgatcctttacaaagagcatgttgatgatgtgaagaagctgatcagggggatcgcttggcttgcgtcttcggttcttctcgggctgtctgtcctcagccttctcgtccttgccggaattctgcctgccggggatctgtttacagaaaaaacgtgggtgctgctggctgttgccggtacggcgatgatcgctcccggtgcggccgtcattttaatgatcaaaaagaagagaagcagaggagccgaaaagggcatgcggctttcggtcttcttttcttatctgggtgcatcggtgatcgagtgggttgccgcagcagcggtcatgtattattcccttgcaacgatgggcgtcgaattggacttaaaaaccgtcatcggcgtttttacgattgcttcggtggccggaatgatcagtctcgttcccggcggattcggttcgttcgacctgctttttttggtcggaatgagccagctgggggttgatcaggaaatcactctgacggcgattgtgctctaccggatcgcctattcgtttatcccttttgtgttcggtcttatttttgcagcagccgatttgactggaaatacgatgaagaggctcgaagaaaaaccgattattgccccggcaatagaaacgaccaatattctgttgattttacacagagcgctcctattcagactgctgaacggttcgctttcagtcatcgcattttgtagcggagcgattgtgatcgcatctgtggcgctgccgattgacaggattacattgataccgaatatttcgaagttcatgctggtgttttttaacggtttgtccctcagtttcggcttgattttgctgattctgccgcttgaactttatcggaggacaaagagatcttattatatgacgctgaccgctttggcgcttgcctttctgttcacgctttttaaaggctttaatattagcgccgtcttcatgattcctgtggtgtttgccctgtttgtattgctgagggggcagtttacaagggagcgggctgtctacacattcgggcaaatcgcatggggagcttttatcttcctctttactttattgaattacaatattatcgcttcacacatttgggaggcgctcggccatcttcttgtgaaagattatttcattcacagtgaacgccatgtcgacttcgcgacgttttttgcgttatttttcgttccgctgtatttcgctgttttcatctgggcgtttaacaggaaaacgaaagagatcggtgaagagcctgatccggagaaactggaggcattcttagaagaaaaaggcggcaacgctttgagccatttaggctttttaggggacaagcggtttttttattcaagcgacgggaatgcgctgattcaattcgccaaagtcggccagcgcctcgttgtgctcggcgacccgtccggccgggaagactcgtttccgctcgtgatcaaagaattccttcatgcggctgaccaaaaagggtatcttgtcattttctatcagatcgaacgcgaagacatggcgctctatcatgacttcggataccgctttttcaagcttggagaagaggcgattgtcgaccttgacacctttacaatcagcggaaaaaagcgggccggactaagggcgatctacaaccgttttgaacgggaagggtatacgttccatgtcgaacagccgccgttttcgagagaattcctcaacgagctgaggcaggtgtctgatgaatggctcggccgcaaaaaagaaaaaggcttttcgctcgggttttttcaagaagattatttgcaaaaggcgccaattgccgttttaaaaagcgaagaaggcgagatcgtcgcgtttatgaatatcatgccgatgtaccgcgaaggggaaatatccatcgatctgatgcgctattcgaaaaaggcgccgaaaggaatcatggatgcgctgttcatctatttatttcaatggggaaaagaacagggctacacggccttcaatatgggaatggcccctttatcgaatgtagggacaacgtttcagtcattctggacggagcggctggccgccgtgattttcaacaatgtcagctacatgtacagtttcagcggactgcggtcttttaaagaaaaatataagccggtttggcgggggaaatatttagcctatcggaaaaaccgatctctcccggtaacgatgatccttgtgacaaggctgatcggaaggagaacgaaatga

SEQ ID NO: 982 - DNA, 132 bp, Bacillus licheniformis
atgaggccgtttattaaaacggccttttttttatattgccattgtaagaagcactcaaaaggcggtatactgcaaatgattggaagggaaggatcgaatcgacaaatgggggatcaaaatgaagccaattga

SEQ ID NO: 983 - DNA, 897 bp, Bacillus licheniformis
atgaagccaattgaagtattaagatatgacgcattttcaaagactgcgggtcaaggaaatccggcgggcatcgtgcttgaagcagacgggttgaccgattgggagatgcagaagatcgctgaacaggcaggctataatgaaacggctttcctgctgccgagcgagtcggccgacataaggatccgctactttacgccgggccatgaaatgaatttatgcggacatgcgactgttgcttctctttatgcgcttttggaaaaaggcgcgattgaagctggcgcggagctgaaggtcgaaacaaaagcgggcgtcctttctgtgtataccgcctcagacggcaatcggcgttttttggtgacgctggagcaggcgcccccgtgttttcagtctttcacaggaagcagaagccaattggcggaagcgctggggatcagcgaagcggactttcatgaagcattgcccgttgtttatggaagcacaggtatatggacattgcttgtgccggtgagagatttggccgcaatccgcaggatgaagcccgttcaagctgaatttccgaacgttttaaccgagatgccgcgagcatctgtccacccgttttgcctggagacgatccatcgggattgccagcttcacggcaggcatttttcatcgccttattccggaacgagcgaagatcctgtcacaggaacggcatcaggagtgatgggcgcttatatgaaaacgttcggaaaggaattctgtgaagagggccagactgattttcagatcgaacagggccaggaaatggggaaagacggaaaagtgaaaatcgaagttgcggaacaaaacggcatcatgaaagtgcgcatgacaggaaccgctgtatttgctgaaaagcaaagctttgaagtgtaa

SEQ ID NO: 984 - DNA, 579 bp, Bacillus licheniformis
atgaacgacacgctagaaatccaaagtattcgcgattgcgtcagaaatagaagaacgattcgaaagtttaaacaggatccggtgccgaaggaagtggtgctggaactcttggaagatgcgatttatgctccgaaccacaagctgacagaaccgtggcgattcatttatatcgggacggaaaacgggaaaaagaagcatgccgacaatttaaaagcggcgtttaaagagctcaagccgaatatgcaggaagaacaaatcaataagttcagggagcatattctcagcgttccggcttttctcttcgttattatgaaagaagacgaaaacgaacgggacagacgggatgattttgcagccgtcagctgtttaatccaaaatctgcagctgctcgcttgggaaaaaggcatcggcatggtatggaaaagcggggaagttctctctcatgaaacactgcacaggttaatgggactgaagcgcgatgagcaggtagcagctctcttgcagatcggatatcctgcggaaattcctgaagcgaagcacaggacgccggccgcacagctttttaccgaattaacttaa

SEQ ID NO: 985 - DNA, 195 bp, Bacillus licheniformis
atgggcagaaatgcaatccacaaaaaccgggataaaaacaagcaaaaactccctcaagttcctgatcagtataagcgagaagctgacggagtgtatgaggaatattcagcagaactcgccgatcaggatgaccgcgaagcacaagcccgcatgcaggcagctgataagcgcgcgaaaaagcggcagtcaaaataa

SEQ ID NO: 986 - DNA, 114 bp, Bacillus licheniformis
atggctgacaagaaaaaacgcgaacgttttaaatccactctgaacaagacgcaggaagtcagatattcgcgcgaatttaaaatggcagagcgcgccgcaagggaaaaatcgtaa

SEQ ID NO: 987 - DNA, 531 bp, Bacillus licheniformis
atgctgaagaaacgggaactgaccgactgctatgcactttttgaactgatgattcatccggatgtcttcccttttgtcagaaataaagcggagacgattgaagagtatatgtttcatgtcaaaaacatgattgaagaggaagaacagggaaagctgatatcgcgaacaatacttgatgaatgggaaaacccgatcggctgcatcagcttgtatgaaatcgaagagcaaaaaggcttcctcggcacatggctcggcaagccttaccatggaaaaggctataaccagcgggcgaaagacgcgtttttttgcgagcttttttatgaaaagcaaattgaagccgtttttatgaaaatcagaaaaacaaatatgcgctccctcaaagccgcggaaaagctcccatatgccgtcaagactgatcttgactgggccggcagcgatacatttcacctgtatgaaatcccgaaagatttgtacacgctgtacagcatgagaacattcgaggaggaaaacagccggttaaaagaagcttaa

SEQ ID NO: 988 - DNA, 900 bp, Bacillus licheniformis
atgaagattgcgattgccggggggacaggttttatcggcagacatttgacaaacgccttaaccgcccggggacatcacgtctatattttaacaagaaaaccggccgaaaccgaacaaaaaaacacttctttcgttctctggcaaaaaaacggcgcccgtcctgaaaaagatctgaccgatatcgatgtttggatcaatttagccggaaaatcgcttttcggccgttggaatgaaaaaacgaaggcggagatcgcgacaagccgcctccgctctgtggaggagtcggcccgcatcatacaaagtcttcagaagaagccgaacaccctcattcaggcgagcgcagtcggaatttacggaaccagtcttgaacagacattcacggaggaatctccagtttcggctgaggattttttaagcagaacgacagctttgtgggaacaggcagccgaaccaatcgaagcgcttggcatccgcaccgtctggatgcgttttggccttgtgcttggaaaagacggaggcgcgctcccgaaaatggcgctcccctatcaattgtttgcaggcggacgcatcggctcggggcggcaatgggtgccatggattcatatcgaagacgccgtcggcatgattttatctgcgattgaacagacgctgatgtccggccccgtcaatgtcacggcaccgaatcccgttcagatggatacattcgggcaaaccgtcgcgaaagtagaaaaacgcccacactggctcccggttcccgaatttgcgataaaaggcgtacttggagaaatgagcatgctcgtgctgaaaggacagcgcgtcctcccgaaaaaagcgcttcagaacggctatcatttcttatatcccgatctggaagatgccctgcacaaccttctggcataa

SEQ ID NO: 989 - DNA, 792 bp, Bacillus licheniformis
atgccatatattacaaagatttctgcccagaaaaacaatgaagagcgggtcaatatttttctggatgaaaaatatgcgttcagcgtcgacctggacgtgctcgtcaagtttgacctgcgaaaaggcaaagagcttgatgagcttgatatcattgagattcaatacggagacgacgttaaaaaagggttcaaaaaagcgctcgattatttgtcataccggatgcgctcgacaaaggaagttcaagaccatcttaagaaaaaaggcgtcgcagactccgcgatcacagaaattctgcatatgcttaaaggttataaatatttggacgaccgcgaatttgcggctgcatatgtcagcacccacagaaaaacgagcggcaaaggccctgatgtcttattcagagagcttaaattgaaagggatcgatgatgaactgattcatgaagcgctcagttcgttttcgttttccgatcaggtcgaggccgcggtcaagcatgcggaaaaagtactgaaaaaagaaaaaaagctgtcctccaaagagacgaagcaggccatcgaacagcaccttgtcagaaagggtttctccttcgatgtcatttcggccgcgcttcaggaaaccgattacgaaaacgacgatggcgctgagagagaagcgcttgagaagcaaggagaaaaagcaatgaagaggtacggttatgacggatcatacgaaacgaaaatgaaggtcaaacagtatctgtttagaaaaggattttcaattgacttgattaaccaatttttagatgaaaagggatga

SEQ ID NO: 990 - DNA, 315 bp, Bacillus licheniformis
atggagaaaagatacagtgaaatgactgcacacgaactgcaccaggaaattgcgggtctgaccgaaaaggcaagaaaagcggaacaaatggggattgtgaatgaactggccgttcacgaacggaaaatcgcgatggcgaaagcctaccttcttgatccggccgattttaaagccggcaacgtatacgaaatcgaagatgggggcgacgatttccatatccgctatttaaacggcgtattcgcctggggataccgtctttcgtcaccggatcatgaagaggctctgccaatttctttattaaaagaaaagggctaa

SEQ ID NO: 991 - DNA, 171 bp, Bacillus licheniformis
ttgtgtgcaaatcgcaaaccgtatacaaacgattttaaccagatgaaaacgcaaaactatccgcagccatgggcaaacacaaagcatgcgcgcgcacaggtgaacggagaaacgcagcagactcaggacctcatcattctccagcgcaacacgcgcatccggacaagatag

SEQ ID NO: 992 - DNA, 150 bp, Bacillus licheniformis
atgcgaaataaatcaagaggctttccgaacatgaacaacaataaatttgaaggcgagccccgggccaaagatgattttgcttcaaagcgccctgacggaagcacaaatactcatcctcaagaaagaatgagggcttccggcaaacgctaa

SEQ ID NO: 993 - DNA, 270 bp, Bacillus licheniformis
gtggaagagtactttgaaaaactgacaaatgcgcttcttgaaaaaaatcatatgctgagctacgcacaagccagaacatgggttgaactgctgtggggcgatttcgaggcgacatttgcaaaggccggccacccgtacagaggaaaagagctgacagagcgagtcgtcaaagagtggattgagcactacggcagccagttgcatttatttcaaaatgacaagccttcttaccaggatctgttctccggagcccgcgggctgcttcattaa

SEQ ID NO: 994 - DNA, 198 bp, Bacillus licheniformis
gtgaagctgtcatgcgaaaacggccggcggcggagccagatccggttttcgcccgatgacaaagacttgctcccttttgcccgaacatatcaaggaaacggatttgattgcggcggcggggtttggcccctaacaatcagtcctgatgcaagttctcttgcggctgctttggtttcggggaagattgaacttatgtga

SEQ ID NO: 995 - DNA, 960 bp, Bacillus licheniformis
gtgaagaaaggattcgtttcaatcattattccttcatacaatgaagcaagcaatattaaattgatttatgaatcgttaaggaacgaatttcaatccattgattatgattatgaaatttattacataaatgatggaagcactgatcgaacattggaggaaattaaaaaactagccgaaaaaagcgagcatgtgaaatatatttcgttttcacggaatttcggcaaggaggcagccatccttgccggttttcagcatgcccgcggcgatgctgttgtggtgatggatgcggatttgcagcacccgacatacctcctgcacgattttattaaagggtatgaggaaggctatgatcaagtggtcgcccagcgcaacagaaagggagacaaccccgtgcgctcctatttgtcatccctttattaccgctttatcaacaatgcggtagaggttgatttaagggacggcgtcggcgattttcgtcttttaagcagaaaagccgttaatgcgatgctgaagctgagcgaaggcaacaggttctcaaaagggctgttttgctggatcggttttgaccaaaagattgtttattacgagaacgtcgaaaggaaaaacggaaaatcaaagtggtcgttccgccacttgttgaactatggaatcgacgggattgtgtcgttcaacaacagaccgctgagaatgtgtttttacgccggtatttttatcctttttctatcgcttatttatatcgcggccacattcatcaggatcttaaaatacggtgtgattgttcccggctattttacgattatttccgccgtcctgtttctcggcggcgttcagcttctcagcctcggaattatcggcgaatacatcgggcgcatttattatgagacgaaaaagcggcctcattacttgatacaggaggcaaacatcgctcatggagaaactcatgaaaatcgtgaatcctga

SEQ ID NO: 996 - DNA, 402 bp, Bacillus licheniformis
atggagaaactcatgaaaatcgtgaatcctgaatttattcgctttgccgttgtcggtgtagtgaatactttgaattactatgcggtttatttgctgctgcatgttttgcttcagttgaattatatggtttcgcatattgcagcttttttcgtcagccttgtgatttccccttttctgaactgctattttacttttaaaatcaagccgacgctggcaaagtttttgcaatttccgctgacacagctctttaatttgacggtatcttctttgttcgtctacacgtttgtgaattttttcaagatgaacagtgaggcagctccgcttgcctccatgtttttaaccgttcctctgacatttttagtgacagggaagattttgaaaaaagacaggggaagagtatga

SEQ ID NO: 997 - DNA, 2586 bp, Bacillus licheniformis
atgaagaaaacagtttttctatttgtgatcgcaagcattgcagtttccgtggccgcccattctttttttctgtatgaatgggcgcatgaccgctatatgacggggaacggcgacggacttgcacaaatgatcatttttaagtcgtttctttttgagcaatacaaacaagggaacttcttttattcgtattctttcggtctcgggggcggcatctacagccagctcggctattatttcacgacttcttttgtcttcatcgcttcattcgcggccgtttttctgatgcagcttttgcatttggccggggatgcggatcctttgttttgggcgcaggccgccgtattcatcagtgtcatcaagctcagcctgatcattttagcggcagcgtatgcgttaaacggtatggtgaaaaacaagcttgccgcctttacgggtgcggttttgtacggcacatcggtcatctatttcaggcacacggtgttctgggaatttttcagcgacgccatgctgtggctgccgctgcttgtcgccggagccgagaaagtcatcagagaaaagcggacagcactgtttattaccgcttgttctttgacgctgatcaataacttttactttgcctatatcaacttgattttcattgcgatctatatcatcttccgctggctgatcaggcttgacccggaaaaggaggcgccgaggtggaaacaattcagaatgttcgccgcttcaggcctgatttctttcggaatcagcgcgatttcctttgtgcctgcagtttacggctttttaaacaatttgcggccgccgtatgaccaggctgtcgctgtatacgatctgacggacaacattctgttttccagccgcattgtcttgctgccggctgtctttatgctgttcttgttcgcattttccttctataaaaataaaacgttcaggctgtttgcctcaatcagtgtgctgcttgtgcttctgcattacagcccgcttgcggcaagcgcattcaacggtttctccgctccgcagaaccgctttgaatacctgctcgcttttacgatcgggggagcggcggccgcaggaatgaccgaactgaaaaacatcaggcggaaagagatgatatggtctatcctgcttgtccttctggtttatatcgcggtcatttggcggaaagacttggatttatcacttatgcaaaattggagcattattgtgcttctgttcctgacaatcgccatatttacggcggcggggtttcaatataagaaatcgcagctttttttgcacgtctgcattttattatcgtccgtcctcgtggcgaacacgtatcaaaagtatgttctgtctgagtcaagcggcattaaaaacgtcacgaaaagctatttgaccagcaatgagtacaatggcgaagaacagcgccgcctcctgaacaacattcgaaaagacgataagggtgacccctatacaaggatcgactggatgaacggcgtccgcaacaatactccgctgatgcaggattttaacggcttcagcgcctactcaagcattctcaatcgcgatcttcttctgttttattgggaagaccttcaaatcgatatgggaagggaaagcgtcagccgctacgcatcgatgggcgaccgggccaacttgtacagtctgctgtacggcaagtattacatgacggaaaaagacaatgccgccaatgttccgtacgggtttattcaaacggatgaatcagagcactacacagtttataaaaacaaatacaccttgccgtttatccggacggcgcgaacgttgtttacggaaaaagctttagcagatgcgccagttttagcgcgggagcatgcgatgcttgaaggaatcgtgcttgagaatggcggtaacggaaaagagcagccgccgagcgttcctgatttgatgaagcagacgaagctgaaaaccgagggggcgagctatcataacggcttcctcgacgtcaccgctgaaaacggaggcatcgatctcattcccgaaggcggggttccaaaagaaggcgactattatgtcggattttatttaaaaagccttgcaaaagaccagttcttcaacttgcgggtcaatgattatgtaacatcaagaaagtcaaaccagtcgatttacaaaacaggtgtttacgatttaacgatcagggtgccgaaaacagataaaatttcaatcaggctgccaaaagggaaatatcaattggaccatttgaggctgcaccaggaagactatcaattgctgaaaaaagccgccgccaaaaaaacgccggccgccgacttgaactggcggaacaatcaagtgtccatcagctttgacaatcaaaacggagaccgctacatggtgctgccggttccgtacgaaaaaggctgggaagtcactgtaaacggaaaaacgcaaaccgttcaaaaggcaaattacgcgtttattggaatccccatcgaaaaagggaagaacaacatccgtctcgtttattacccgccgtacttcaaagctaccttggcggttacagtcatcagcctcatcatcggaatctggtacagcagaaggagaaaaaagcttggctcttaa

SEQ ID NO: 998 - DNA, 984 bp, Bacillus licheniformis
atggatactggcacacatgttgtcatgggcgttgcactcggaggcatcgcgacgcttgatccagttgtcggaatggacccatcaatggctcaagccgtgatgattgcgacaatcgccggatctcaggctccggatatcgataccgttttgaaattgaaaaacaacgctgtttatattaggcaccacaggggattcacccactccatccccgctgttctcgcctggtcgctgatgattccgggcattctcatgctgttttatcccgaagccaatctgcttcacctgtggctttggacccttgccgcggtcgcgcttcatgtgttcgtggatatttttaacgcatacgggacacaggcggtcagaccgttttcaaggaaatgggtagcgctcggcttgattaatacatttgatccgtttatttttgtcagccatctcatagccatcgccttttggctggcaggcgcgcatcaaggctatacatttttggctctttacatcgtcttggccggttattatctggtgaggtatttcatgcagaggaaaatcaagcatgagctccgtgaaaaaatcgatgatattgaagaaatcattatttcgcctacgatgaaattcaggcaatggcgaatcgccgtcaaagcaaaatcggctttttacgtcggacggagcatggatggaaacgtcgtgatcgtcgacacattcaacagggtgcctttaccggatacggatgtgatgaaagcggcgaaacaggataagaacatttcggcgtttctttcgttctcaccggtttacaaatgggagatcgatacgtataaggatcattacgaagtccgctttatcgatctgcgataccgcagcaaaggacactaccctttcgtggcgatcgcacacatcgacagggacacgctcgaattaatcacctcctataccggatggattttcagcgaggaaaaacttcaaaaaaaattaaagcttggctctgtttaa

SEQ ID NO: 999 - DNA, 1083 bp, Bacillus licheniformis
atggatctgcaaaagaaattagagcaaaaaaacatcaaacaatttcaagaagatttaatttcttggtatgagcaagaaaaacgggatctgccttggcgctcagacagcgacccttataaggtgtgggtgtcggaagtaatgcttcagcagacgagagtggacacggtgattccttacttcaacaactttatcgaaaagtttccgaccgtggaagcgctcgctgaagccgacgaagaaaaagtgcttaaagcctgggaaggactgggatactattcaagggttcggaacttgcagagcgctgtcagggaagttcacgaacgatacgggggtgtggtccctccttcaaaagaggaattcggcagcttaaaaggcgtcggcccttatacaagaggcgcggtgctgagcatcgcctacaatcagccggtccccgcggtagacggaaatgtcatgcgggtcatgtcacggattctttccgtatgggatgatattgcaaagcctaaaaccaaaaccctgtttgaaaaaattgtcgaagcgtttatttctgaggaaaaaccgtccgagtttaaccaggggctgatggagctgggcgctgtcatctgtacgccgaaatcgccatcatgccttctctgcccggtccgagagcactgttctgcttttgcagaaggctgtgaaaaagagcttccggttaaaagcaaaaagaaaaaaccttcggtaaaaacccttgcagctgtcgtcctgactgatgaagaaggatacatctatatccataaaagaccggcatcaggtcttttggcaaacctttgggaattcccaaacacagaaacgcagaaaggcctgaagtacgagcgcgagcagcttgcggcgtttttgaaagaagaggccggaatagaagctgaaatcggtccgctcgaaggagtcgtagagcatgtgtttacacaccttgtctggaacatttctgtctttttcgggaaaactctcgatcaaccggatgattcatactttaaaaaggtcacgaaagaagagcttgctgaatacgccttcccggtttcgcatcagaaaatatggaatatgtatatgaaatag

SEQ ID NO: 1000 - DNA, 225 bp, Bacillus licheniformis
atgtacgtaggacgcgatatgagcgagctcgaccacacgccgaaaaacgagtggaaagatgcggagcttctctattttcaccgcgccttccagcaaatcatgccatttctcaatgaagaagggcatgccgagtacctggaggttgtgaaagaaattcaagcaagaggcggactgtgccgccaggaagccgattatacgcacggcaccaccatccagtacgactaa

SEQ ID NO: 1001 - DNA, 753 bp, Bacillus licheniformis
atggaacaaagaaaatgtgcccttattacaggaagcagccgcggcgtcggcaaagcagcagcgctgaggtttgccgaaaacggctacaatatcgtcatcaactatgctagaagcaaaaaagcggcccttgagacggctgaagaaatcgaaaagctcggtgtcaaagcattggtcgtcaaggcgaatgtcggacagccggcgaaaataaaagatatgtttcagcaaatcgaggaggcgttcggcagactggacgtgttcgtcaacaatgctgcatccggcgtattgcgccctgtcatggagcttgaggaaagccattgggactggacgatgaacatcaatgcgaaagctctgctattctgcgcgcaggaagcggcaaagctgatggagaaaacgggaggcggccacattgtcagcatcagctcgctcggttcaatccgttatttggaaaactatacgacagtaggcgtttcaaaagctgcgcttgaatcattgacgagatatcttgccgtagagcttgcgcagaaaaacatcatcgttaatgcggtttcgggaggcgcgattgatacagacgccctgaagcattttccgaaccgcgaagagcttctggaagatgcccggcaaaatacgcctgccggccgcatggtagagatcagcgacatggtcgatgcggtggaatttttaacgtcagggaaagcggacatgatccgcggacagacgatcattattgacggcggccgttcactgctcgtataa

SEQ ID NO: 1002 - DNA, 165 bp, Bacillus licheniformis
atggctaaccaacaatccaaaacaaacgcacaaaaagtaagacaacaaaaccaagcttctgcacaaggtggtcagttcggcactgaatttgccagcgaaactgacgcgcagcaagtaagacaaaataaccaacaagctgagcaaaaaaaacagcaaaacagctaa

SEQ ID NO: 1003 - DNA, 246 bp, Bacillus licheniformis
atgccggaatttgaaaatttggttcaggggcagatggagattatggataagctgttgtatctgcaagcggagattgaaagatgccagaaaattgaaaaagaactggctgcccttgaaaagaaagcccagcttttatcgatccgggaagatatatcccagaagcggaaagatcttgctcagattcaggatttgttccaaaagcagacggagcaggtgattcaggcttatcaaagaatcgaggcatga

SEQ ID NO: 1004 - DNA, 531 bp, Bacillus licheniformis
atgggctttcccaaggaaggagaaaccattcaaattcatagctataagcacaatgggcagattcatcggatttggaacgaaacaacgattttaaaagcaacggaattgtgcatcatcggcgccaatgaccggacaatggtcacggaatctgacggccggacatggatgacgcgagagcccgccatttgttatttccatgcaaagcagtggtttaacgtcatcggcatgcttcgtgaagacgggatttattactattgcaacatcagctcgccgtttgctttggacgatgaagccatcaaatacatcgactatgatttagatgtaaaggtcttcccggatatgacgtatcatattcttgatgaagatgagtacgcggatcataaaaaggcgatgaattatccgaaggaaatcgacggcattttaaggtaccacttaaatacgctgctgcattggatacaccaaagaaaaggcccgtttgcatctgaatttattgatatttggtatgaacggtatttgcattatacaaaataa

SEQ ID NO: 1005 - DNA, 1743 bp, Bacillus licheniformis
gtgggggtaatcagaaggtacatggaatttgtgaagccgtataaatggaaaatcgttttgacggttttaatcggtattattaaattttctattccgctggtcatcccgcttctgctgaaatacgtcgtggacgacatcatccaggggagcgggactgctgaggaaaaaacatccacattattcatggtaatggcggttatgttcgccatttttttggtgcttcggccgcctgtcgaatattaccgtcagtatttcgcgcagtggacggcaagcaaggtgctttatgatatcagggacaagctttttgcgcatatacaaaagctgagcctcaggtattatgcgaacacccgcgcaggagaaattatttcaagggtcatcaatgatgtcgagcagacgaaggaattcgtcatcatcggattgatgaatgtatggcttgacgtgatgacgatttttatcgccatcgccattatgatgacgatggacgtgaagctgacgcttatttcgatcgtgctgtttccgctttacggactgtctgttaaattcttctacggcaggctcagaaagctgacgagagaacgttcccaagcgctggccgaagtgcagggccatcttcatgaaagggttcagggaatgcctgtcatcaggagttttgcgatcgaggattatgaacaaaagcaatttgatcacgagaacgggaattttctcggtaaagcaatccgccatacggcctggaatgccaaaacctttgccgtcgtcaatacggttacagacctcgctccgctgatcatcattacggttgcaggttatcatgtgattcacgggaaccttactgtaggaacgatggtggcgtttttcggatatatcgaacgcctctacaacccgctgcgccgcctgatcaattcctcgacaacattgacgcagtcgatcgcatcaatggacaggctgtttgaatttattgatgaaccgtatgatttaaaagataagcccaatgctgtaaaagcagagcgattaaaagggattgttgaatttaaaaacgtttcctttcaatacgaaaaatcggaggaaatgattttgcaggatctttctttgaaagccgaacggggcgaaacggttgcgctcgtcgggatgagcggaggcggcaaatcgacgcttgtcagcctcattccgagattctacgatgtctcagccggaagcctggagatcgacggcatcgatgtgcgcgattatgaggcgcgaagccttagaaaccaaatcggcatggttctccaggatacgtttttattcagcgaatcggtacgcgaaaacatatcgatcgggaatcccgaagcttcgatggaagacatcattgaagcggcaaaagctgcgaatgcccatgattttattatggagctgccgcaaggctatgatacaaaggtcggagaaaggggagtcaagctgtccggaggccaaaaacagcggatatcaatcgccagggtgttcctgaagaacccgccgctcttaattttggatgaagcgacgtcagcgcttgaccttgaaagcgagcactatatccaggaagcgatggaaaagctcgcgaaagaccggacgacctttatcgttgctcacagactgtcgacgattacccacgctgacaaaatcgttgtcatcgaaaacggacgtgtcgcggaaatcggcacacatgacgaactaatgagccgcgacgggcactataagcatttattcaccattcaaaaattaaactaa

SEQ ID NO: 1006 - DNA, 981 bp, Bacillus licheniformis
gtgacaaaagaaaaattgcttgaagtatcggatttatcgatttcgtttcaaaagaaaaagtccgaaaccccgattgtgcaaggcgtttctttcgatctccatcccggagaaatcatgggagtcgtcggagagtccggctgcggcaaaagcgtcacctctttggctttaatggggctgaacgcaaacacccggacgacgggccggatcaagtttcaaaacaaagaccttctcatgcagtctgaaaaagaatggagacagatgcgcggcaatgacatcgcgatggtttttcaagagccgatgacctccctaaatcccctttttacaattggcgatcaactaacagaagcactctccagccataccaatattcataaaaaagaagcaagaagaaaagccgttcaaatgctggataccgtcggcctgccgaggacggaccagctgatgaagcaatatccccacgaactgtcgggaggcatgaggcagcgggtcatgatcgcaatggcattaatttgcgaaccgaaactgctgattgccgatgaaccgacaacagctctcgacgtcaccatccaggctcagattctgtcccttttgaaaaaaatgaatgccgaatttaacacagccattctccttattacccatgaccttggcgtcgttcacaatacatgtgaacgcgtgatgatcatgtatgccgggcggatcgttgaagaaggcggtgtcaccgctgtttttgacagcccgaaacacccctatacaaaaggcttgttcgcctctattccggcattcacaggcaaatccgagcgtctgtcttcgattgaggggcaggtgccgaaaccggggtcgataaaaaaaggctgtatgtttgcgccgaggtgccctcataaacgcgaacgctgcgtagaggaggagcccggattgaacaggctggcggatgaccatgctgtaagctgctttctctacgaagaggaaggtgctttcacatga

SEQ ID NO: 1007 - DNA, 957 bp, Bacillus licheniformis
atgaatcatgaactgctgaacgtccaagagctgaaaacgtattaccgcgtgtcccgcaagaaaatcgtcaaagcggtcgatgatgttacactgtcagtcaaaaaaggcgaaatcgtagggatcgtcggggaatccggctgcggaaaatcaaccttgggaaaatcgatactgcggctgaccgaaccgacttctggaaaggtgacgtttctcgggcgggagatgaccggccttgatgcaaaacagcttcgcaacatgagaaggcatatacaaatgatttttcaagatccgtacgcttcattgaatccgcgcatgaaaataaaagatattttggaggaaccgctgatcgttcataaactcggaacgaaggcggaaaggagagaagtcgttcgctcgatgcttgaaattgtcggtcttgatgcttcatacggcgaccgatatgcacaccaattcagcggcggccagaggcaaaggatcggtattgcaaaagcgctgatcacaaagccgaaattaatcattgccgatgagcctgtttccgcgcttgatgtatccgttcaggcgcagatcttaaatctgctgtctgatctgcagaaggcattcaatttaacgtttctgtttatttcgcatgatctcggggtcgtccgctatatcagcgacagggtagccgtgatgtatttcggaaagattgtcgagatggcggacgccgactctttatttagagaaccgaaacacccctatacagaaacactgttagcggcagtacccgtcatcggcaaaggagaggcggttcatacggcgccggatattgccgcgccccgcatgagtgaaaagggctgtcctttttacagccgatgcatgaagcgggcggacgtctgccttgaagcggagccgcttcttgaagagactgcggacgggcattatgctgcatgccattttaccaataaggaggctgtacgatga

SEQ ID NO: 1008 - DNA, 1599 bp, Bacillus licheniformis
atgaaaaagaaaagctggctgatctgtttgggaatgattctgtctgtttccgcttttttaatgggatgctccggtaacgaaagcggaaagaacgacggagggacgaacggcggaaaagatacgctgatcatcggcagaggaggtgattcgacatcgcttgatccgatcacaacgacagaaggcgaagcgtttaaagtgacgatcaatatgtttgagaccttgctgaattacggggaacaagacacaacgctgaaggaaggcctcgcggtgaaatgggacgcttcagatgacggtttgacctacacattggagctgagaaaaggcgtgaaattccatgatggaacggattttaatgcagaagccgtcaaatacaattttgagcggtggatgaacggggatgaagaaaaatttccttactacggcatgttcggaggctataagaaagatgaggggcacgtcatcaaagacataaaagttctcgacgaccataagattcagttcattttaaaacgcccgcaagcgccgtttttaaagaaccttgccatgacttctttcgggattgcaagtcctgccgccattgaaaaatacggcgaaaaattcagggagcaccccgtcggcactggcccttacaaatttgtcgaatggaagccgaacgaccggatcgtccttgagaaaaatgaagactattgggatcaaggcaaaccgaaattgcagaagatcattttcagagccattcctgaaaactcagcccgcttaaatgcattgaagacgggcgaaatcgacctaatggatggcgtcaatccgtctgatatcgaaagcatcaaagcagacgccaatctgaaaatatttgaaaggccttcaatgaacgtcgggtatctcggaatgacaacgacgagaaagccatttgacaataagctggtccgccaggcgctgaaccatgctgtcgataaacaggcgattatcgactccttctacggaggtctcgctgaatctgcaaaaaacccgcttcctccgtcgctcgaagggtacaacgaccaggttaaggaatatccgtatgatttaaaaaaggcaaaagaactcttaaaagaagccggctacccggacgggtttaaaatgaagctttgggcaatgccggtaccgcggccgtatatgccggacggtatgaaaatagccgaagtgattcaatcaagctttgaaaaaatcggagtcaaagcggaaatcgtcacttacgactgggcgacgtacttggataaggtgagcaaaggggaagctgatgcgtttttaatgggctggaccggcgacaacggagatccggacaacttcatttatacgctgcttgataaagataatatcggcggtaacaactatacgtacttcagcaatgatgagcttcatgacatcttaatcgaggcgcagtcagaccctgatcaaaagaaaagaaataaactgtatcaagatgcgcaggagctcctccatgaagaatcgccttgggttccgcttgtccattccacgccgattttggccggttcaaaagatatcgacggatatgttccgcacccgacagggagtgaagtattgtccggcgtagagtttaaatag

SEQ ID NO: 1009 - DNA, 1002 bp, Bacillus licheniformis
ttgcttgcgtactgtttaaaacgaacggccatgctgatccccgttctcatcggcatgacattggtcgttttttcgatcatccgctttattcccggcaaccccgcccaggttattctcggccagagggcgacaaaggaagcggtgcagcagctgaccgtccagctcggccttgatcagccgtggtatatgcaatatgccagatatataggggatttgctgaaaggggatctcgggacatcaatccgcacgggagcggcgattacgcaagaaataaagccatatttgttcgccactctcgaacttgcctttttcgcgatgctgatcgcagtgtttgtcggcgtgaatgccggaatcatcagcgcgtggtttaagaactcggtattcgactatatcgcgatgctggtggctttaatcggcgtgtcgatgccgattttttggctcggtttgatgggccagtggtttttttcgatcgagctcggctggctgccgacaacaggaagggagaatgtcagaaatccggtcgaagccattacgtacattcatacattggacacccttttgcacggaagatttgatcagtttgcagaagccatccgccatttaattctgccgggaacggctcttgccaccattcccgcagcgatcattgcgagaattacgagagccagcatgatagaggtgctgcagtccgattatatccgcacggcaaaagcaaaaggcgtgcatatgtttttcgtcatctataagcacggtttaaaaaatgcattcattccggtattgaccgtcatcggcctgcaaaccggactgttactgggcggcgcaattttaacagagactatttttgcctggcccggcatcggccggtacatttatgatgcgatcagctaccgcgactacccggttatccaatcgggcatcctcgtgatcgccttcatcttcgtcatgattaacttcatcgttgatctgctgtacgccgtcatcgatccgagaattaaatattag

SEQ ID NO: 1010 - DNA, 891 bp, Bacillus licheniformis
atggttgtgcttcaaaatgaacagcagagggaggacgtgaaggtgcgttcgcctttggcggaacatattcggcggttttttgagcataaattggctgccgccggcacgattctagtcgcgctgtttatcctgctagccatcttcgcgccgctcatcgcaccatacggaataaacgaccagtcactgtcagacaggctcgccgctccgtctgcggaacacctttttggcacggatgactttggcagggatattttctctagggtgctttacggcgcaaggctgtctttatgggtcggctttttctcctgtttggcatcggccttggcggggacgctgctagggctgatcgccggtttttacggcagatgggctgatgcattgatttcacggctgtttgatatcatgctcgcgtttccgagcattctgctggcgatcgccattgtagcgattctggggccttctcttgaaaatgccctgattgccatcgccatcatcaacgttccgacgtttggcaggctcgttcgttcaaaagtgctcagcatcaggcaggaggagtatatcttatcagcgcgtgctgtcgggatgtccaatataaggctgatgtttaaacacattctccccaacagcatggccccggttatcgttcaagcgacgctgaatattggaaccgcgattatagaagcggccgcgctcggatttttagggttgggggcgcaggcgccgaaccccgagtggggaaaaatgcttgcggatgccaggccttacttggcgcaggctccatggacattgttttttccgggatttgcgatcatgctgaccgttctcggctttaatctgatgggagacggcctgcgcgacacccttgatccgaaaatgaaggaaggaaaataa

SEQ ID NO: 1011 - DNA, 1071 bp, Bacillus licheniformis
atgaaacttggtgcccgtattttcaaaacaggcattgccattacgcttgcgctttacctcgcgtcttggctcggccttccgactcctgtcttcgcgggaatcgcggctatcttcgcgatccagccttcgatctatcgttcatttttgacgattgtcgatcaagtgcaggcgaacattatcggagcagccacagccattatttttggacttatttttgaacccagtccgatcatcatcggattgacggcggtaatcgtcattacgatcaacttgaagctgaagatcgagaacacgatttcgatcgctcttgtcaccgttattgccatactggagagctccggcgacaactttttatggtttgctttggtgagaaccggaacggttattttgggcgtgttgtctgcgttcttggtcaacctgatttttctgccgcctaaatatgaaacgaagctcgtcagccatattgttgaaaatacagatgaagtcattaaatggatcagattgttgacgcggaagacaacggaacattccatgctgaaagaagacattgaaaaactgaaagaaaaaatgatgaaggttgaccacctttacttgctctacaaagaagaaagaagctatttaaaacgttccacatatgtaaaacagcgaaagctcgtgctgttcagacaggcgatcattgcatccaaccgtgcgcttgatgccctgaaaaagctgcaccggcttgaaaacgagttttatcacatgcctgaagaatttcaagaaacgctggtcgaagagctcgattatctcctccattggcacgaacgaattttaatgagattcgtcggcaggatcaaaacgcaggatcacgtcgacctgcacgaagaaggagacgtgtacaaacagcacttgaccgaatcattcctgaaaaaccaggacaaattaaaagaagaactgttggactacaatatgctgaccattatggcgagcactgtagaataccgagaacagcttgagcatttggaaaccttgctctcaagctttcagacgtaccacaaaaaagacagcgagcttgaagttgaggaagaataa

SEQ ID NO: 1012 - DNA, 1299 bp, Bacillus licheniformis
atgcagcatactcaatctgaaaagcttcatgaagaagctcttcaacatatagtcggaggcgtcaacagcccctcaaggtcttacaaagcggtcggcggaggttctcccgtcgcgatggaaaggggaagcggcgcttatttttgggatgtggacggcaacaaatacatagactaccttgccgcgtacggaccgattattacgggccacgcccacccgcatatcacgaaagcgattcaaacagctgctgagaacggggtgctttacggtacgccgacaaagcatgaagtgacatttgccaagatgcttaaggaagcgattcctgccttggataaagtgagattcgtcaattcgggaacggaagctgtgatgacgacgattcgcgtcgcccgggcctatacaggcagaacgaaaatcatcaagttcgccggctgctaccacggccattccgatcttgtgctggtggcggccggttcaggaccgtcaacgctcggcacgcctgattccgccggggttccaaaaagcatcgccaacgaggtgattaccgttcctttcaatgatatcgacagctataaagaagcgctcgataaatgggggaacgatattgcggcagtcctcgttgaaccgattgtcggaaacttcgggatcgtcgaaccgaagagcggattcctcgagcaggtcaatgaactgacacataaggcgggagccctggtcatctacgatgaagtcattaccgctttccgctttatgtacggcggcgcccaggatcttcttggcgtcaaacctgatttgacggcgctcggcaaaatcatcggcggcggcctgccgatcggcgcctacggaggcagaaaagagattatggaacaagtcgcaccgctcggacctgcttatcaagcgggcacgatggcggggaatccggcttccatcctctctggcatcgcctgccttgaagtgctgaaagaaaaaggcacatacgaaaaacttgaccgcctcggcgccatgcttgaagaaggcatcctggcacatgccgagacccacggcatcgacatcactgtcaaccgtctaaaaggcgcgctcaccgtatacttcacgaacgaaaaagtcgaaaactatgagcaagccgaaaatacggacggagacatgttcgcggcctttttcaaactgatgcttgagcgcggaatcaatcttgcgccttcaaaatatgaagcatggtttatcaccaccgcgcacacggaagaggacattaaagatacgctcaaagccgtggatgactcatttaaacaattgaaacagcgcatgtaa

SEQ ID NO: 1013 - DNA, 474 bp, Bacillus licheniformis
atgactgttgaaattggacaaaaggtgcctgatattgaactgctgggcgatcacggagaaaaagtaaagctgtcggattttgaaggaaagtatgtcgtgctctatttttacccgaaagatatgacgccgggatgcacaacggaagcgtgcgatttcagagaccgtcatgaaagctttgcggaacttgatgccgtcattatcggagtcagccccgacgatcaggcaaggcatgaaaaattcaagcaaaaacacgatctgccgtttctgctgctcgtcgatgatgaacacaagctcgctgaaagctttgacgtatggaagctgaagaagaatttcggcaaggaatacatgggtgtcgaacggtcgacattcctgattgataaagaaggccgccttgtgaaagagtggcggaaagtaaaggtaaaagaccatgtcgcagaagcgcttcaagcagtaaaagaaatcgcggaagcataa

SEQ ID NO: 1014 - DNA, 438 bp, Bacillus licheniformis
atggctgaacataacctgaaagaagcgttggaagcgttgaaggaaaccggggtgcgaattactcctcaacgtcatgccattctggaatttctcgtgaattctatgtctcatccaactgcagatgatatatataaagctctggaagggaaatttccaaacatgagcgtagcaacggtctacaacaatttgcgggtttttaaggaatcagggctcgttaaggaattaacgtacggagattcctccagccggtttgacttcgtgacttccgagcattatcacgcaatttgcgaacgctgcgggaaaatcgtcgactttcattatcccggcctcgacgaagtggagcagcttgcttcacatgtgacaggatttaaagtcagtcaccatagactggagatatacggtttatgtcaggaatgcgacaaaaaagaaagccattaa

SEQ ID NO: 1015 - DNA, 114 bp, Bacillus licheniformis
atgtcaggaatgcgacaaaaaagaaagccattaaaaagagctggccgcttttttaacggtcagcttatttttgttgcagcatttactgagactttcgattatacgattcgttaa

SEQ ID NO: 1016 - DNA, 348 bp, Bacillus licheniformis
atggccaaatactctagtaaaatcaacaaaatcagaacgtttgcgttgagccttgtatttataggcttcattattatgtatgtcggggtcttttttaggtcctcggtcctcttgatgtcggtgtttatgatcttgggggtattgtctatcttgttgagcacagcggtttatttttggatcggcatgctttcaacgaaagcggttcaagtcgtctgtccaaactgtgaaaaaccgaccaagattttaggccgggttgatatgtgcatgcattgcagggagcctttgacattggacaaaaacctcgaaggaaaagagtttaacgaatcgtataatcgaaagtctcagtaa

SEQ ID NO: 1017 - DNA, 885 bp, Bacillus licheniformis
atggaaaatcttctccgtccgatttaccaagaaagagcaagccgccctgacacactcgctgtcatgctgattgagaggagaaatcaaacttcatctgcaacagataattttgatgcggcattgttgattatcgttaataaggctgaagaccctgtattcgtgaagcattatgagttcgacggaaaaacggcttctcttcatattatttctgttgaacagcttcaggaatggattctgcttggaacaaacaggagaatcatagactgggttctcaatggaaaggtgcttttcgaccgaaacgaatttatcgccaagctgattgagcagctcaatacatttccgttttcagaaagaaaactaaaaatcggacttgaatacgggaaattaatcagaagatatatagaaggaaaatcgttttttgaggacggtcaatttttggatgcctacaattccatcgtacacgccctccaccatttggccagaatcgaagtgatcgataaggggtttcaccctgaagttacggtatggaaccaagtccgccacatggaacctcaggtttataaattgtataaggaattaattgaaagcaatgaaagcttgcaaaaacggctggagttattattcctcgcaagcgattttctcattcattcaaaagccgaaataggggctgcctatattctcaatgtcatggatgaaaaatcggtttggcaatttgccgaacttcttaaacatccggatctcaagtatttcacgacagacctgggagttatactggagttcttggctgaaaaggatttagtcggagtaaagccgatagagacaaagggccaaaagatttttcaccgaggatattttattaaaaaaagtgttgacactaatttataa

SEQ ID NO: 1018 - DNA, 114 bp, Bacillus licheniformis
ttgaacagaaagcagcagcgacgaaaaatcaaaaaacatttgacacttctcgttgaaaatgttatactaataaagtcgcttcggacagaagcggaaatgatctttgaaaactaa

SEQ ID NO: 1019 - DNA, 1041 bp, Bacillus licheniformis
atgaaaacagtagcctctgtgaacgtagccaatctcatcaatcagtggtatgttcacataaaaaagagagatgtttcaaatgccgtagaacttagggacagaataaaaggccttttaaacgtaatggaagaagatcaggatgttttgctttactttaatctacttgattacaggttcagagtattaatggaagacgtcgcgggggagccgcagcttccgcctattgctgaagataaggcgaagacagacggtttgttacgatactattactttctctttaaaggaatgtatgaaagtgcgaggagcaactactctaaagcgcttaattgttttagagttgccgagcggcagctcgataatgtcgaagatgaaatcgaaaaggccgagtttcattataagcttggaaatctctattattttacgaaaacaactctactttcttttcatcatctttcaatcgcgaagagcatttatagggcttatgaagaatataagacacagtcgataaactgtacggtgctgctcgcactcaattatatagacgacggacgtttaacaagagctgaaaatatgcttaagagttgcgcagaaagactgatcaagatgggcgataatcatctgctggcggctgtctactatgctctcggctttttaaaaattcaagaggataaacatgaagaagcactcgagtatttcgacctctcatttaaaacggatgatatcgaaaaaaatgcgcctattatgtacatgcagtgcatatacgagtcagctaggtcaacttataagataggtgaggttgataaggcgcttaagtgggttcatcttggttttgagtttgctcagaaaacggataatatcaacttttcgctcaaattctcgattctaaatatatgctatagcgctcccatcgagggtgtaccgcaagtaaaagagtttatcgaaatgctcgaggagagagaggcttacgtagacattgaggcgcttgctgaggatgtggccaacgtctacagctcattaaataattacaaatattccacataa

SEQ ID NO: 1020 - DNA, 210 bp, Bacillus licheniformis
ttggaacagcaggcctttttactcacgtcagctgtattcgatcaacaccaacatcccctcaaattcattcaaaaagtgatcaatgttgagctaattctcgttgaaatcaacttcctccaccgtcttcccggacttatgaagaaaagcattatttttaaagtgcgggagccgcctgatgagtcaatctatttccaccgcgtcattccatga

SEQ ID NO: 1021 - DNA, 177 bp, Bacillus licheniformis
ttgttttcttcagttgtttttgaacaaaagcttttttcaaaggaaagaatgttcattgtcagagcatgtatgtatgtggtttatacgtttgcttggatggtcatttttgtatctttaggtgagacattaaaaaaaagtttaatttggattataacgaaaatttgtctgtacggctga

SEQ ID NO: 1022 - DNA, 177 bp, Bacillus licheniformis
atgaataaaaaaatcaaatatgaacaagtcatgaaaaatttgaagtatctattagactttattttaaataaagtatgctctggtttttttactagattcaaagttaaaagaacaaagacgtttactgcaattaatatttcagccgtacagacaaattttcgttataatccaaattaa

SEQ ID NO: 1023 - DNA, 126 bp, Bacillus licheniformis
atgatcttctgccgaaagtcacggcgggctttaaccatttcctcgcgctgcaagctcgtgattcctaaaaaggatgacgacaagccgaaatcaaaagaggaagagcggttcgtgggccggatgtaa

SEQ ID NO: 1024 - DNA, 216 bp, Bacillus licheniformis
atgcaagaggtcacctctgaaattctgattgagcgttatgggcttagcgaaaaaatactttccggtgagataaaggcttgtcaaaagcataaatgggctgtgcagcgattttttaaagatgtcgaggtgttagcggacccggattgcccctattattttgatgctgaagcggtgctggatttttacgaatgggcgcggcaggttcagacatgttga

SEQ ID NO: 1025 - DNA, 351 bp, Bacillus licheniformis
atgttgaggggatgcatcgggtatttattgccggatgctcacgggagcagacagacgaattttaccaggcaatttttgaacaggtattgcgaaatatctcggcctttgtggtggatcaagcaaccggcaacatcggccccgaaaaagaaagcacgaaaaagcaggagcaaaaaagtacccattccgcccggaatttacaaaagcctaattatgaagggaacggccgtccgacagattcaggaggctttagctgccctctatttctatccggacaaaggcgctaaaaataacggcattgatgtctattacggaacgaagacaaaggcgcagctcgagtcgctattggtttaa

SEQ ID NO: 1026 - DNA, 336 bp, Bacillus licheniformis
atggaacctgattctttattcaaaacattattaaaatacaaagatagagaacttatattagaatgggaaaatggattaagagtaattggtaaaactgatacatttttcgaaacagacaacggtctggaggatgatgatatcaattataaagaatattacgcaacggcttttcaagtaaataaggttttatctcctcccgttaataatgaagaagatagtctatataattggctattggaagagaaaaactccctagttgaaatttctctttatgaagatacaccgaataagatcttagtagacggtaacacaatatgggaattagacagtgatgaa

SEQ ID NO: 1027 - DNA, 1725 bp, Bacillus licheniformis
atgaagactcttgatgttcaggcgctgcacaatgcaatagatcaaacgctggaacaattaaaacaacaatcagacgaatcgccaaagtcaaaaaggctgttgagggcatcacatcacttgatgatgctttaaagggaaaaggcgggcgacgcgatccgcgccttttacgaggaatgccacaccccttttctacagttctatgatacttttatagaggaatacagttccgcgctgaagaaaatgaaaagcgcgctgaattccctggaaccaaaccataacggatttatttcacagtcctttctcgggcatgagttggagaatggcttgaatgccgctgatcgcacaacgaaacatttggtttctaaaaccaacgccacgatcgcaaaagtcagccatattgtcgatttaccggatttgaatgacagcggttttcatgaacaaaatcagaaagcgttaaaggaaatcagcacgactcttgaaaagctccatgcgtttgaccgcgggcaaaccaacgccctgaagacggctgaaaacgaccttgagacgatgcagagatacatcgcaaggctcgaaaaaatgtataccggtcccaaaatagaaatcaccagttatcaaaaaggcgcgattttaaagtcggatgataactctacaataaacggactacctggcggacttcagggccaactggagaatgtcgaaccgtctccgatggagatgatgcttgaaaagctcaacaaaaataaacgatctaatgtggatacggtgattagggaagacaataaagaaaatatcaatcaagacgtttatgcgaacgattttgatttgaatgcgttgcaaaacgaagcagaaaaatatccgaaggtttatggagatattcgggtcattgatggtaaactatataatcataaaggatggaaaagggtcaaaacagttgatgtcgccgatgaagtggttcaaaatccggcagacattaaatatatcggtgggcgttaccatgtatatgaaaatggtcaaatcgtaagagagtacattgtaaacggtaaagtagagatggaagctgttaaacgtattccaaaaagtcgaagccaagggaatcttaagcgagattttgaaggaactcctttagaaccagtaaatgatataggggattttgttgcaaaagaaatagcgggcggtaatgatgcggttcgggtcataacaggcagagatccggacacaggtgaaaaagtctctaatgtcgagcgtgctgcgtccggaacttctttaacacctgttggtcggttgctaaagtacgggaaaaaaaggatttaagttatttaaaggtgaagaggcgggaaagaaagttgcgaaggtagataaaacaccttcctatggcaaacaatccgtaccaaaaggtccgtaccgtgaagtaaatggtttccctgcaaaagttaaaccaggagctcaagaaaaacatattccaggaacaccaaattataaacaagaagttgcaaatggcagaaccaagagtatcttctacggggataataaaaaagcgcaagagttgcttgataaatatgctggcacaggagatatgttaaaaaaaggaaacaaagaaagagtggattttggtcaagtaataggaaaatactataatacagagacccgtaaatatgaagagactacaagaggcatgatacattatggaaaaaacggcgctcatatagtaccttcacaaccgtctta

SEQ ID NO: 1028 - DNA, 347 bp, Bacillus licheniformis
ttgtttaatatatattgtgatgagagttgccatttagaaaaggataatagtgatgtaatggtattaggagaaatgaaagttggtgctcgttttcttcctgatatctataatcgcattcgtcaaattaaagttaatcatggtttaagctcttggtttgaagtaaagtggacaaaagtttcaatgagtaaaatagacttttatttagatttaattgattatttttttgatactgcagctttaagttttagaagtgttgtagctacaggaaaaaaagaagttagaccacaatacatataatgaaagtgattatgataattggtactataaaatgtattttcaattgttaa

SEQ ID NO: 1029 - DNA, 441 bp, Bacillus licheniformis
atgtgggatcttaaagaacaaattttaactgccgctaagtcagttgacattaaggtaaatgaattatcaacaaatgatacagaaatcatatttcataatttggctaataaatacgcgaatgggaaaaagcattttccgttgtgggagtttgtagagaaagatttttctgtacaaaaccaagatgcttggcaatggatagccgattatattgcagattctgaagcaattctaatgtttaacccttcagatgaaaaatcttcctataaaattgatggggggaataatgtagtaaagatattatctgaaatgtttaatgtcgaattctatgtcactaataaaaacaatgattatttattaagttttaaccatcacgatatactaagtgcatgtggaaatgcaaaagaatggttaaaacagtataacccccagcaacaagattaa

SEQ ID NO: 1030 - DNA, 1559 bp, Bacillus licheniformis
atgaagactcttgatgttcaggcgctgcacaatgcaatagatcaaacgctggaacaattaaaacaacaatcagacgaatcgccaaagtcaaaaaggctgttgagggcatcacatcacttgatgatgctttaaagggaaaaggcggcgacgcgatccgcgccttttacgaggaatgccacaccccttttctacagttctatgatacttttatagaggaatacagttccgcgctgaagaaaatgaaaagcgcgctgaattccctggaaccaaaccataacggatttatttcacagtcctttctcgggcatgagttggagaatggcttgaatgccgctgatcgcacaacgaaacatttggtttctaaaaccaacgccacgatcgcaaaagtcagccatattgtcgatttaccggatttgaatgacagcggttttcatgaacaaaatcagaaagcgttaaaggaaatcagcacgactcttgaaaagctccatgcgtttgaccgcgggcaaaccaacgccctcaaaacggctgaaaacgatcttgagacgatgcagagatacatggcgcggctcgaaaagatgtataccggaccaaaaattgaaataaccggctatcaaaaaggttcgattttaaagccggatgagatggataccttgagtggaaatcaagaaacagcgatgggtgtcatgttgaaaaaagtcggagacaaagaagatgcggacattaacactctcgccgatccagatcgattaaaaaaattggcgacacaagtgtccaaaaaagtgtatactgacgaagaattagaaaacctgagtgaaaaagaattagaaaaactaaaaaaggtttataaatatgtgaatggtcataaatactgttattatttagatggtaaatatgtcgtcggcatacagttggttgacgatcctcctgcagaggataaagaagtaagtgatttagagaaatattcaagaattggcttggagctcttaggtgaaagtgactttgaacgagctgcattgggatatgatcctgatacatacaaaaagctttctctctttgaacggttcgaggccgctgttaatttaacgcctccattgaggattgtcaaatggattcgcaagggagataagctagcaaaagtttcgaaggtggataaaggggctaaaacagctggagatgttggtaagaagaccgctcccgttgcaaccaaagaaaaaaacactaagctgggaagtataacaggatacaagtttaaaaaaggtatagacttggatattagaggaacaggtaagacatataaagatgcattagatgaagcctttaaaagaactggagtacctaaaaaagaatttaaagttacaaaatggggaaaagacgaaaatggaaaatcattccctgttgaatggagatctaaaaatggggcggaagttaatatagatgttggccataccaaaaacggcccggatgttcctcacactggatatcaaaccgctgggaaaagaggtggcggaggagcaattagaggtcatattttagtagactcagtccctataaacagataa

SEQ ID NO: 1031 - DNA, 1119 bp, Bacillus licheniformis
ttggagactatcccgtcttcagaagttggaatcaaaataaaccgctggtacaacgaaattcaaaaattaaacgtaatagaagcagaacgattaaaggcggaagttcacttagctatagaaagaatggaagaagatcaggacttgctttcctattatcagcttatgaattttagacatgagttaatgttggaatatcttttcccggcagaaaaaaagctgagcaaatctgattatcttagggaaattgagggacagggaagaaaattgtcaggcttgctcgaatactatttttcctttttcaccggaatgtatcatttttctcgcggaaaatacataaaggcaatcaaggcatatagagcagcagaaaaaaagttgacgaaagtttcagataaaatagaaaaggctgaattctattataagatggcggaagtgttttatcatatgaaacagactcatatgtcaatgtattatgtgtctctcgcttatgatatttataaatcctatgatgcatatgtgattcgaagaattaattgtctattcgttgttgctgggaattacattgatttatcaacccatgatcaagctttaccgcatcttttaagcgctaaggaatccgcggaagacattcaaaacaaggcgatcgttgcaaaggctcttttaaatgtagcatattgttataatgcaatggagagaccaacaaaagctattgaatactttcataaggcgattgatgtagcaaaggaaataaaggcaaaagaactgactcaggcttattatgatttggcattaattcactttcgaaataacgaaaatattgaaggacgaaaattttatgaaaaggcgcttgaaagtgcgcgggtatttgaagatgaattattcctgtgtctgttggatgttttagaggcactgtttataaaatcagctaataagtcagaggtactagaaacaatgaaaccattacgggatagtcgtggttacccctatcttgaggaactggcattagaagcagctctattctatactaggaatgagcggccaaatgattccatatttttttatgatcagatggtgcaggctcagaaacaaatcaaaaggggcgactttctgtatgaaatctaa

SEQ ID NO: 1032 - DNA, 120 bp, Bacillus licheniformis
atgacaaggtgcttcattcttactgacttactgagtgtgatcttgattgaatggacttcaatgaagggacaactgtttgaacggtatgcatcatttcacggtgcgctgaatgaagagtga

SEQ ID NO: 1033 - DNA, 1326 bp, Bacillus licheniformis
ttgtcaattcgcattaaactgcctgacgggtccgtcagagaatttgaggaggaagcaagtattgaagatgttgctgcttccattagctgcggtctggaacatgcggttgcaggtaaattaaacggaaagcttgtagatttatcaactccgcttcaggacggtgcactcgttgaaattgtcacccgggactcagcagaaggacagaagatcgtgcgtgaaaaatcgcgggggaaagggcgtattgtggcacttgacgcagcacggggactggcggtcatcgggatgtatttgcagcacttcgccttgaacgaaacgaacggttcgatcgtttccgggaatacgacgcttctatttgtgctttgcggcggaatctcctattcgatcatggccgggcgcatgatggacagaggaatggagccggccgcatttcggacgcggatgcttgcccgcgcggtatttatcgatatgataggatatctgctcatcatgctgaatactccgttcggggtgattttgccggcttatgctgcactttttgtgctggcattggcgctgattcgccgttcgacgcgtgtgctcgttacaacagcagctgttttgcttgcggtgagcccgccgctgatgattctcggagggagcgtcctgtcgggagcaaacttgcttggcgatattgcaggcggcccgatgtcggcgctcgcacttgcacccgctttcgtcgccggtatggcaatcgggcgctttgatctgaccaggatgcgtacggcactttcgctagtaagcagcggcgcagtcatgcttatcgtctctaagttattgggcgttttcgttcttccttggctgagccgttccttcgaagaatggctcgtaagtgttcaaggcaccgccggcgccgagctggatcagtatgcaatctggccgcacaacgtggcaccgccgctttggcacaatcttctttcgatcgctccgcacagtgcgtcaactttccagacgatgctggggcttggggttgcctttctggtgcttggattggtatgtctcgtgcagcagaaaaactctgccgtgttaaagccgttcgcgggagtcggacgtgtggcgttgacgatgtatgcagctcagtttgttgtcatatggactcttgaaatctcgggggccaagtatgatatcggggccattccattcagtgatctgttcgtcgcggccatggtgacggtgacagggtggctgattgcacggcttcctaccggtccgctcgagacagcgatgcgacgctttgaccgggcattcagcaatttgggacccgtcacgggaccggcgagactgagatag

SEQ ID NO: 1034 - DNA, 219 bp, Bacillus licheniformis
gtgcacaaagtgttatctgatgtcggttttatcgcttatgatgctgccaaagggaagattatggccttcacgtataaagatcacaacaagaacttaactgttttcgctaacgatttaaccaatgacgatcatccgcagcatcaatatcggttgctggctaattcgattttcaatgccgctcccggaaaaactgacaatgctccatcatcaaaacggtga

SEQ ID NO: 1035 - DNA, 765 bp, Bacillus licheniformis
ttgaagaaactggtgaaggtcagaggaattacattgggtgaaggccggccaaaaatctgtgtgccgcttgtcggaaaaaaccttgcccaattaaaagaagaagcggcttattttcaaacgcttgatgccgatattgcggagtggcgtgctgatttttatgaagatgtagatgacgttgatcaagtctgcgcggcattggcggaaatccgcggccttttaaaggacactccgctcattttcactttccgcagcgccgccgaaggcggagaaaaagagatcagcacagcgcgatatttttctttaaatgaagcggttgttaaaacagggcttgccgatgtgattgatatcgagctgttcaatgacgaagagcaagtgaaagcgctggtggaaacagcacatggtcatgaagtgtccgtgattatatctaatcatgattttgaaaagacaccagctgcagaagaaattgtttcccgtttgcgaaaagcacaggaattaggggctgatctgcctaaaatcgcggtgatgccggaaaccacggctgatgtcttgcgtctgcttgaagccacttgtacgatgaatgagaagtatgcagatcggccgattattacgatgtcaatggccggcaaaggtatcatcagccgcctggcgggcgaggtattcggttcagcaatgacgttcggtgccgcaaagaaagcttcagcaccggggcagattgcagctggtgagctcaaggaaatccttcatatattgcatcgcaatttataa

SEQ ID NO: 1036 - DNA, 1776 bp, Bacillus licheniformis
atgaaacaggaatcagtacagcaaaaaaacatctcgataatgtcaagtttttcagggagccgcaaagtgtatgtcgaagggtcgcgtcctgacattcaagtgccgatgagagaaatttcgttaagtccgacgacgggttcgtttggcgacgaagaaaaccagcctgtccgcgtctacgacacgagcggtccctatacggacgccaatgcggacgttgatattcttaaggggctgaaacctttgcgggcgacctggatcagggagcgcggcgataccgaagaatatgaaggcagagaaataagaccggaggataacggctataaaggcaaagagaaagcgagccacagctatacagggttgaaacgaaaaccgctgcgcgcgaaaaaaggacaaaatgtcactcagctgcattacgcaagaaaggggatcattacgcccgagatggaatttattgcgatcagagagcacgtatctcccgaatttgttcgtgatgaagtggcaagcggacgggcgattattccgtcaaacatcaaccatccggaaagcgaaccgatgattatcggccgcaacttccacgtcaaaatcaatgccaacatcggcaattccgctgtcacctcttcgattgaagaagaagtggaaaaaatgacatgggccatccgctggggcgctgatacgatgatggacttgtccacaggtaaagatattcatacaacgagagaatggatcatccgcaactgtccggtgcctgtgggaacagtcccgatttatcaggcgcttgaaaaagtaaacggcgtcgcggaagatcttacttgggacatttaccgcgatacattgatcgaacaggctgagcaaggcgttgattatttcacgattcacgccggcgtccttctccggtatgtgccgttaacagcaaagcgcgtcaccggtatcgtatcccgcggcggggcgatcatggcgcaatggtgtttggctcatcatgaggaaagctttctgtacacccattttgaagagatatgcgagattatgaaaacatacgatatcgcattttcgctcggagacggtcttcgtcccggctcgattgccgatgcgaatgatgaggcccaatttgccgaattggagacgctcggcgagctgacggaaatcgcctggaagcatgatgttcaagtaatgatcgaaggcccgggacacgtgccgatgcataaaatcaaagagaatgtcgacaagcagatggagatttgcaaagaggcaccgttttacacgctcggtccgctgacgaccgatattgcaccgggctacgaccatattacatcggcgatcggagcggcgatgatcggctggtacggaacggccatgctttgctatgtgacgccgaaggagcatttgggactgccgaacaaagatgatgtccgcgaaggcgtcataacatacaaaatcgcggcccatgcggctgaccttgcaaaagggcaccccggcgcgcaaatccgcgatgacgcgctttcaaaggcgcgctttgaattccgctggcgggatcagttcaacttgtcgctcgatccggaaagagcgctcgaataccatgatgaaacccttccggcggaaggcgccaaaacggcacacttttgttcaatgtgcgggcctaaattttgcagcatgaggatttcccaggatattcgcgactacgccaaggaaaacaaccttgatgaagaaaaggctatccaaaaaggattggaagagaaggcgaaggaatttaaaaaagcaggcggcagcatttacagttaa

SEQ ID NO: 1037 - DNA, 141 bp, Bacillus licheniformis
atgttatttaatatttctgaaaattccatcagcgctgatcggtcaaccgaaggctcttatctcaattgggataagagctttttattttcagttttagaaaagaaaggagaacaagatgtctttatcaattcgtgtgaatga

SEQ ID NO: 1038 - DNA, 768 bp, Bacillus licheniformis
atgtctttatcaattcgtgtgaatgaaaaagcatttggaaaaggcagctttaaaacaagcgtgctccaagacgtgaatcttacgatcgaaaacggcgaatttttgactgtcatcggtccgagcgggtgcggaaaaagtacgctcttaaaaatcgctgccggtcttgacggggattatgaaggacgaatcagcatgaacggaagagaaatcaagggcccggggattcagcaaggcttcatctttcaggagcatcggctttttccatggatgacggttgagcaaaatatcgccgcagatttaagcctgaaagaaccagcagtgcgaaaaaaagtcgatgaattgattgaaacggtacggctgaaaggtgcggagaaacagtacccgcgcgagctgtccggcggaatgtcgcagcgggtcgcgattgccagggctttgctcagggagcctgagattttgctgcttgatgaacccttcggtgccttggacgcctttacgagaaagcatctgcaggatgtactgacagacatttggagagaaaagaagatgacgatgatcctcgtgacgcacgatattgacgaatcggtgtatttagccaaccggatcgcaattcttacggcaaagccggggagaatccacaagctgattccggtcgatctgccttttccgcgcagcagaacatcgcccgtttttcaaacaattagacaaaaggtgctgaaagagttcgagacaacggaaacattcagctttcaggaaggttcaggaatttga

SEQ ID NO: 1039 - DNA, 990 bp, Bacillus licheniformis
gtgaaaaaatggccgttgtatgtgctgggctgcctgttgcttcttgcgggctgttcagcagccaaatcaagtgaagggggcggagatttaaaagagatcaacatcggagtgcagcaaagcttaagcccgttgctccttgcgaaagaaaaaggctggtttgaaaaagagttcgcaaaagaaggaattaaagtgaaatggacagagtttcaaagcggtccgccgcagtttgaaggtcttgccgcggataaactcgatttttcccaagtcggaaattcaccggtgatcgcagggcaggcggctggcattgattttaaagaaatcggcctttctcaagacggtttaaaggcgaacggcattcttgtgaaaaaagggagcggaatcgatgacataaaagatttgaaaggaaagaaggtggcggtggcaaaaggcagcagcgggttcgatttcctgtataaagtgatcgataaagcgggtctgaagccaacagacgtcaacatcattcagcttcagcctgacgaagccatgccggcatttgacagcggagcgattgacgcctggtcgatttgggagccgtttttgtctcttaaaacgatcaaaagtgacgcggacatattggttgacggggaacaaatcgacaagtattccccgggttttacgcttgtacgaagcaaattcgccgaacagcatccggatgaggtgattcgttttctgaaggtgtatgacaaggccgtgaaatggcagaaaacccataagaaagaagcggttgaagcgtacgcaaaaattaaaaacctcgacaaagaggtcgttgaaaacgtgctgaataacaccgaaccgttaaatgagccgatcacagaccgcatcattcaaacacagcaggagaccgccgattttcaatacaaattaaaagcgattaacaaagagattgatgtaaaagaagtggtcgacaattcatttataaaaaaagcgctgaaagaaggagatgacaaatga

SEQ ID NO: 1040 - DNA, 837 bp, Bacillus licheniformis
atgagagctgtttcatcaagcaccccctcgatccagccgaaaacaggcgcaaaactgagaccggccgcttttcggctggcatgggggaagggatttgtattacccgtcatgttgattttattatggcagcttgtcgggtcattggagctcatatcaaaaaccgtgcttccggctcctttagatatattgcttacatttcgggatcttatcgtatcaggagagcttttcactcatttaggcatcagcattcagcgcgccgcgctcggctttttcctgggggccgggctcgggctcctgctggggcttgtaatcgggttttcgaaaattgccgaggattacctcgatccttctctgcaaatgctgagaaccgttccgcatctcgccgtcacgccgctgtttatcttatggttcggtttcgatgagctgtcaaaggtgctcttgatcgctcttggggctttcttcccggtatatatcaacacattttcagggatcaggggcgtcgattcgaaactgttcgatgtggcgagggtattggagttccattggctgaagcaggtgacaaagctcattcttcctgcatcgctcccgaacattctcttaggcatccgcctgtcgctcggcgtatcgtggctgggccttgttgttgccgagctgatgggatcaagcgctggagtcggctatatgattatggatgccagacagttttcgcaaaccgataaggtgtttgtcgggattttgatttttgccgccgtcggcaagctgacggattcattcgtcagaattctggaaaaaaagtgccttggctggagaaacagctatcaaggaaacaaaaagtaa

SEQ ID NO: 1041 - DNA, 1131 bp, Bacillus licheniformis
ttggacattttatggtttattccgactcatggcgacggacgttatcttggtacaaacacgggaggaagagccgcagatcacacctactttcagcaggtggcgcaggcggctgacaggcttgggtatacaggggttcttcttccgacgggaagatcgtgcgaagacccgtggattaccgcagccgctctggcgtcagtcacgaaaaatctgaagtttttggtcgctgtaagacccggtttgatgcagccgtcggttgcggcgcggatggcttcgacattcgatcgtcttgcagagggcaggcttctcatcaatgtggtcgccggcggtgatccgtatgaattagccggcgacggcctgtttatcagccatgatgaacggtatgaagcgacaaatgagtttctcgacatatggcggtcgcttttaaaaggcgagaccgtcagctactcagggaaacacctgaagactgaaaacgggcgcttgcttttcccgcccgcccaacagcctcatccgccaatctattttggcggctcgtcaaaggccgggcaggagactgccgccaaacacgcggacgtctatttgacatggggagagccgcctcatctcgtcaaagaaaaaatccaatctgtcaaaaagaaggctgaaaaagaagggagaaccgtccgttttggaatcaggctgcacgtgatcgtcagggaaacggaaaaagaggcctggcaggcggcggatagactgatcagccgcttggaggatgaaacgattgccgcagcccaaaacgcgatgaaacggatggattcatcaggacaaaagaggatggttcagcttcaccagggaaacagaagcaatcttgagatcagcccgaatctttgggcggggatcggactggtcagaggcggagcgggaacagcgctcgtcggtgatccggaaacggtagccagccgaataaaagaatacgccgacatcggcattgagtcctttatcttctcaggttatccacatcttgaagaagcgtaccattttgcagaaaaggtttttccgctccttccgtttcgaacgaaacttcaaagtaaagcatcaggcgaagtcatcggaaatgaccattttccgtcgaggcaaaaagaaaaaaccgtttaa

SEQ ID NO: 1042 - DNA, 459 bp, Bacillus licheniformis
atgaatatgataacacggactttctttcacatccttctgttcggactcgcatgctggacgtttataacctttttccacacatcggaacaaattgccaaaagcctgaaaacaaacgattcagagcttcattttgtgtttaatctgattcccatccttctctttgggctcgtcctttcgatttacacatacttggagaaaaaaagcggttcacgcaagcagcgctttatgctcgtccccgacgaatttaaagagcaggatgaaagagagcagatgattaccgcaaaagcatgcagaacatcatatatcgtgctgtatgtggcgatgccggtcgcagcgcttttattgatcttttatccgtttttccaagtcaggattccgtcttttccgattatcgtcatctttatgctgatcattattcagcatctttcatatatgttttcattttataaaaacagataa

SEQ ID NO: 1043 - DNA, 207 bp, Bacillus licheniformis
atgaacaacagggtaagagaattgagagcaagatacgggtattcacaggaagcccttgcaaaggcgatcggggttacaaggcagacggttgcggccattgaaaaaggcaattacataccgtcgcttcttttggctttgaaaatttgcaaggaatttcaattaaaaatggaagacgtattttggctagagggggacaaaaacgaatga

SEQ ID NO: 1044 - DNA, 213 bp, Bacillus licheniformis
atgacatacgcagcacctcaggttgactattctgtcaatccgtcgatcgaagatcaggcttggttcttggtgtttgttgcagtgcttttggcacttggagcaactgttgttcttggcgccgctgtatggtgtgtggctaacggaaacggcagcttcacgggatccgtcaaatgggtcagcggtttgcaggtcagcatcgaatgtaggaaatag

SEQ ID NO: 1045 - DNA, 747 bp, Bacillus licheniformis
atgtttataatagatcatctgtctaaaacatataaaaacaatgtgactgccgttagcgggtttcatataaaaatcgaaaaaaaccagatcgtcgcgatagcgggtccgaacggttcagggaagacgacgatcattaactccattttaggaatcatcacgcctaccgaaggaaccattctgttggatgacctgccgaacacgacggcggaattcaagcagaaattcgcctacgttcccgatgaactccttttgccggacgccctttcagccgcagaatatttggattttgtatcttctatgtatcattgtacatcaaatgaaaaacggaaacaattaatcgagcttttcgatatgaaagaggctttgcaggagccgattgaaacgtactcgcacggaatgaaaaaaaagacgcagctgatcgccgcttttatgctggagagcgaatttgtcattatggatgagccgtttcgcgggctcgatatagaagcggtcatcaatacgaaaaagctgatgaagcgctatgcggccacgcaagggtcgatactgctggccacccatgacatgctttctgcggaagaactgtgcgataagatagcaattctatcaaaaggcgtcaaaatggatgaaggaaaagtgaaagaattgaaggctaaatataacagcgattcacttgaagaagtattcttaaaagcttcgatgctgagtgataggggtgctcattttgatcaaatcattcgaaatttctaa

SEQ ID NO: 1046 - DNA, 1461 bp, Bacillus licheniformis
ttgatcaaatcattcgaaatttctaaaatgatgctgaaaatgtggcagaaggaaatgggcaagctctttaataccggtacaaaaaaagcgatcgccgtgctttttttgcttttggcggtaatgatgggaagcatcaccggctacagctttacaggcatgtttttaagcgcgtttctgaacggcgaagttcgttctctcggattgttcgtgatttccatgtttatgaacgcgtcgatttttacatttgttttcttcattttatttaaagtaaggacgccagagcagcacagcttttccatgcagctcagctggtttccgctgacggccttccagagaagcctcggatatttcatcccgtttgccggagcggtttcatttcttgtcctgtttatgattttcattctgctgattccgaactttgtcgccagcggtgttgggttttggtttgcttttacgttttttgcacttctttttgtacagatcatctttttcttttcgcttctcaatcttgtctataacttggtgtatatgttgattttaaaattcggctttccgctgcaaaagtttttttcaatgtttgtccttgtcgtgttagccgtgttttacggaatcacatcattcgatcttggaaacattcagaacgcttattcgtcttttgattatcatttgacatattttgcagcgccgctgtttctcatgctgaacggtcaggcgtcggatgccggcgtcattccgattgtactgatcttgacagcagcagtcacggcctcttttatgtcgctgaatgttgtgccgatcctcactgaaaaaaaatcatctaaactgttttcatttattaaaatcccgtcatcaaagccgctgtctttggcggtgaaagaaataaagtctcaagcccgaaatgaagaaaatattttaaacttcatttttttgcttttggctctatgctttttgaaattcaagtttcagtttggatttaccggtgagagctatttggttctgggaggcgtgacaggtatcatcgccttcaattcatttggcaacgatctgcggatgatgcagatgtataaggcgcttcatttaaaaacggcaacggtactgtggtcaaaatatctcgggctctgtatgctcggcctcattcagctctttttgttttccgtgctgacgtggactttcccggagagctttccggtctttttaaagacggttgccgtgatcttaaactcgattgcgatgttctatttagcgggcattatttttccgcttgaccgaaacaacccttatatggggatcttctctttcggaatgctcctgctctttttgattccgctgtttttcatcgtgaattatgcggttgataacgtcacgggcgaagcgctgctgtttttcataccgtgccttgaattactgctgatcctgcttttatacggaggatttaaatggaggtaccattatgatcattaa

SEQ ID NO: 1047 - DNA, 909 bp, Bacillus licheniformis
atgatcattaatatgttgaaatcgcttgccggaatcaaaaaaattccctatttcccagagcatgtgacactgaatcggaagcatatttcagatcatgatcttgatgctgattttcccattaatccgactgcttatcaaatgctgaaggaagtcgacgggaaaaaagacgagctggagattgccgaagctctcaaaggtgtgtttaatgtcagggaagaggtgctgcagaaagatttgcacgaattgctgacagggctcaaccgccgttatttgatcaattggaggtacggagagggcccgtcttttgcgggagtgctttatcaattcttcagccagtatcatatccgctacaaggagaggttttcaagccattctgattcgtttctgctgttgtacataaagtttctgcaagtgatttctaagaaaatcatcgtgttctggctcgtctttttgatgttgtcgcttgcagcgtacaccgttgttccggatggatcgatcgtcggcatcgcggcttatttttccgtcgtctatttcgggttgatcaccggaacggcgcttcatgaagtggtgcacggcatcgcgcaccggaaagctgccggcaggaacggcccgcaggggtttttagcggctgatatgatgtcagtcaaatttgtccgccctgtcatgtcgctgcatgataaaaggtcgatttggattacggcgttgggaccgcttgttccaggtgtgctcggaatagccggcgtgctgtttacggtcttttttcttaaggaaaacgcggtttccgtcggagtgctgctgttcttttccacctatgctttgcatatgatgtatctgcttccgtttatgggtgacggaaagtcgattatgaaacagctgatgatcagaggaattggaggtaaatcatcatga

SEQ ID NO: 1048 - DNA, 285 bp, Bacillus licheniformis
atgaatacaaactctttaaagcagggactaatctttgccagtttctcaagctttctcgcatttccgatgcttgcggctgcgcttttgttttatcaccttttttcaaatcaaacgagcaatgatatcttgtttaacagtttgtcgtttgtcatggagagcgaatcggctttttcattccaggtgaagccaaactttttcttcattatgatcgggctgtttatcggcatttttattataacggctgcgatttcatcaatttatcagaaaaaaaagggtgaatcttaa

SEQ ID NO: 1049 - DNA, 270 bp, Bacillus licheniformis
gtggccaagaaatcaaaaattgctaaagaaaaaaagcgccaaaagcttgttgaacaatatgcagaactcagaaaagaactaaaagaaaaaggcgattacagagctttgagcaagcttccgcgcgactcggcgccagcaaggctgcataaccgctgcgaagtgaccggaaggccgagaggatatatgagaaagtttaaaatgtcgcggatcgcgttcagagaattagcatataaaggccagattccaggtgtgaagaaatccagctggtaa

SEQ ID NO: 1050 - DNA, 630 bp, Bacillus licheniformis
ttggaacttcgtttgcaaattgcgcctgctattttaaaccgcattccttcatttaaggttggcgctgtgttatatcaaggtattgagatcaacggctccccgcaaatgcttaaaggccggctccgcctttttcaggaatcgctgttttttgactatgccgaccgcagtatcgaagatgaatcggccgtaaaagaatggcatgatgccttcagggagctgaatccgtctttttcaggccgggaaagcggactcgaacggatgctggaagacatcaaagagcagcgctttgtcgagccgaaaaattcagcggttgatctgagccgttttttctctctcaaatatttgattccggttcatatatatgacgcccggaatttgaagggtccgatcaaaatcgaacccggcggcccggacgagatcatcacgttctccgatgatgcgggagcattcggcacgatcaccgaaaacctcagtcttcatcatgcaggagcggacacaaaagatgccttgcagctcgtctttttcaggccgtcattatctaaagaagaagccagccggctgctcgattctttgacaaaaatgtttgaacaaattcacggcggcaggcacatttcagccgtctttccgtaa

SEQ ID NO: 1051 - DNA, 1149 bp, Bacillus licheniformis
atggatgtgaaaaaactgaaacaggatgtcatcgaattcgcacagcaaatcggcattgataaaatccggttcgccagtgcagatacatttgaaacattaaaagaacgattgattgagaaccgggcccttggctatgaatcaggctttgaagaacccgatcttgaaaaacggacgaacccggatctgcttttgccgaaggcgaagtcgattatcgccatcgcccttgcatacccctcaaaaatgaaagacgcgccgagaagcaagaaaggcgaacgaaggggcatcttttgcagagcttcctggggaaaggattatcatcatgtcctgcgcgaaaagcttgatcagcttgaagaatttttgaaagcacagcgaagcgatgtcagaacgaagtcgatggtggacaccggtgagctttcagacagagctgtcgcagagcgtgcgggcatcggctggagcggaaagaactgcatgatcattacgcctgaattcggatcttacgtttacttggcggaaatgattacgaatattccctttgagcctgatgagaggatcgaagaccaatgcggctcatgcaacaagtgcatcgaggcatgcccgaccggcgcgctcgtcaagcctgggcagctcaactcccagcgctgcatcgcttttcagacgcagacaaagggttttctgcctgacgagttccgtacgaaaatcggaaacaggatctacggctgtgatacgtgccagatggtatgcccgaaaaataaaggggtcgattttcatctgcatcctgaaatggagccggaccctgagattgccaagccgcttttaaagccgcttctgacgatgtcgaatcgcgaattcaaagaaaagttcggccacgtggccggctcatggagaggcaaaaagccgattcagagaaatgcgattatcgcacttgcccattttaaagaaacggacgctctccctgaactgattgagctgatgcacaaagatccgcggccggtcatcaggggaaccgccgcatgggctgtcggaaagatcggcggagcggatgtgatgagtgaattggagcgcgcgctcgcgcacgagcaggatgaagacgcaaaagctgaaattcaaaaaggcatcggcctgttaaaagaaacgagtgcgactaattga

SEQ ID NO: 1052 - DNA, 906 bp, Bacillus licheniformis
ttgaaacagatcatcgagcagctcctgaaagccagacttcaatacttaattaacggcaatgatgaaacaaactggcgggatgccggaggttttgaagtcattgaacggaagcggaggctttttcaaaaacgcggcgtgcatatcgtgaaggccaatatagaagcggctgtaaaagagcattggcttgatgaagacggcgcgtcacatgtgaactatcaaacccataccgcatatttgtgcaaagacggggatgatatgtatatggaagaacatatggaagacagaaacgcccttttgtatgatcagatggtcattaaagactccgaggccctgcgtccggccgcacagtctcatcctgagcctgaaaacggcgatgaagatatgcgcgaattgctgggaagggcgttccgctatgaccggcttgccgcggtgcgctatgctgaaacgtattggaataaacgaaatcctgcttataaaaactttgaagacaattgcacaaactttatttcccagtgcataagggccggagatgcgccgatgcgcggctatccgaacagaggcaagggctggtggatgcaaaaccattcctggagctacagctggactgtcgctcattcgctcagaacctttttgaagcattcaaaagccggtctccgagcggttcaaaagccggctgcgaaagagctgatcgaaggcgatgtcatctgctatgattttaacggagacggcagatttgaccacgtggcccttgtgacagcgaaggataaaagcaatatgccgctggtgaacgcgcaaacgcacgactgccggatgaggtactggtcttacgaagattcgcctgcttatacttcatcgattcgatatgcgttttttcatatatcagatgatacgacaaaatcgaaatga

SEQ ID NO: 1053 - DNA, 474 bp, Bacillus licheniformis
ttggcattgcatgtcgtactatatcaaccagaaattcctgcaaacacaggaaatatcgcacggacttgtgcagcaacagatacaacacttcatttaatcagaccgctcggcttttcaaccgacgataaaatgctcaagcgggcaggtcttgattattgggaattcgtcaatgtcgtctaccacgactcattggatgaattgtttgatgcccatcctgaaggccgttttttcttcattacaaagttcggtcaaaaaccgcacacttcatttgattattcagatcaaaacgaagattacttctttgtcttcggcagagagacgaacggcttgccgaaagagctgatcgaacaaaacatggatcgctgtctgcgccttccgatgacagagcacgtcagatcactgaacttatcaaacactgcggcaatcctcgtgtatgaggcgcttcgccagcagaattacagagatttgacttaa

SEQ ID NO: 1054 - DNA, 615 bp, Bacillus licheniformis
atggttcaggatgatttaatttcaaaaaaagagctgctggatttgacttcgatctcgtacggacagctctatagatggaaacggaaaaatttaatacctgaagagtggtttatccggaagtctacgttcaccggacaagaaacgttttttccgagggaagacattttaaaaagaattgaaaccattcaaagcatgaaagaaaacctttcccttgatgagatggcggaaatgttttcgcccgatttgaccgaactaaacgcgagccgcggggagctgctaaaaaaaggcatcgtttcagaagcggtcatggcgttttttgaagaatgcaccggaaaacgcgatcatccatttaatttgacagaagcacttgcggcttatgtgctggaaggcttgcttcaatccggcgacatcagcctggatgaagggaaaatggtgctggatgtcatcatgtcgaacgaggcggaaaacaagggaaggctgcttgtgctccggaagctcggcgttgcaacatgtctgattgccgagggcagcattgtgttggaaaagggagtcaaggtagccgctgacatcaatctggcggcgagcagtgaagaattgaaaacaaaattcatgtaa

SEQ ID NO: 1055 - DNA, 711 bp, Bacillus licheniformis
atggagaatttattgataaacggattcggcagttcaggcggaggcgcgtatcaaacggttgagttaaacggcaaaggtacgattaacggcgatattgactgcgaaaggttcagctgcagcggcaccgggactgtaaacggagacgtaaaagcggatgagctgagaatcagcggccatgcaaaactaaacggcgccatcgaggcttcaaaggttagaattgatggttctgcaaaagtggatggcgatgtcgaagcagaaaagcttaaaatcttaggctacgccggcattagcggacatgtgaaaggcgacgaagcgatcgttcgcggaaaaacgtcgatcggcaaagactgccaagtggaacatttttctgcagaaggctattttacaatcgacgggctgttaaacgcggagcaaatcgaaattaaggttcacggcggcgaaagtaaagtgaaagaaatcggctgccggaggatcgtctgcactgcacatcaatcgaagctgttctcgtttttatcggagcttatttctcctccaaggctgtctgccgagctgattgaaggggatcatatcgaacttgccaatacgaccgcaaaagttgtccgcggcaattcggttatcatcggcgaaaattgcgacatcggcctgattgagtataaggaagatatccgggtggccgaaacggcaaaagtcggagagaaaaggaaattatag

SEQ ID NO: 1056 - DNA, 702 bp, Bacillus licheniformis
atgaagaaacacgacttgaaaatacacggatccggaagcgcggggggcggatcattccatcgtgttctcattagaggtgaaggaatgatcacgggaaacattgattgcgaaaaattcagtacacacggtacaagcgaactgtcaggcgacgcgaaaattaaaagctttagtgtacacggggaaacagagatccgggggaggctgaaagctgacaaagccagagtatacggcacggtggatgtttctgagaacgccgagatcagcgatgcagccgtgaaaggcatcatcaatatcgggggaaatatgacggctgacacttgcgatgtcaaaggcgccctgaacgtaagaggcgattgcgaggcagaggattttaaactgacgggcagcctggatgtaaagggcctcctgaacgcaggtgtgattgacatcggcttaaagtacggaaacagttcgattggcgatatcggcggtacggatattaagatcgtcaataaacgcgggctgttgtttaatagaaacggaggtactctctcggcagggacgattgaaggagacgatatttacctggaaaacacggcggcccgaatggtcagaggaaaccgcgtgcatataggaccgggatgcaagattgagaaagttgaatacaagagcagctaccgggtatctccgaagtctgaggtaaatgaggatcaacagcaataa

SEQ ID NO: 1057 - DNA, 87 bp, Bacillus licheniformis
atgagaacgctgatcatgatgggggtcatcctcgcgtttctcgtatccatatttactgccggatacgaaagcaaacccggaaagtaa

SEQ ID NO: 1058 - DNA, 114 bp, Bacillus licheniformis
ttgacaaggctggagcaaaccattcataataagagcagaaaagttccgtccgcatgtgctcctgcggaacggctcgccgcatcggtgcagatgacaacaagggatcaaggatga

SEQ ID NO: 1059 - DNA, 1896 bp, Bacillus licheniformis
atggatatattaaaaaagattgaacagtatagagaggaagagcagcgtctgaaatgggaaggaaccttcgctgaatatctggaaatcgtaagagaaaatccgactgtcgcgcaatctgctcattcccgcgtttacaatatgattaaagacagcggcattgaagagaaagacggcaaaaaagtatacagcttctttgacaaagagctgtttggtcttgaagagcctttggaacgccttgttgaagaatactttcatccggccgcgaaacgccttgatgtcagaaaaagaatcctgcttttgatggggcctgtcagcggggggaaatcgactttggtcaccatgctgaaaagggggcttgaagcatactctcttacagatgaaggggctgtctatgcgattaagggctgcccaatgcatgaagatccgcttcatttaatccctcagcatctgcgggacgatttttacaatgaatacggcatccgcattcaaggaaacctgtccccgttgaacatgatgaggcttgaacaggaatacggcggaagaatagaagacgtgaaggttgaaagaatctttttttcagaggataaacggacggggatcggcacgttcagtccgtcagaccctaaatcgcaggatatcgccgatctgacgggaagcattgatttctcgacgattgccgaatacggatcggaatccgatccgcgcgcataccggttcgacggagaattaaacaaagcgaacagaggaatgatggaatttcaggaaatgctgaaatgcgatgaaaaattcctctggcaccttttatcgcttacacaggaagggaatttcaaagcgggccggttcgcgctcatctcagcggatgaattgatcgtagcccacacgaatgaaaccgaataccgttcatttatatccaataagaaaaacgaggcgctccattcgcggattatcgtcatgccgattccatataatttaaaagtatcggaagaggaaagaatttatgagaaaatgatcgctgaaagcgatgtgtctgatgttcatattgcgccgcacacgctaaaagtggccgcgatgttttcaattttgacaaggctgaaggagccgaagaggtcagacattgatctcgtcaaaaaaatgaggctgtatgacggagagagcgttgaaggatacaattcagtcgatgtcgaggatttgaaaaaagaatacactgatgaaggaatgagcggaatcgatccgcgttatgtcatcaaccggatctcgtcgacgatcatccgcaaaaatatggagtcgatcaatgcgctcgatgtcctccgttctttaaaagaaggactcggccagcatccgtcgatttcggcagaagaccgcgagcgctatttgaactttatttccgccgccagaaaagagtacgacgaaatggcgaagaaagaagtccaaaaagcgtttgtatactcttatgaggagtcggcgaaaacgctgatggacaattatcttgataatgtcgaagcgtactgcaataaaattaagctccgcgatccgctgacaggagaagagatgaatccggatgaaaagctgatgaggtcaatagaagaacaaatcggcatttccgaaaatgcgaaaaaggcattccgagaagaaattctcatccgcatttctgcctatgcaagaaaagggaagcgatttgattataattcccatgagcggctcagggaagcgattcagaaaaagctgtttgcagacttgaaagatgtcgtcaaaatcacgacgtcgacaaaaacgccggacgaacagcagctcaagaaaatcaacgaggtcgtcgcccgtctcattgatgagcacggctacaactcgacaagcgcaaacgacctcttaaaatatgtaggaagcttattaaaccggtag

SEQ ID NO: 1060 - DNA, 1167 bp, Bacillus licheniformis
atgtcccataaagacaatggccattttattatttctcaggaagactggtccctccaccgaaaagggtatgatgaccaacagcgtcaccagaaaaaggtgcaggacgcgatcaaaaacaatctgcctgacctgattacagaagaaagcatcattatgtccaacggcaaagatattgtcaaaattccgattcgctcgttggatgagtataaaatccgctataactatgataaaaataaacatgccggccagggagacggcgacagccaagtaggagatatcgtcgcaagggacggctctgataagcggggcgccggcaaaggccagggagcgggcgatcaggccggtgaagattattatgaagcggaagtttcgttaatcgatttggaagaggcgctcttcagcgaaatggagctgccgaatttagaacagaaagagcgcgatgatatcgttgtcgaagatattgaattcaacgatatccgcaaaacgggtttgacgggcaacatcgataagaaaagaacgatgctcagcgcatttaagcgaaacgcaatgactggaaaaccgtcgttttatccgatctatcccgaagacttaaaatttaaaacgtggaatgactctgtaaagcctgaatcaaaagccgttgtgctcgccatgatggatacgagcggatcgatgggcgtttgggaaaaatatatggcgcgaagttttttcttttggatgacacgttttttacggacaaagtatgaaacggtcgatatcgagtttatcgcccatcatacagaggccaaagtggtatcagaagaagatttcttttcgaaaggggaaagcgggggaacaatttgttcatctgtataccgcaaatccctcgagctgatcgaagacaaataccatccgacacgctataacatttatccgtttcatttttcggacggcgataatctgacatccgacaacgcgcggtgcgtcaagcttgtcggagagattatggagaaagcgaatatattttgctacggcgaagtcaaccagtacaacagacattcaactttaatgtcagcctacaaaaatattaaaaatgaaaaattcaagtattatgtgctgaaacagaaagccgatgtttttcaggctctgaagagcttcttcagcaatgaagaacggcaccaatatacatga

SEQ ID NO: 1061 - DNA, 633 bp, Bacillus licheniformis
atgagcaaaggacgtttaattgcgacgaacattatcggactcatcatcgtgcttgccatcttagcaggaggtgcgtatttctattatgacagcatcagctatgtgaaaaccgatgaagcgcacgtggcaggcgagatggccgatattacggcgcctgcatcagggaagctcgcagattgggatttgaaagaaggatcaaaagtttcgaaggacgaaaaaacagcgaaaatcaaaggggaacaaacggttgacgtgaagtcgatcatggacggaacgattgtcaaaaacgaagcgaaggaaggccagatcgtacaagccggtcaaacgcttgcgaaaacaatcgacatggatcatctgtacattactgctaacattgaagaaaacgacctgaaagacatcgaaaaaggggacaaagtcgatatcgtcgttgacggtgattcaggcactacatttgaaggaaatgtcgaagaaatcggctatgcgacaaactcaacatttgacttgctttctcaaagcaattcaagcggaaactacacgaaagtaacgcagaaagtacctgtgaaaatttcaatcaaaaacccgtctgacaaagtgctgccgggaatgaacgcatccgtgaaaatttcaaaataa

SEQ ID NO: 1062 - DNA, 1590 bp, Bacillus licheniformis
gtggcttctcagaaaaaaggaaatatgtcactgcttatcatattaatggccggcttgtttctggccattttaaaccaaacgctgctgaatgtggcgatgcctcatctcatgacagagttcaatgtgagcgccacaacgattcaatggctgacaaccggatatatgcttgtcaacggcgttttgattcctttatcagcctttctgattatgcggttcggcggacggagcctgtttttaacggccatgctgctgtttacggccggaacgctgatatgcggaatttcgcctaatttctcgacgatgttaaccggacgcctcattcaggcagtcggcggaggcatacttcagcctttggtcatgacgacgattctctttatctttcctccggaaagccgcgggaaaggaatggggatctttggccttgcgatgatgtttgctcctgctgtcggtccgactctatccggctgggtcattgaaaactacagctggcggatcatgttttacagccttgtgccggttggtgtcatcgtcatcattttcggttttttcctatttaaaaatatgacggaacctaaaaaaatcaaattggatacagcaggcgcgattctttcagtcgtcggatttgcggcgttgctgtatggcgtgagcgaagccggctcagacggctgggatgatccgatcgtactttctacagttgtgatcggtgtaatcggcattgccgcttttatcatccagcagttgaaatcgaaagaaccgatgcttgacttcagagtgttcaaatacgatatgttttcactgtcaagcgtgatcaacgccatcattacggttgctttgtatgccggaatgttcctgattccgatttatttgcaaaacctggtcggttttacagcgcttcagtcggggcttcttatgctgccgggcgcactcgtcatgcttgtgatgtcgccgatctcaggaattttatttgataaagtcggcccaaggccgctggcgattgtcggtttattgatcaccgttgtgacgacctacgaatttacgacgcttacgatcgatacgccgtatatgtacatcgtgctgatctatgcgattcgggcgtttgggatgtctatgctgatgatgccgattatgactgccggcatgaaccagcttccgcagcatctaaacagccacggaacggcgatgtcgaatacgcttcgccaaatcagcggttcgatcggaacgagcttgatcacgacgatttatacgaatcgtacgacattccactatgcatcaatggccgatcagacaaatacggctgatccgtcatttatgagcacattgcagtcaacgattcagtcaaccgcgcaatcgatgcatatatctctcgaacaagcacaacaatatgtcgtgaaatatttgaccggacaggcgcagctcaactcgaacgtcatgggtattaatgacgcgtttatgtgggcggccgggttctgtgtcatcggtctcgttctcagcctgtttttgagggatgtcagaaaagacaagctgcgcaggaagaacaaagcgcaggagctgacattgcttccggctcctaaagaagcgaaagaatcttaa

SEQ ID NO: 1063 - DNA, 531 bp, Bacillus licheniformis
atgaaaatttatgttgtttacgacagtgaaggcgagcatacgaaaaagctggctgaagccattgcagaaggcgcgggggaacatgatgctgcagacgtgcggatcgatcatgtcagccaggcggatattagaaagctcgaagaaatggacgctatcatctggggatgcccgggccatttcggtacaatcagctccggattaaaaacttggatcgacaggctgggctacctttgggcggaaggaaagctgatcaataagatcggcgcagtcttctgcacaacggcgacgacccacggcggtcttgaggcgacaatgctcaacttaataacaccgatgcttcatcaaggcatgatggtcgtcggcttgcctggaaatgtacctgaaaatgctttatacgggtcttattacggtgcaggcatcacgtgtcctgtcgacagtgacgaattgatcggcgaggaaggcctggagctgggccgggctttaggcagacgcgtcgcccaggtgacagaccgctttacagcaggacagtga

SEQ ID NO: 1064 - DNA, 333 bp, Bacillus licheniformis
atgaccattatactgaccatcatcgctgctgtcctcgtcattatcggtctggtggtatttaatgtgcggtcggcgtcttctcaggataaacccgaacatgaggataaagctgcatctgcggctggcattcctcaggttcaggaagaagaagagcctgagcaggttaaagccgatcagcaagatccgttcgaaatgaatgatcaaacctatcgggcgatcctgcaaaaacttcaacaaccaaaagaggaaaaaaaatatcccgagaagacggaaatggacgatatggattaccgaaacgcattaaaatccatgaaaaaacgggaacaggattaa

SEQ ID NO: 1065 - DNA, 647 bp, Bacillus licheniformis
atgagcgctcagaaaatattcggctatcaaaaaatcatccgggacatttccttgttgatctacgatgcttatggattattcgaggcgctgttcatcaagagcggcttattccagaaagtgcagagattctggagcatttctttaaatgctgatttcaaatttcatgatgaacagctagaaaggagacgaagaacgtctctattcagagcttgatatgttctgcgtccatttcgggtcaaggatatattcactattatgaaaccaatttttccgatttccgtataaacaaagcgtggaacctgttaaaggacaagaaaaatcgacagggatataaaaatcggcaagctttccaaagggaaccggggcaggctgaagctagcgctcacattggcgagcgatgcagcggtcgtgctgtttgatgaaccatccggtctccgatggtgagggagtcgacagtcaaaagccttcttacatatttggagcttgacaagcagacaatcgccatcgccacctatgaaattgaacaaatattggatgtcgtcttaaatggccgaattgaagcaaaaaaggatgtcgaacagctgcgcgaggaatccggaatgtcgcttttggaatggctgaaacggtttattaaagaaaaaaattga

SEQ ID NO: 1066 - DNA, 924 bp, Bacillus licheniformis
ttggaaacacttttggaattaaaaaatgtatcaaaaacgatcagggggaaaaagatcatcgagggcttgagttttgacgtgcgggcaggcgagatattcggcttcctggggccgaacggcgccggaaaaacgacgacgatccggatgattgtcggacatatgagcattaccgccggtgaaatcgccgtgtgcggcgtcagcgtaaaagaaaactttgaaaaggctgcacggcatatcggagcgatcgttgaaaacccggagctttataaatttttaacgggctaccaaaaccttcagcaatacgcgcgcatgacgaaaggcgtgacgaaaaagaaaattgacgaaatcgtcgagctcgtcggattgaaaaacaggatcaacgacaaggtcaaaacgtattcgttaggaatgagacaaaggcttggccttgcccaaagccttttgcacgatccgaagctgttgattctcgatgagccgacgaacgggcttgatccggcaggtatccgggaaatccgtgactatttaagaaagctgacgagagaaaagggaatggcggtcatcgtttcaagccacctgctttcagaaatggagctgatgtgcgacaggatcgccattattcaaaacggaaagctccgggatattcagcatgtgcacggacccgctcgggatgagaagaagcgctattatattcaagcggacgacacccaggctctcacacgggaagcggctgctttcagaaaggtgaaggttgacgaagcggaaggcgggatagagctcagcattcaaaaggatgaagtgcctgatttgattaaacacttgacagacagcggtgttcgcttatatgaagtgaaggctgtgaacaaatcgctggaagaccgattcctggaaatcaccgcagataaggaggaagctcagcatgtttaa

SEQ ID NO: 1067 - DNA, 941 bp, Bacillus licheniformis
atgtttaatctcatcgtaattgaatggatcaaaatttttaatcgaaaaggcacatacgtcatgatcggaattttgctgttagctgtcatcgggctgggcgttctcacaaagacgatcggagagacagaccaaaacacggactggaaaaaggaattggcgcaggaaaataaggacatgaaggaacagcttaaagggaacagcaatccaacacttgaaaaaattatgaacagtcgatcgcaattaatgagtatcgaatcaagcacgatttaccggcagatggggattattcagctctgtctttcatcagcgatacgagcgggctcatctcgctcgccggtttgtttgtaatcacggtggcggcgggaatcgttgcgaatgaattcagctggggaacggtgaagctgcttgtcatcaggccgatcagccgctttaaaatcctgctggcaaaatattttacggtcctgcttttcgcattggctttgcttttcattctgttcgcaagcgcagggatcacaggccttgctttattcggggcaggcgacagcagccaggttcacttggtgtatgtcggtggaacggttgaagaaaaaagcctgctattgcatttggccggcagctatttgctgaattcgatttcgcttttgatgatggcgacaatggcctttatgatttcagcggttttcagaaacagctcgctcgccgtaggtatttcgattttccttttggttatgggcggaacggtgacaggcctgctcgcgacgaaatttgcttgggcgaaatacatcctgtttgccaacacggacctcactcaatactttgacggatctccggttgtttcagacatgacgctgggattctcgattgtgatgctggctgtctattttatcgtttttcatgtgctcgcctttgttgtattcacaaagagagacatcgcttcataa

SEQ ID NO: 1068 - DNA, 201 bp, Bacillus licheniformis
atgctagaaggtaaagtaaaatggtttaactctgaaaaaggtttcggattcatcgaagttgaaggacaagacgatgtattcgttcatttctctgctattcaaggcgaaggcttcaaaactttggaagaaggccaatctgtatctttcgaaatcgttgaaggaaaccgcggaccacaagctgctaacgtaacaaaagcgtaa

SEQ ID NO: 1069 - DNA, 1002 bp, Bacillus licheniformis
atgattacatttgaaggcgttgaaaaggtctatgaaagcggcggacagaaggtccatgcgctcaatggaatcgaccttcatgtggataaaggggaaatatacggcgtcatcggcttcagcggcgcaggaaaaagcacgctgatccgctgtgtgaacttccttgaaaaaccgacggccggaaaggttttcgtcggcggaagagacttaatgtccctgtcgaaagctgagatacgaactgtgaaaaggaagatcggcatggtttttcagcattttaacctgttaaattcaaagacgattttcgctaatgtcgctgagccgcttgcgcttgttaaaacaccgaaagccgacataaagaaaaaagtgacggagctgctccgttttgtcggacttgaggataaagcccgcgattatccggatcagctttcgggcggacaaaagcagcgcgtcgggattgcccgggcgctggcgacaaatccggaggttctgctctgtgatgaagcgacatcagcgcttgacccgcagacgaccggcgatattttgaagctgctgaagcgcgtcaatgaacaatataacatcacgattctgttaatcactcatgaaatgaatgtggcaaaagaaatctgcgacaaagttgcggtaattgaaaaaggaagaatcattgaatccggcagtgtgtttgacgtattttccgcgccggaaaccgaaacggccaaaagctttgtcaaatcagccatcgaccacgagatacctgaatcgattcaaaaattaaatctgaagcacctctaccagcttcaatttgtcggcgaatcttctgggaagccttttctttctcaagtgtcaaagcggtatgacgtagaagtcaacattctgcacggaacgattacagagcttcagggaattccgtttggcagcatgacggtcgagctgcagggggaagatggtgaaatcgggcgggcgctcgaatatatacgcagggaaaacattcgcatcagggaggtataa

SEQ ID NO: 1070 - DNA, 651 bp, Bacillus licheniformis
atgctagttacatatgaccaaatcattgacgcactggttcagacgattcaaatgacggttttttcgcttttattttcaagcgtgatcggcattccgctcggcattttgctggtagtcacaagaaaggggcatctgcttgagaatccggcagtttttacgtttgtcaatatgatcattaacattttccggtccgtcccgtttatcattttaatggttgctttaattccagtgacaaggctgattgtagggacgtcgatcggcacatcggcagcgattgttcccttgactttttatgcggggccttacatcgctagactcgtcgagaactctctgcttgaagtggatccgggagtcattgaagccgctgaagcaatgggagcgactccgagacagatcatcttcaggtttctgattccagaagcgctcggttcgcttgtgctgagttttacggtggcaacggtcggattggtcggggcgtcggcgatggctggtgcgattggtgcaggcggtcttggggatttggcgatcacatacggctatcaaagatttgacacgctgacgatgatcatcacggttgcaattctcgtcatcgtagtgcaaggattgcagacatccggaaacgttctgtcaaaaaaattgagaagaagatag

SEQ ID NO: 1071 - DNA, 819 bp, Bacillus licheniformis
atgaaaaaatttgcatgtgttgtgatcttcctgctgcttgcggcagtgatcgcggggtgcgcggcagactctgatgcgaaaaccattaaaatcggcatcagcggaacggatacgagaatttgggactttgtgaagaaaaaagccgaaaaagaaggcttaaagcttgaaatcgtcaaatactccgactatgttcagccaaaccaggctttggcgagcggcgacattgacgccaacgcttttcagacgatatcctactttaatgcattcaaaaaggaacgcaaccttgaattatcgccggtcggcacaacgatcatcgctccgatgggcatttattccgagaaatatgattcgcctggcgatataccaaacggcgcggaaattgccgttccaagcgaagcgacgaacatgggcagagccttgcttctgctggagtccgccggcctgcttcaattaaaggacggatttgacggaaatggaacgcttgatgcaattaaagaaaatcctaaaaaactcaaaatcacaacggtggccgcagagcaaacgccgcgcgtgcttgccgatgtcgctgcatccgtcatcaacaacggcatagcggttgacgccggcttccatcctgtcaaagattcgatcaaactggaagatgaaacagcgacaccgtacatcaacattattgcggccagaacagaagaccgggatcgcgaagatttgaaaaagatcgtcgagctgtatcaagcagacgacactgctgaattgattaaaaaagaatttgacggagcacagctgccgactttcgttcctctaaaagacatcggcgaataa

SEQ ID NO: 1072 - DNA, 1386 bp, Bacillus licheniformis
atgacattatttgttgttattaatattatcgtcatgctcggcctgatggcgctcctttatatgatgcaaaaaaagcatgtttctttttctaagcgggtatttaccgctctgggaatcggaattgtttttggattcgctttgcattttatatatggttcgtcttcagaaacgattacgcagacttctgattggtttaatatcgcaggcggcggctatgtcaagcttttgcagatgatcgttatgccgcttgtattcatctcgattttgggtgcttttacaaagcttaagctgacgcacaatatcggaaaaatcagcggattgatcatcgggctcttaatcgcgacgacagccgtcgctgctgcggtgggtatcgcgtccgcgcttgctttcgacctgcaggccgtccatgtggaccaaggccaggcggagacaatgagaggggcggaactcgaacagaaatcgcaggacatggaagccaaaacgcttccgcagcaaattgtcgagcttcttcctggaaatccgtttttagactttactggagcaagaccgacatcaacgatcgcagttgttatttttgcggctttccttgggatcgcttatctcggggtcaaccgaaaacagcctgaacaagctgaacttttcaaaaaaatggttgatgccgtgtatgcgatcattatgcgtgtggtcaccttaattctgaggttgacgccttacggtgtattggcgatcatgacaaaaacgattgcaacgagcgacctcgacagcattgccaaactcggcaaatttgtcatcgcttcatatgcggcgctgatcgtcatgttcatcattcacctgctgctcattacattcagcggtttaaatcctgtcacatacttgaaaaaggcgtttccagtttttgtattcgcgtttacatcaagatcaagcgcaggcgctttgccgctgaacattaaaacgcagcgaagccttggtgttccagaaggcattgcgaactttgccggatccttcggactgtccatcggtcaaaacggatgtgccggcatttaccctgcaatgctcgcgatcatgatcgcgccgactgtcggccaaaatccgcttgatccgtcattcttgttcacggttatcgcagttgttgcgatcagctctttcggagtggcaggcgtcggcggaggtgcgacctttgcagcgcttctcgtcctttcggcattaaacatgcctgtagcgcttgccggacttctgatttctgttgagccgctgatcgacatggggcgtacggctctcaatgtcagcggcagcatgacgtcaggacttgtcacgagcaaagtgacaaatgagcttgaaaaagacacgtaccaagaccgtacaaatatcattgaagcagaagtgtaa

SEQ ID NO: 1073 - DNA, 342 bp, Bacillus licheniformis
ttgtttagaagaagatctggcatccatcccgctgtattagttttaggatcagctgcattaaccgcggctttttctcccgaaatccgcaaaagattgaccggcatgttcgcgaatggcatgagaggacggcagcaaggaagcggccgcaatcagacgatgatgaatccggctgacatgatcaagcaggcttttaatccgggaggacaatcacatgaacaccgccagtcaggccatacggcaaatgaccagcatcaatcaagccatatgactgctccggtgaatgtcatgaacgatcaggctgcagctcagacgatgttcgatgacgatcaaagctattcataa

SEQ ID NO: 1074 - DNA, 1797 bp, Bacillus licheniformis
atggaaaaagcggatagcattttgcatgcgctgcgcattaaagactttgcggtacatcccgatgagactcagcttatttttgatacaaacctcaacggaacatcgaacctgtgggcgatggatcttcccgatacatacccgtaccagctgtcattcttgaatcaggactcaaaaggaattgcctacaatcccgacggctcaatcctttatgctggttttgacaatgacggaaacgaacaaagcggactgtacaagctttctttaaaaaacgggacgttccaatcattaaacggaaatcaaacagaccgccacttcgcccccatccctgtgcaaaacgcagtttactactcctctacaaaggacaatccgacatttttaaatacatacagatatgattgtctcactgaaaaagaagagcttatttttgaaggaaaagacggaacttcaatgctgtctgatgtaagcccgggcgagaaagccgtcagcatacatgtctactatgtcaacagccattctgtctgtatggtccatacagctgaaggcgtgacgacaggaatcttcccggatgagacgctgcctcacatggtttattcttcccattttgcatctgatgatcggttattcgtcacgacaaactacgaagccgagttctcatatcttgccttgtacactgtttcatccggtatttttacgccggtgctttcgattgataaaactgatttaacatccatccacgctgacccgaatggaactttcctttatctcattggaaaaaaaggtgtcaaagaggtgatgtatgagtacaacacagcaacggggcaaagccggcagatcgattgcccttgcacatccatttcgaaaatacactgcgcctattctggtacgctgtacattctcggctcaacgccgaccaggccgactaatctctacgtattaacgaaaggacagtcaaaatggcggcaattaacgaaacattcggttccgggtttctccgaacaggagctgtcttatcctgaagttgtgacatatccttcttttgatggcctgccaatagaaggactgctgtttaagccctccccggtagaagcgaacggctggacgattatttggccgcacggcggaccgcaagatgcagaaacctttatgttctacgatctctttcaactcgctgcaaaaatgggttaccagttattcgctcctaatttcaggggatcagcgaattacggttattcattctttaaaatggttgaacaagattggggagacgggccgcgcctcgatatgaccgcgggcatcgactggcttatcgatcaaaagcttgcagaccgcgaaaaactctttttaatgggcggcagctatggaggatatatgtcgcttttgctccacgggaggcatcctgagtatttccgcgccgtcgtcgatatatgcggagtcagcaacctgttttcgttcgtcaaaaccgtacctgatttctggcagccgatgatggaaaaatgggtcggcaatccggagcgggattatgaaaaaatgaaagccgattctcctgttacatatctggagaatatgactcagccgatactgatcatccaaggcgcaaacgatccgcgcgtcgtaaaggaagagtccgatcaggtcgtcgatcagttgaggaacatggagcggaatatcgagtatctcgttttggaaaatgaagggcacggtttttccaaaaaagaaaataaaatgaaagtctaccgcgccattttcgaattttttgaaaagcaccgcttatatcacgcggccaaggttgaagaataa

SEQ ID NO: 1075 - DNA, 561 bp, Bacillus licheniformis
atgttcaatatgaaaaaaggcgcgattgctgctttgctccttccgctgctgttcacagccggatgcggcatggcaaaccaaggggcagataacaaccggcgcaatcaggacaatgcgcttcaaaatgtaacaaacagagataacgacgctacgaatgtcaatgacggcagaaatgtcaatgaccgaatgaatgtgacagacaaccgcgatgccaatcgtgaagacaataatatggaagtggcggataaagccgcagataaagtggcggaacttaaagaagtcagtagtgcaaacgtgattacgacaaaccgcaacgcttatgtcgcggtcgttttgaaaggcaatccgaaaggcaacttgacgaatgagctgaaagggaaaatctcgaaaaaggttaaagaaacagacaataacatcaacaatgtgttcgtttcggcaaaccctgactttgttgaccggatgagaaactatggcgacagaattcaaaatggcgaaccgatcgaaggactttttgaagaatttggtgaaacgatcaacagaatttttccgaatcaaagataa

SEQ ID NO: 1076 - DNA, 882 bp, Bacillus licheniformis
atgaaagcagcctttgttttaatcatggcgggcgctctatccgctctgttattggccatttttgtcgtgttcagccaagagagccctgaggcggctgtgctttcgggaaaaaaagaaaaactgaaagaatcgctggaaatggtcaaatatgaaagtgtcagcatttattacgctgaaaaagataggccgattctggagctgacaaaggaaacgcttcgggatgccgctgatatgaatcgggaactgtttgtcagtcctcttcaagacagcgttgatttgatctttttttcaaaccgcgatgatatggagtcattttcaaaattaaaggatataaccggattttattcaaacgatatgaggatgatcgggcttttgcccgaggagaggaagcatctgaataacggcgagggattcgccgtcttcctgtacaaacgggtgctggtgcatgagtatacccattatgcttttcacgtcaagctgagagaactgaatgccgacccgggaacttatccgctctggtttcacgaaggagtagctgaatgggcttctgctcatgacgcgatagaaatccggactttgccttcagtcgtccccttgagcaagctgaagaccgaccggcaatggcaaaaagcccggactggatatgaaaccgatatttatttgcaaagttattatttgatcgaagagcttgcggagaaaaaaggaaggggcgtcatcctcgacattatcgaggaaacggctgagcggggaagttttgcagacggatttaaggccgccgtcggccagtcgttgacaggttttgagaaagaatttaaacgaaaatacgaagcgaaaaaaacggcgttgaagtttcatcttcaatgccgttttcatgatcaatga

SEQ ID NO: 1077 - DNA, 648 bp, Bacillus licheniformis
gtggaacagcaaaaccagccgcaaatgcagatcaatcaaggcaatgaaggtatgcagcatatgaatcacggggggcacgaagtgttcgacatgcatgaagtgctgtccggaatgatcggcgtccttgagcagtatatgatgttcagggagcatgtcaaagatccggagctgctcgacattttggacaggcagcatcggtttatttcgtctcagtacaacattacgacagaatgtttcagaacggggcaaaagccgagtcaggaaacggcaacgtatatgatgaaagaggaccgcaaattcgtctacggtttaaaagatgcccagccgaaacaaccgaagcaatctgtgcaggctattgatgacgcctgcatcagcagctttatgctcggcttgatgaaaacttgttgttcgtcgctggccatggcggctcccgaagtgacaaaccctgtctgcagaagggttctggcagaccagattcctcactatatcgaaatggcttatgaaattttcctttatcaaaacaaacacgggtactatcaagttcctcagcttgcgccgcaagacatgcagaagatgacttcagcattcgctcaggtgcaaggtcagccgcaaatgcctccaagcgggcagcagagacctattcattga

SEQ ID NO: 1078 - DNA, 144 bp, Bacillus licheniformis
ttggcagctgaaatcgtttacggagggagaatcctttacagatcacgcaggggcaataaaaagttgcaggcattagaagccagatgctttcatgccgatatcgagccgggcattgctattcaattgtttttcggtcgtttctga

SEQ ID NO: 1079 - DNA, 2025 bp, Bacillus licheniformis
atgctgggctcaagtgagacggttggaaaaaagtcaggtttatttggtaatgattctgtgtatccaaaggtgcaaacagaagtatataaaaaaatcaatgaactgagtggttttcataggctggatgatatttatctttccttgatcgacaagtatatgtttccttgtctgatcctgaatgaccggggagaaattgtcgcgtcctcggaaagtgctgatcaatatttgaaaagctcaaaaggcagcattcatcaggtttttcccgcgagcttatccgtacaggtcaatgccgcgttacagcgggcgaagaaagagaaaaaagaagtatcgtttaaaaacgtcccgatttatttaagcggagaactatcctttgttcatttgagattaaaatgtttcttccgccagtatcacaagctttatgtgctgtttatcgaaaaagcacaagaaggggcagccaacgcgccggtatccggcggagaggacggacagcttcatctgcaacatctgtaccggacggtaaaagagctcgaagcgtccaacgatgctttagtgtccgcaaatcaaaagctgcaggaggaaaacagaaaattgacggcgctcaacagggcgtttgaaaagaaagtgaacgagctgaacacccttaaaaatgatatgaacaatctgctgaccagcacgaacatcgccgcagtttttttggatcaggaattgaaattgaaattatttactccagaagccgccaatatgttcgacctgaaaaacgaggacctttcaagacctgccgataagctgacagagaggtttaagtatgaagggtatgccgatgacttaaggcgcacgctatatgaaaacaagacggtcgtaaaagagtttgaaatgccagacggcggctggtatgccgtaaaaatgatcccttattatacatcgggaaacatggttgaaggcattgttgtcacattcacgaatgtcactgagctgaaaatgacaaacgaggcgctgcatatcagctcacaagctatagatcaaagtccggccaacatattgatcacttcggtcgacggttcggtcacttatgcaaacaaacgcttttgccggatgttcggaaaacatcaggatgacatcatcggcggcaatgtgtttgatatttaccgcaagcattttcactgtgaggatctcactcgcttctggaaacgcgtccttgaaaagaaaccatggtcaggagaacttaattaccaggatgaggagcagcaggacaggtgggagcaaatctcccttgttcctgttgaggacagcgcggggaacgttcagcaggttatgctgatatccgaggacattacaaaccaaaagcgatctgaaaaaatgctcatgaaatcggaaatgctgtcggcggtcggccagctagctgccggaatcgctcatgaaatacggaacccgctcacttctctgaaagggtttctccagctgatgatccaatccaaaaaatatcaaaaagactatgcggaagtgatgatgtccgaattcatcaggcttgaagcaatcatcaacgaatttctcgtattggccaaaacgaaatcgaatacatttgatccggttcaggtcaactcgattgttgaagatgtctgcatggtattggagtcgcaggccgtgctgaacaacgtaaggatcgagaaacagctgagcggagatctacctgagattctcgctgtttcaaatgagctgaaacaggttttcatcaacatattaaaaaatgcaatcgaggcgatggaggatgctgaaggctttattacgatacgttcctattttgaaaaagacagcgtattcatcacctttgaagatcagggaaagggcatctcaaaagaagtgctagaaaagcttggggagccattttatacaacgaaggaaaaaggaaccggtctcggattaatggttacatttaaaattattgaaaatcacggcggaagcattcatttcgaaagcgaagaaggaaaaggaacgatcgtaaaattgaagcttccgattaaagaatga

SEQ ID NO: 1080 - DNA, 120 bp, Bacillus licheniformis
gtgattgtcaaaccagccataaaacggctctttacaacattgaccatatattcgcctcccgttttttgcttcctgtcaaatttatctgatgattataaaggctatatgatttttttgtaa

SEQ ID NO: 1081 - DNA, 3621 bp, Bacillus licheniformis
atggtcaatgttgtaaagagccgttttatggctggtttgacaatcacgtttatgatgattgcgtcttttttgacgccgtttgcggacgtaacgcacgcttcagaaacgatttcagtagaagaagccattaagcataacgaagggcatgcagccgttgaaggctatgtcgtcgggcacacaatatcgagcggccattatcgtttcagcggaaatttcgctaacgattataacgtcgcaatcgctgataaaaaggaggaaacatcacctgagaacatactccccgtgcagatacccgcacctttcagagaccagttcggtttaaagacaaaccctcatctcatcggaaaaaaactcatcatcgaaggcgaacgcactacatattttaattccccgggtttgaaatctgttcaatccatcacattttccggagacgatgcaccgtctgcccagccggagaccaaaacgatagccgaagcgcgcaagcttttaaatgaaacggtcaaaatcaaaggaatcgtcactgccgatcaggcggctgtcggaggaggaaagctgtccacatttatccaggacgatacggcgggaatcaatatctattccgctgcgcaaggcgattttccggaactaaaagagggtatgtctgtttcggtcacggggaaaatcacgacatacaaaggcttgacagaaatcgtacccgcaccgtcaggcattgaagtaaccagagaaggggcggcactgcccgaccctgttccgctgactattaaagatgtgctcgatcagggaaccgcagctgaatacgaaggccggcttgtgaggatgaaaggctttattgaaacaaagccggatgcgccggcaggcggcggctataatatcacaatgatcgatgaaaactatcatccgctcacactaagggtgatggaacaaacgaatgccgccgcttcgatagaacaaggacaatggtacgagattaccggcatattaagccgctatgatgcggtgcagcttctgccgagaaaacaggaggatcttcggaaattagacggcgccgcgcatcctccccccgctgctgaaggggaatacgaaagcgttgtggaacgagtcgtcgacggggatacgatccacttaaaagagcctgttctcggatctacaaaagtccgctatgtcaacatagatacagccgaaacttatcataagccgaaaaatgaattagatgaaaaccagctgcagcacggaaacaaggcgaaggaatatttgcagtcgatattggccccgggagacaaagtcaccgtgaaagtgggcaaggaagcaaaagacagctacggccgcctgcttgcccaagtcatcactgaagacggcgtcaatacgaatttgcagcttgtccaaaaggggatggctgtaacctacttcatttggccggttggaagtgatgaagactatcaattgtttcaaaacgccgtcaaaaaggcgaaaggcgataaaatcggcatttggaatcccgctgatccgctcctcgaaatgccgtttgaatttcgcgccagggagcaaggcaaagggctgacgcggcatgtcggagactctccggaaaatacgtatgtcgcgcctgaaaagtggcgggagattccggtggaaagacgaattttctttgcgtcggctgaagaagcggaagctgcgggctattcgaaaaaagagcaaagcggcaatattccgctgcgcctgttaagcatgaatgatctgcacggaaagatcgatcagcaatatcagctcgatctaaacggcgatggccggacggatggaacattcggcaggatggattatgcagcatcattgatcaaagagaaaaaagccgagcaggaaaacacgctgatcgtccacgcaggcgatatgatcggaggaagctcgccggtttcttccctgcttcaggacgagccgacagttgaagtcatggaggaaatcggatttgatgtaggaaccgtcgggaaccatgagtttgatgaagggaccgaagagctgctgcgcatgttgaacggaggcgaacaccctgaaggcaaagggacaaaaggttacgacggacaggatttcccgcttgtctgcgccaattgcaagttgaaggcaagcggggacagctttcttcctccatatgaaattattgaagttgaaggagtgcctgtcgcttttatcggcgttgtgacacaggcggccgccaatatggtcatgccagaaggaattcgctcaattgaatttacagatgaagcaaaggccgtcaaccaggctgcaaaagaactgagagcgaaaggtatccgggcaatagcggtgctcgcccatatgacagcttcacaggacggcggggttgtgaccggcgaatcagccgaacttgctaaaaaagcagatcccgagatcgatgtcatctttgccggccacaatcatgaagtggtcaacggccaagtcaatgatattttaatcgttcaagcatacgaatacgggaaggcaatcggtgtcgtcgatcttgaaatcgaccgggaaacgaaagacatcgttcacaagaaagcggaaatcgaatatgtgaatcaggaaaatctcaagcccgatccggcggtcggtcagatactggataaatatgagcggatggttgcgccgatcatcagcgagaaagtcggtgaggctgcgcacgatatggccggcggctattcaaatgacggagacacccctctcgggaatctgattgctgacggtatgcggcaagcgatgaattcagatttcgcattaatgaacgggggcggcatccgccaagatttaaaaaaaggaacgattacatggggagacttgttcaatatccagcctttcggcaatgtactcgtccggcttgaaattaaaggcagggatttatacgatattatagacgcgcaaatatccccatcttacggcccggattactcgatcagcggcttcgcttatacatgggacccgaaaacaaataaaaccgcggctatttttcttgaagacggaacaccgattgatttagaccaaacatatacgctgaccgtaaacaactttatggcatctgcttcaggaagcaagtatttgccgatttccaggcttggaaaaaatccggtcacaggtccggaagatatcgaagccacagtcaaatttgtcaaaagctttaaagaaccgatcgcttatactgccgaagggcgaatcaaaaaattagcagaagatgattcgcgtccgggagaacagcccggacgcggggctgatccagatgacaaagaaaaacccggaagcggaggcgctgatccgaatgacgaagaaaaaccgtctggtgataagggcgatggggggaaacccggcaatgacaccggagaaagtccggttcatgacggtaccggcaatgcttcaaggagcggcgctattcctgttgcgggcatgacgaccggtgaaggatcagatgcgcctgcggagaagatggacggtctgtcaaatgatgcgtttctgccagacgagcgtgaagagcgcaagctacccgatacggcggcagcttacggcggtttccttttatacggcttcctgacgtttatgttcggagcgattctttatatgcggaaaaggggtattgcgagactatga

SEQ ID NO: 1082 - DNA, 591 bp, Bacillus licheniformis
atgaaagtcaagatgttatcgtttctgctgatgatagcggggcttgccacttttgcatacggcggctggaaaatattcgatatgaacagacagacggatctttctttaactgaagcaaaagaagccattgcatcgagtcaatccgcccgttcggctaaccacccatcggcgcccgcttcatttaagcccgccgccggcgaagcggcaggcatactccatattcccaaactgggcgcagagcttcccatcgttgaagggaccagtcccgatgatttggaaaaaggcgtcggtcattataaaggcagctattatccaaaacaaaacgggcaaattgttctttcaggccacagggatacggtttttcgcagaacaggggagctggaaatcggagataagctgaaaatcgagcttccatacggaagcttcgattatgaaatcacacacacgaaaattgttgaccaaagtgacacgtccatcatcacgctgcagcgtgaaaaagaagagctgctgttaacgacatgctatccgttttcttatatcggaaatgcgcctgagcgctatattatttatgcaaagccgctgaaaggatga

SEQ ID NO: 1083 - DNA, 918 bp, Bacillus licheniformis
atgaaccaaaaaaatcacggcttattcttcagtgcagacatacggcatcacggcgaacttttatatgcatatttaaaaagagaggcgaaagcatcgaagcctgtcattcaatactggatcgcaaacgagaaagttaaagtgaatcataaatcggtgaatcataacgttcggctggagagcagagacagcgtgatgatcgatctcagagaggaggaagaaagcggaatcgtccctgaatacggggaacttcccgtcctgtttgaagatgatcacatgcttattgtcaataagccggcgggaatggcgactcatccgaatgaagccggccagaccggcacgctgagcaaccttgtggcgttttattttcaaatgaacggggaggagcgaaaagtccggcacgtccaccgtctggacaaggatacgagcggcgctgtcgtttttgcaaagcaccgcctcgcccacgcgcttttagacgaacagctgcaaagaaaagaactggcgcggacatatgtagccgtagcggaagggaaattcagaaaaaaaacgggaaccatttcggcgccaatcggcagagacaagcaccaccccgtcagaagaagggtgtcccattccggacagcccgctgtcacccattttgaatcgaaaggatatgacagccgtcacgatgttacactgtgcagacttcagctggagacaggccgaacccaccaaatacgcgttcaccttgcaagcatcggtcatcctttatcaggcgacaccttatacggcggttcaaaggggctttttcagagacaggctcttcacgcaatcgagatcaatgtcacccatccgatcacaaaagaacgtgtcactgtcgcggcactgcttccggatgatttaaaagacgaaatcggacgactgttcggcacggttgattaa

SEQ ID NO: 1084 - DNA, 360 bp, Bacillus licheniformis
ttgcgaattgtaaaggcagcaactgaagaacaagaaatttatatcgaagagcttgtatcagagctgtatcaaatatttccattgtacttgaataaacaaaaaataaaagaactcaaaaagcagggcgcgcttcaattgaaagaggatgaatacaaaggaacgctcgatgaagcgtttcagattatgacaagcctgcaattgatccatgcattattaactaaggcgaagcgcaagtgggtgctcaaagaccgtgatctgttcgataaaaatagccgcaagctgaatgactgcggtctgtacttccctctaacatctgccgactttcatatcgtgaataccgagaataaaatgctgatgtaa

SEQ ID NO: 1085 - DNA, 426 bp, Bacillus licheniformis
ttgacgacaatcagcaatgcgatgtctagacaagtggcaacaatttcttccaatcaaacggttcaagaagcggctgagttgatgagccgccataatgtaggtgcgattccggtcgtagatcaaggcgtattaaaaggcatgatcacagaccgtgatatcacgctcagaacgacagcggaaggccaggacggacagacacctgtttcaaacgtcatgacaacaaatgttgtttcaggaaatccgaacatgagccttgaagaagcatcacagctgatggctcaaagccaaatccgccgtctcccgatcgtcgaaaacaaccatttagtcggcattttggcgctcggggatctggcggtaaacgaattgtccaatgaatctgccggacaggcgcttacgaacatttccactccggcacggactcagtaa

SEQ ID NO: 1086 - DNA, 663 bp, Bacillus licheniformis
atgattaaagcagtgatttttgattttgacggtcttattttagatacagaaacgcacgaatatgaagtgctccaggaaatttttgaagagcacggctcagagctgccaatgtcggtttggggaaatgtcatcggcacggccgccggattccagccgttttcttatctggaggaacagctgcaaaaaaaactggaccatgaacaactaacgaaattgagacaagagcgttttacgaaaagaatggaaaatgaaaaagcgcgcccaggtgtggaagcttatttgtccgcggcgaaagagctcggtttaaaaatcgggctggcgtcaagctcagattataaatgggtgtcccagcatttaaaacaaatcggtctgtacgatgatttcgaatgcatcagaacggccgatgatgttgaggaagtcaaaccgaacccggaactctatttgaaagcggcggaatgcctcggtgtgaagcctgaggagtgcattgcattcgaagactctgtcaacggatcaatcgccgcgaaaagagccggaatgaaatgtgtcattgtaccgaataaagtaacgaaaagcctgctgttcgagcattatgaccaccgcctggaatcaatggcggaaatggagctggaacagctgatcgaaaaaatctccgatccatcataa

SEQ ID NO: 1087 - DNA, 1539 bp, Bacillus licheniformis
gtgtccgaaaaactggatctttcccgctttgaaaaaaagatcgtcatccgcaatattgaagaaaaagatatcgacagcatcatcgggcttcaagagctttgttttccgggaatgatcccatggaaacgggagcatctggaaagccatttggaacacttcccggaaggccagttttgcgcagagcttgacggagaagtgatcggttcctgttcaagcctgttgatcaactttgatgaatatgacgacagacatacatggcaggatattacagacgacgggtatattacgaatcacaatcccgacggcttaaacatgtacggcatcgaggtcatggttcatcccgaatacagacggatgaagatcggccaccgtctctatgaagcgcgaaaagatctggcaaggcgcttgaatttaaagagcattatcatcggcggcagaattccgaactatcataagtacgcttccgagatgacgccgagggagtatgtcgaacaggtcatccaccaccagatatatgatccggtcctttcgttccagctgctgaacggattcaccatgatgcggatcaacccgaactatctcccggatgacagagcatcaagcaaatatgcgacattgatggagtggaataatgtcgactacttgccgcagacgaagcgctattacaaatcagcttttccggtgagaatatgcgtgattcaatatgaaatgaagcagatccattccttcgaggagttcgccaaccaagtcgaatactatgcagatgtggcttcagacgcaggagcggattttgccgtctatccggaaatctttacgacgcagctgatgtcgtttctggaagagcgctcaccgagcctggccgttcagcggattaccgaatatacagaagactatatcagcctgttcacagaccttgccgttaaatacaatgtcaacattatcggcggttcccacttcgttgaagaagaaggaaagatctacaatatcgcttacttgttcagaagggacggaaccatcgaaaagcaatataagctccatattaccccgaatgaacgaaaatggtggggcatcagcaggggggacgaagtgcgcgtctttgacacagactgcggcaaaatcgcgatccagatctgctatgacatcgagtttccggagctaggcagaatcgcaaccgaaaaaggggccaagattatttttacccctttctgcacggaagaccgccaaggctatttgcgagtcaggtactgcgctcaagcaagagcggttgaaaaccaggtgtacacggttatttccggaacggtcggcaatctgccgcaaaccgaaaatatggatattcaatacgcgcaatccgcgattttcgctccttcagattttgaatttgcaagggatggaatcgttggcgaatgcaatccgaacattgagatggtggtcatcggcgatgtcgacctggaaattctcagaagacagcggcaggacggaacggtccggcagctcaaggacagacgccatgacatctacaggattcattataaaaaatag

SEQ ID NO: 1088 - DNA, 135 bp, Bacillus licheniformis
atgaatcaaactggtaagcgcatgacggatatgcaagcccatctgtatatttgtcgcgcgattttttccggggaatgcgtattacgggatcagtctgcccttttttacacattaaattggaaaaaataccagtga

SEQ ID NO: 1089 - DNA, 1629 bp, Bacillus licheniformis
atgattatatgcagtttgcaacatgtcggtcaaacttacggaggacatacgattttcaacgggctgtcatgggacctgcaccaaggggagcgcgtcggtctgatcggacgaaatggggaagggaaaacgacgttgttgaagctgatcagcggccaaatgaaacctgatgaaggtcttgtgacatggaaaaaaggattatcaacagggctcttggagcagaatcccgcatgggacggcagcaaaacggtaaaagagctgctgtatgatgttttttcatcattatggaacacacagcagaagctttctcggatcgaacgtcaattggcggttgaaaaggacgcggaaaaactcagattccttttggaaaagtacggggctttgcaggatgaatttcagcgaaaaggcggctacggcatcagcgcgcaaatcgaacgggtggcgcacggcttgaatatcgagcggctattcaatgccgagtggcgggagttaagcggaggcgaacggacgaaagcgggtcttgcaaggcttctcctgtcagctccggatctgcttttgctggatgagccgacaaaccatttggatttaacatcgatcgaatggctgacgtcttttttaaagcagtacaaaggtactgcggtcattgtgtcgcatgatcgctatttcctggatgaatcggttacttcgattctcgaaatcgaccaaggagagcttcacttttcaaaaggcggctatacacactatgctgatgaacgggaagagcgccttatgagagaatttcatgactatcaggatcagcagaagaaaatcaaaaaaatgaaggaaacaatcaagcggctgaaggaatgggcgaatcgcgccaatcctccgaatgacggcctgcaccggagagcgaaaagtatggaaaaagctttggagcgcatggagaaggtgaaaaaacccgttctggaacgcaaaaagatcgacttagttttcagcatggatgaacgaagcggaaaagatgttgtcaggcttgaggatgtctgcaaaagcttcggtgagcggcagctttttgacaatctcagtatgcatgtccgttttcaggagcgcgccgccatcgtcggagagaacggcagcggcaaaacgacgctgctcaacatcatcagcggaaaggaaacgccggacagcggtgacgtgcagcttggcagcaatttatcggccgcatatctgactcagcatgtcggtgaaatggaggaagagcgcaccgttttagccgaattccgtgaacatgtttctgcatcagaaggcgaagccagaatgatgcttgcaaagtttttgtttttcggccaatccgtcttccgaaaagtgaaagatttaagcggaggcgaacggatgcggcttcgcttggcacagctcgttcaccaaaatcataatgtgctgatcctcgatgagccgacaaaccatttggacatcgaatctaaggagatgcttgaagaagcattaagccaatttcaagggacgattattgcggtttcgcatgacaggtactttcttgaccggcttttcaatgtcatctggtggcttgacggcaggaaactcgtcaagtatgaaggaaactatacattcgcaagggagaagcggcagcagggttga

SEQ ID NO: 1090 - DNA, 801 bp, Bacillus licheniformis
atggcttttcgaaaaccggatgaaatagcgaatgcagcaattgaagcagggatgaaaaaagtacagctcccgctgccgtctctgcttgtattggggtttttaggcggcgcatttatcgcgcttggttatttgcttgatatcagggtaatcggcgacctgccgaaagaatggggaagcctgtccagcctgatcggagctgccgtatttcctgtcggtctgatactggtggtgctcgctggcgctgaattgatcacagggaatatgatgtccgttgcgatggctttattttcaagaaaaatatcactaaaacaattggcggttaactggggaatcgtcacgattatgaacttaatcggcgcactgtttgttgcttactttttcggacatttggttggattgactgaaacaggcccttatttagaaaaaacgatcgccgttgcacaaggaaaactagatatgagcttcggcaaggttctcatttccggcatcggctgtaactggcttgtatgtcttgcggtatggctttctttcggcgcacaagacggagcagggaaaatccttggcatctggttcccaattatggcgtttgtggccatcggatttcagcacgttgtcgccaacatgtttgtgattcccgcagccatttttgcaggctcattcacctgggggcagtttatcggaaacatcattcctgcttttatcggcaatgtcatcggcggagcggtgtttgtcggtctcatttattttattgcatatcctaagaaagaccgctccagaaaagaaatgaagcaggtatcatga

SEQ ID NO: 1091 - DNA, 378 bp, Bacillus licheniformis
atggacatttccaggcgggacataggcatcggcgaatgtccatatccgttgttcggtggtctaagtaaaaacccctccactttccggatcagtcgtactgtagctgatctcggttcgaattcttacggatttttaaaccgtttgttaatcatcatatcgctcagcccctctcaaatccgcttcaaccgaagctgccgcaggcaaataaaaaccgcagacaaaagaagacaccaatgcctctactgcctgcgggacataccgccaatttctatttttaatcatctttttataaaaatggcgtttttatgttttatcgagcggatttgccctttgttcatgatacctgcttcatttcttttctggagcggtctttcttag

SEQ ID NO: 1092 - DNA, 912 bp, Bacillus licheniformis
atggagtttctgtttgttttactgccggttttcgggatatttgcgatcgggttcatcggacaaaagctgcttcattttgatattcagaacctatcgaaaatgtccctgtatttaatgtctccgtttttagcgtttgatacgttttatgagaacaagctgacgatggattatatttatatgtctgtctattgtctcggcctctgtttaactttgattctatttgtctacctcatttcatatgttcacggatattccaatcaggagcggtgcgctctcgttttatcatccgctttcatgaataacggaaactacggaactcccgtcgtcctgcttgtctacggcacggccgggcttgatatcgccgttgtgctgatggttcttcagcagcttgtcatgagcacgattggcatgtattacgcagcgaaaggaagcccagaagcgggcggatttaaaatcgtgatgacgagggttatccggatgccggtcgcatacggtgcgctgctcggcatatgctttcagctggggcatatttcgattcccgaacagttaatgacaggaattaaattggtgggagatgccgcgattccgacgattatgattattctcggcatgcagcttgcggtgatttcctttcaacatatcgaataccggaaaatttcttactcgcttttgctgaaattattcgtgtctccgctcattgccctggggtttgcgctgattcttccggtcgacgggctggtcaaacagatcatggtgttggcggcggccatgccgacggcggcgaacacgactttgatggccgtacagtttgaaacaaagccggaaatcgtttcaagcgcgacttttatcagtacaatgctcagcatcgccacccttccggtggtgctgtggctgctttcattatggggctga

SEQ ID NO: 1093 - DNA, 993 bp, Bacillus licheniformis
atgaaagcgatcatccatgaaggaatcaagggcctttcagggctgaaatatacagacgtttccgacaaaacgcccggccccggtgaagtcaaaatcaggctgaaagcagccgggctgaaccaccgcgacttgttcctttttcagtccagaaaggcaggcgatgccccgtttattcccggatccgacggagcaggtatgatcgaagagacaggtgaaggcgttcgggacctcgccgttcatacagaggtgatcatcaatccgagcatcggctgggaatatacggattccgttccgcaagtgccggacattctcggcggcccctctgacgggactttcgcagagcatgtcatcgtcccggcgaagcacgtgttgaaaaagccggcgcacctttcctgggaggaagcaggcgtcctgcctttatccgctctgaccgcttacagggctttatttacgaaaggacatttagaaaaaggcgaacacattctcataccgggagccggcggaggcgtcgccacaaatgcgctgctcatggcaaaggccgcgggcgcgcgggtgattgtaacctcccgaagcgaagaaaaaagaaaagaagcgctccgctatggggcggacttcgcaattgacagccgcggcctgtggaaggaaagcttggatggggaacgggtcgatttaattctcgacagcatcggtcccgccacttttgcaaattatttcgatgtcattaaaccgaacggaaggatcgtcattttcggtgccagctctggagacagtatccagcttccgctgcgctcgctctttttcccgcagatcagcatcatcggcacttcgatgggcagcctcgaagaatttcggcaaatgattgattttatcgaacgccattcccttaagccggtgatcgatcaagtatttcctttatcagaagcggttccggcctttaaacggatgaaagacggggagcagtttggaaatatcgcattgcaaatagacgggtaa

SEQ ID NO: 1094 - DNA, 558 bp, Bacillus licheniformis
atgagttttcacgatcaaaatattttacctgcggtacgcaatatgaagcagttcgatacattcctggacagccctttttcatacggggtgctgcttgacatccatcttggacagctgggaggcgtgatcagcgcggcaagatcccatgggaaaaaaatgtttgttcacgtcgatctgatccaaggaattaagcatgatgaatacggtgcggaattcatttgccaggaaatgaaaccggcgggcattctttctacgagatcaagcgttatcgccaaagcaaagcagaagaaagtgtatgcgatccagcgcatgtttttaatagacacaagcgccatgaagaagagcattgaattggtgaaaaagcacagacccgactatatagaagtgcttcccggagtagtgccggaattgatcagggaagtcaaagaaataaccggcattccgatctttgcgggcgggtttatccgtaccgaaaaagacgtcgagcaggcgcttgcagcaggggcgtccgcagtcaccacctcagacactgatttatggaaaaaatactggaactaa

SEQ ID NO: 1095 - DNA, 816 bp, Bacillus licheniformis
ttgacagcattttggggggaagttatcggaacgatgctgctcatcgtctttggagctggagtttgtgcaggagttaatttgaaaaaatcgctgtcccatcaatccggatggattgtgatcgtcttcggctgggggcttggcgtggccatggcggtatatgccgtcggcggcatcagcggagcgcatttaaatccggccgttacattggggctggcatttgtcggagattttccttgggaagaagtgccttcatatattttgggacagatgatcggcgcatttttaggagcggtgctcgtttttcttcactacttgccgcactggaaagaaaccgaggatcaaggcgcgaagcttggagtattttcgacaggtccggcgattccaaatacatttgcaaacctgttcagtgaaacattggggacttttattctcgttctcggacttttaacgatcggtgcaaacaagtttactgacggactgaatcctcttgttgtcggatttctgatcgtggcgatcggtatctcgctcggcggaacaacaggctatgcgattaaccctgcccgcgatctggggccgagaattgcccattttgtccttccgattgcaggcaaagggagttcaaactggaagtacgcgtggatccctgttttaggaccggcgcttggcggttcatttgcaggcgttttttacaacgccgtattcaaagggcatatcacaaacacattttggattgtaagcgttatactagttgtgatattgttaggtttctatattcatatgaaaaaacaagcagttgatcaatcggtcaacatttaa

SEQ ID NO: 1096 - DNA, 1491 bp, Bacillus licheniformis
atggaaaagtacattttgtctcttgatcaaggcaccacaagcacaagggcgattgttttcaacaaagcaggcgaaatcgtccatattgcgcaaaaggaattccagcaatattttccaaaccccggctgggttgaacacaatgcaaacgaaatctggggctctgttctgtcggtgatcgcttcagcgctttcagaatcggggatcgaagccggacaaattgccggaatcgggatcacaaaccagcgggaaacgaccgtggtttgggataaacataccggcaaaccggtctacaacgcgattgtgtggcagtcccgccaatcggctgagatatgccaggaattaaaagagaaaggctatgaagagacgatcagagaaaaaacagggcttttaatcgatccttatttttcaggcacgaaagtgaaatggatcctggatcatgtggaaggggcaagggagaaagccgaaaacggcgaccttctcttcggtacgatcgattcttggctgatctggaaaatgtccggcggaaaagcgcatgtgacagattattcaaacgcctcaagaacattgatgttcaacatctatgacctaaaatgggatgatgaacttctcgatattctcggcgtgccgaaatcgatggttccggaagtcaagccttcatcgcatgtatacgctgaaacggtcgattatcatttcttcggcaaaaacattccgattgcaggtgcagccggcgaccagcaggcagcattgttcgggcaggcttgctttgaagaaggaatggttaagaacacgtatggaacaggctgctttatgctgatgaacaccggcgagaaagcgattaaatcagagcacggcctgctgacgacaatcgcttggggcatcgacggaaaggtggaatatgcgctggaaggcagcgtcttcgtcgcgggttccgctattcaatggctgcgtgatgggctgagaatgtttaaagacgccaaagaaagtgaaaaatacgctgtaagagcagaatctgccgatggtgtttatgtggtccctgcatttgtaggtttaggcacgccttattgggacagcgatgtccgcggcgctgtattcggactgacccggggtacgacgaaagagcattttatcagagcaacgcttgaagcgcttgcctatcaaacgaaagacgtgctggacgcaatgaaggaagactccgggatcccggttaaaacgctgagagtcgacggcggagctgtcaaaaacaacttcctgatggattttcagggcgacattttagatgtccctgtagaacgtcctgaaatcaatgaaacaacagcgcttggttcagcctatttagcgggccttgctgtcggcttctggagcgatcgttccgagatcaaagaccagtggcagcttgacaaacgttttgaaccgaaaatggaagaaaaagagcgtgagagcctgtacaacgggtggaagaaagctgtaaatgcagctagggcttttaaataa

SEQ ID NO: 1097 - DNA, 1668 bp, Bacillus licheniformis
atggaatcattattttcaagccgtaaacgggacgacattttacagaatatgacgaagcagaagtatgacgtgtttattatcggcggaggtattactggggctgggacggcattggatgccgcatcgcgcggaatgaaaacggcgctttgcgaaatgcaggactttgcagccggaacgtcaagccgttccacgaaacttgtacacggcgggcttcgctatttaaagcaatttgaagtgaaaatggtagccgaggtcggcaaagagcgggcgatcgtctatgaaaacgggccgcacgttacaacgcccgaatggatgctgcttccgatgcataagggagggactttcggcaaattcagcacttcaatcggactgagggtgtacgactttttggcaggcgtcaaaaaagctgagcggaggagcatgctgactgccgaagaaacgcttcaaaaagagccgctcgtgaaaaagaacggcctgaagggcggcggctattatgtcgaataccggacggatgatgccagattgacgatcgaagtcatgaaagaagccgttaaattcggagccgaggccgtcaattatgcaaaagtaagcgattttatatatgaaaacggcaaggtcaccggcgtggtcattgaagacgtcttcacgaaaaaaacgtaccgcgtctacgcgaaaaaaattgtcaatgccgcggggccgtgggtcgaccgtctgcgggaaaaagaccattcaaaagaaggcaaacaccttcagcatacaaaaggcgtgcatcttgtttttgatcaatcggtctttcctttaaaacaagccgtttattttgatacgcctgacggccgcatggtgttcgccattccgagagacggaaaggcatatgtcggcacaacagacaccgtctacaacgagaatttggaacaccctcgaatgacgacagcagacagggattatgtcatcaatgcaatcaactatatgttccctgaacttggaatcaaagccgaagatgtcgaatcaagctgggctggcctcagaccgctgattcatgaagaaggaaaagacccgtccgagatttcccgaaaagatgagatctggacttctgaatccggactgatcacgatcgccggcggaaagctgacaggctacagaaaaatggctgagcatatcgtcgatcttgtcagagaccgattaaaagaagagggcgacagagacttcgggccttgcagaacaaaaacgatgccgatttcaggcggccatatcggcggctccaaaaatctggaggcttttattcaagcgaaagcagccgaagggattgaggccggactgtccgaagagacggccaaacaaatcgccgcacgatacggttcgaacgcagaccgcctgtttgatcgtattccatcgctgaaagatgaagcagcaaaacgccgcatccctgtccatgtactagcagaaatggattacgggatcgaggaagaaatggcagccgtcccggcagacttcttcgtccgcagaaccggtgcgctgttctttgacatcaattgggtccgcacttacaaagagagccttacggactacatgagcgagaagctgaactgggatggcgaaacgaaggcccggcatgtcaaggcattggaaggactactacacgatgctgttgtcccgctggaaagcaaatga

SEQ ID NO: 1098 - DNA, 123 bp, Bacillus licheniformis
ttgcagcttttcttttatcatatcgacaaaccgccgctttgtccaaatttagcatgccaaatgaaaaaaatgaggctgcctgttcaagacagcctcacgccgggccattcgattgattattaa

SEQ ID NO: 1099 - DNA, 1749 bp, Bacillus licheniformis
atgagctggagaacgagctatgaacgctggagaaacaaagaaaacttagattccgaattaaaagcgcttcttttggaagcggaaggaaatgaaaaagaactagaggattgcttttataaaaaacttgagtttggtacagccggtatgcgcggtgagatcggaccgggcccgaaccgcatgaacgtttatacggttcgcaaagcatcggcgggccttgccgcatacataggagcgaacggcggcgaagcaaaaaagcgcggcgttgtgatcgcgtacgattcccgccacaaatcgcctgaatttgcaatggaagctgctaagacgctcgcagaaaacggcgttcaaacgtacgtgtttgacgaactgcgcccgacacctgaactttcctttgcggtaagagaactgaatgcgtttgcaggtattgtcatcacggcgagccataacccgcctgaatacaacggctataaagtgtacggagaggacggcgcgcagcttccgcctgctgatgccgacaaactcaccggctatgtcaatgcgatagaaaacgaactggaaatcgaagccggagatgaagctgctttaaccgaaaaagggctgattaaaataatcggcgaggaaatcgatcaagcgtatctcgataaactgacatcgatttctgtcaaccctgatctggcaaaggagaccgaagtcaaagtcatcttcaccccgcttcacggcacggcaaacaagtctgtcagacggggcctgaaagctctcgggtatgaacatgtcacagtcgtccccgaacaggagctccctgaccctgacttttcgaccgtatcttctccgaatccggaagagcacgccgcttttgaatatgcgatcagactaggagaagaaaatggagccgacattctgatcggaaccgatccagacgcagaccggctcggcgtcgctgtaaaggatcaagaaggccgctacgtagtgctgacaggaaatcaaaccggcgcgctgctcctgcattatctgctgtcgcaaaaacagcagaaaggcatgctgcctgataacggcgtcgttctgaaaacgattgtgacgagcgaaatggggcgcgacatcgccgcttctttcggactggacacgatcgacacgctgaccggctttaaattcatcggagaaaaaatcaaacaatttgaagcatcgggcgaatatgctttccaattcggttatgaggaaagctacggctacttgatcggcgacttcgcaagggacaaggatgccgtccaggccgcactgcttgccgttgaagtatgcgccttctataaaaagcagggaaaatcgctttatgacgggctcctcgaattgtataaatcgttcggcttctatagagaaggcttgaagtccctgaccttaaaaggaaaagagggagcggagcaaatcgcagccatcctcagcacattcagagaacagccgcctctttccatcgccggaaaagatgtcgtatccgccgaagactatttgacagggaagcggacgctgctaaaggaaaacaaaagggaaacgatcgaccttccgaaatccaatgttttgaaatatttccttgaagacggctcatggttctgcctccgtccatcaggaacagagcctaaagtgaaattttatttcgcggtcaaaggccgaaccaatgaagaaagcgaagcgcttctcaatcaattgacagacgaagtgatgaaaaaaatcgacgatattgtaaaagcgacctcaaattcgtaa

SEQ ID NO: 1100 - DNA, 459 bp, Bacillus licheniformis
atgaaatggatcaaaatcggggatgaatacatagaaaagaaaatgacgcaatttttcagcgaagccggtacgattgtcgctgccattttatgtttggatatgatcatccgcggctttattttaggaaaacctgcatccgaatacatcatcagtgccatcggttttgcggtctatgcaggctggattttgctccgctatcttttgtcgggatttgaatatccggagatcgcaggccaatcggcgtatcggaaaaaaagaaaagaaatcgcagccctcagcctcgcttccggcctcatatttgctattttaacgcttctctttaccggcataccagagcatcccggcagttgggttgactttattggtatggtgatgttgtttgcattccttcattttctgatcaactttatctcgttgcgcaattcctttcggaaaaatcaagatctattagatgattaa

SEQ ID NO: 1101 - DNA, 198 bp, Bacillus licheniformis
atggttaaccgggtcaaactcgcccggatcgaaaagtctttgacacaagcccagctcgccgagcgggtcaatgtgacaaggcagacgatcgggctgatcgaaaaaaataaatacaatccgacattgcagctctgcatcgcgatcgcaaaggcattagacaaaacgcttgacgatttgttttgggaagaaaaagcctaa

SEQ ID NO: 1102 - DNA, 1150 bp, Bacillus licheniformis
ttgcgggaagacacacagtttgaaaaattgaaaacgctcaaagaaatagcggaaactttaaacgaagggaacgatctaaaggaaacgctccatgccgttttaaagaagctgctccgcctaacgggactcaaaacggcatggctttttctgatcgatgaaaaggggagctttgaactggctgcttcggcccgcctgcctcaagcccttttcttaccggcaaaaccgtttactatgcgaaggaagctgctactgtcttgaacaatacagggacgaaaagctggacagggcgaaaaatatcatccactgccggcggattacgacggccatgaaacagaagacaggagatccggaaggcatcacccatcatgcaaccgtcccgctcagtgaccaaaagaagcggttcggtttgctgaacgttgcggcaccgggcaaaattcatttcagccgcggggaactggcgctcctcgaagctgttgctctgcaaatcgggatggcgatcaaacggatgaggcttgctgaacaacagcaaaaacacctgctgctgaccgaaagaaacagattggctcaggacttgcatgattccgttaatcaaatgcttttttcgctcagcttgaccgctaaagcggcgggggaaatgacagaccagccggaaatcagggaaatgctcgagtttatgcaaaatctttctcatgaagcgcttcttgagatgcgggcgttaatttggcagctcaggccccaggggctggaagaagggttagcggcggctcttgaaaaatatgcggaagtgctcggccttcaagtaatcttcaagctcagcgatgtgctccgtctgcccccttctgttgaggaattgatgtggcggctgagccaggaagccctcaacaattgcaaaaagcatgccggtgcaagccgcatacaagtgaaaatcaatgtattccagtcgtctgccgtcttggaaatcgaagatgacggcaaagggtttcagtacgatcctaatgtggacattccgacgcttgggctgaaaggaatgaaggagcggacggaaaaagcgggcggcacgcttttgatcacctccgcaatcggtaaggggacaaaaatccgggcggttttgcctatgaaggagaagggggaggcaggatggagaaggtga

SEQ ID NO: 1103 - DNA, 654 bp, Bacillus licheniformis
atggagaaggtgaaaatcatcattgccgatgatcatcatattgtcagaaaagggctcttgtttttcttcaaaacaaaaagcgattttgatgttatcggagaggcttcgacaggtatcgaggcgctcgatgtcttgcgaaaacgtgaggcagacatcgtattaatggatttatcaatgcctgatatggacggcattgaggcgacaaagcgaataaaaaaggaatatccgtctgtcaaagtcatagcgctgacaagctatgcggacgagagctatgtgattcccgccatccaggcgggagcctgtgcctatcagctgaaagacgccgagcctgatgaacttgtcgagacgatccgcgcagtttatggcgggagatactcattggatccgaacatcatgtcccacgtctttcaccatgtgtcacaggcggatgagaaagaaaaaatacatcaattgacaaatagagaaaaagatgttttattggaaattacgaaagggaaaagcaataaagaaattgcagcatctttatttatcagcgaaaaaacggtaaaaacccatgtatccaatctgctttcaaagcttggcttatccgatcgcacgcaagccgcgctttttgcagtaaaacacggactacaacaaaatgacgggagaggatga

SEQ ID NO: 1104 - DNA, 519 bp, Bacillus licheniformis
atgaaaataaccgtaattagcggaactgcgagaaaacagggcagaacgcggatcgccgcttcctatatcgcccgcgcttatcaggctgagcatatcgatctaagcgagttcatccttccgattttcaacggagacgaagagcaaagctcgctggagaatgttcaaaaattgaaagcttcggtcaaagaagcagacgctgtcgttttattatctcccgaataccacagcggcatgagcggcgctttgaaaaatgcactcgattttttaagcaatgagcagttctcgggcaaaccggtggcgctttttgcttgtgcagggggcggcaaaggcgggatgaacgcgctcgccaatatgcgcattgtcgcacgcggagtttatgcgaacgtcatcacaaagcagcttgtgctcgatccgattcatattgatgaggagcaccaaacggttactgaagcagccaaagccaatattaaaaatgtaatggaagagcttctgctctttgccgaatttcaaaaagcctga

SEQ ID NO: 1105 - DNA, 249 bp, Bacillus licheniformis
ttgaattacgctgattatgacaaagctttgtactatacgcaccggtcgcagtgggacaacctgctgatcctgatggtgcggacagaagacgatttattatcaaagcggatcgaacattttttgcacgcctacaattttgaaagagatgacgccattgtcgaaaaaaggctttatgatctgctgcagtatattgatcacgcctcattttccggacatgaacacgaaaacggcgtgcttgtctttacgtaa

SEQ ID NO: 1106 - DNA, 321 bp, Bacillus licheniformis
atgaaaaaacgatattgcacgtactttttttgcatattaacacttttatcattcccggcgaaaggccactttcaaacagatgttttcgatgcacctgaacggtgggaaagaatcgcctggagcgcgcttgaagaaaaatacaaaggcgcaaagctcgaggattatgaatatttagggcgcacacaagtaaatgatgaagagacaaaggatgtcttcagggtaaccgtcaatcaagaaggcaaatcattttcggcgcacgccgaggtgtattttcatccggtgaccaatgcgatcatcaatgtcaatatttttcccttatag

SEQ ID NO: 1107 - DNA, 432 bp, Bacillus licheniformis
atgaaattaacaaattatacggattactcattgagggtactgatttttctagcaaccaaaaactcaaacgagcttgtcaatattaaagacatcgccgattcttattccatttcaaaaaaccaccttatgaaggtgatttacgagcttggcaagcttggctacgttgaaacgatccgcggccgcaacggcgggattcgtctcggaaaagcgcctgaactgattaatatcggtgaagtcataagacatacagaagatgattttaaccttgtcgagtgttttaacggagaaaaaaaccattgtatactttctccgatctgcggattaaagcatgttttaaacaaagccctttccgcctatttggacgtattggaccaatacactctgcaagatattatcatgaatcaggaccatatacgtaaattattgagttga

SEQ ID NO: 1108 - DNA, 129 bp, Bacillus licheniformis
atgacctcaatcaaacaagtttccattatcttatcacatttgccttcgattatgagggtcgagcggaaattgttacaaaaatataaaacattcattgataatattgctttaattccattaaaagtctag

SEQ ID NO: 1109 - DNA, 1215 bp, Bacillus licheniformis
atgctatctgaaaaaaccatgcaaattgtcaaatcgaccgcccctgttttaaaagaaaagggaacagagatcaccacttgtttttacaagcggatgtttgatgcccaccctgaattgaaaaacattttcaacatgtcccgacagcaaaccggcggacagccgaaagctttggcttttactgtgctgcaggcggctgaaaacatcgaccggctcgaagacctgctgccggttgtcaagcagatcggacataaacacaaaagtttgcatgtgaaaccagagcactatcctattgtcggtcagcaccttttggaagcaattgaaatcgtgctcggcgaagctgcgacagaggacattctccaggcatgggcagaagcctatgaagagatcgcccgtgtatttattgaagtcgaaaaacaaatgtatgaggaagacaaaaagcaggatggaaattgggaagggtttaaaccgtttgtcatcatggataaacgagtcgaatccgatacgataacctccttttatttgaagcccgccgatggaacggctttgcccgctttcagccccggacagtacgtatctgtctgcactaaaattccgggcgaaccatatttcttaacaaggcagtacagcttgtcagatgcttggaataaagactactaccgcatttcagtcaaattggaagcggaggaaggccaaccggtgggaaaggtatcaagctatctgcatgagaacatggaaatcggcggcagcttggaagtgagcgctcccgccggagatttcacactttccgaaggaacggatcgtccggtttatttcattagcgccggatcaggcatcacgcctgtcatgagcatggtgcaaacgttggctcaaaaagaaagccgccgcgagatcacattcgtgcatgccgcgaaaactgaacggcatcacgctttcaaggaagaaacggagaagctgctcggcgccaatccggcgaaccgtctcctgttcgtctacagcagaggtgctgaagcgacggaagagcatactgtaaaaggccgggtgaatgaagagcttttgaaatcggtcgtgatagatccaaatggcgaattttatgtatgcggtccgctttcatttatgaaaagcgtgattgaaggattgcaaaaccttggcgtttcgatggaaaacatccgctatgagagctttgcttcatctcttgatatgcaaatagcgaactaa

SEQ ID NO: 1110 - DNA, 1410 bp, Bacillus licheniformis
ttgagcatacgggagcaaaaagagctgcagcgggcgattgaagaaattacggaaatcgcggaaggattcggccttgatttttacccgatgagatatgagatttgtcctgctgaaattatttatacattcggtgcatacgggatgccgacaagatacagccattggagtttcggaaagcaatttcacaaaatgaagcttcactatgactttggcttgagcaaaatatatgagcttgtcattaattcagatccgtgttatgcgtttttgctggacagcaattcattgattcaaaataagctgattgtcgcacacgtccttgctcattgtgatttctttaaaaataactgccgttttcaaaatacgaagcgcgatatggttgaaagcatgtcggcgacagcagagcggattaaacattatgaaacggtacacggttcaaaagaagtcgaagcatttctcgatgcggtgctggcgattgaagaacacattgacccttcgctcgtgaggccgaagctgtcgtggagcgtagatgatgaagaggaagaagaaaccggcgcgccggccactccttatgacgacctctgggaactggatcataaaggatcgaaagagaagaagaaaaggacgaaaaaaaagtttccgccgaaaccggaaaaagacattctgctgttcatagaagagcattcgcgggagctggagccttggcagcgcgatattttaacgatgatgagagaggaaatgctgtatttctggccgcagcttgaaacgaaaatcatgaatgaaggctgggcgtcctattggcatcagcgaatcatccgtgagcttgatctgacatcaagtgaagcgatcgaattcgccaagctgaacgcgggagtggttcagccgtccaaaacgggaatcaatccttattatctcggattgaaaatatttgaggacatagaggagcgctacaacaacccgacagaagacatgaaaaagatgggggtagagccgaactctgggagagaaaaaatatttgaagtcagggagatcgaatcagacatttcatttatcaggaactatttaacgaaggatcttgtgatgcgggaagacctctacttgtttcaaaaacagggaagggattataaaatcgtcgacaaggattgggaggctgtgcgcgatcagcttgtcagcatgagagtcaacggaggatttccttatttgacagttgaggacggagattacttaaagaacaatgaattatacatcaagcattggtatgaagggatcgaactcgatttgaagtatcttgaaaaagttctgccttacctccaccagctatggggaagaagcgtgcatgtcgagaccgtgctcgaagataaacccgtcatgttttcctatgatggaaaggctgtccaccgcagatatttataa

SEQ ID NO: 1111 - DNA, 159 bp, Bacillus licheniformis
atgtcgagaccgtgctcgaagataaacccgtcatgttttcctatgatggaaaggctgtccaccgcagatatttataaaggctgcattttggcagccttttttcttttaaagcgcaacgatttcaactcgtccgtcctttcaaaagaaatgccaaattaa

SEQ ID NO: 1112 - DNA, 123 bp, Bacillus licheniformis
atggaattccctccttataatagaagcagaggaagggctgaagcagccgttctcaaaaaaatgaaactgctaattttcgcctttgaaaatataaaatattctgctattgggaggacaacatga

SEQ ID NO: 1113 - DNA, 834 bp, Bacillus licheniformis
atgaaaaaacaagtaataacagcagcatcagcggttgttttaggatcgactttgtttgcgggagccgcttccgcgcaaaccataacggtgaaaaaaggagacacgttatggggtttttcgaagaagtatggcacaactgtcagcaagattaaacaggaaaacaagctgaaatccgatatcatttacataggacagaggctgtcgatcaatggaagcagttcttcgtctgcaaaagcgtcgaaagtttcatcagctacgcataaagtggtcaaaggagacagcctttggaaaatttcgcggacatacggcatgactgttaacgaactgaaaactctgaacggtttaaaaacagatttaatccggattggacaagtattaaaagtcaaagggacgaaaagcgtaaaagcagcatcaacaaccaagccttccgcatcaagcgggacaagcaaaacaagcgcacctgcgcagaaatcttcaacgctgaatacgtcaaaacttgtttctgatgcaaaagcccttatcggaacgccttataaatggggcggaacatctacatcaggatttgactgcagcgggtttgtctggtacatcctcaacaaacagacaaatgtagcgagaacgaatacagtcggatactggaattcaatgaagagcgtatcaagcccggcagtaggcgatttcgtattcttcacgacatatcagccgggaccttcgcatatgggggtttacatcggaaacaatcaattcgttcatgccggttctgacggcgtaacgatcagcgatatgacaaacagctattggaagccccgctatcttggagcaaaacgcttctaa

SEQ ID NO: 1114 - DNA, 879 bp, Bacillus licheniformis
atggattttaaatggcttcatacctttgtcactgccgcaaaatacgaaaatttcagaaagacggcggaaaccttatttatttctcagccgaccgtcaccgtccaaattaaactgcttgaagaagaactcgggtgccagctgttcacccgcaaaggaagaagcattcatttaacgaaagaaggacgggcttaccttccttttgcccttcgcctgttggaagactatgaatcgagcatggcagagcttcacagaatcagacaaggctactcacagacattgaacttagcggtttcgccgcttatcgccgatacgattctcccatttgtattaaaaaaatacacagcgctgcatccgaattcggagatcaaagtaaagatcgccgaatcagctgaaatcgctcccctgatttcagctggccatgcagatatcggactaagctgcttaaacgtgcaatcgtcaaacctgaactgctattccatgtacagcgatcccgtgattttggttgcccctcatgacggccgcgctgcagaacaagcgccgccgctcgatgtcgaggatttgcttgaagaatatttgctgttgacccacaatcaccctgaatactgggacgacctcgtcaggcagctgaggatcaagtttccgtttgtcagaacgatgctcgtaagccagacgcatattacgaaacgatttatttcagaaggactcggtatatcatttttgccgctgtcgactgtgcgccgcgagctgatggaaggaagattaatagaggtgccgtgcgatttcatgaagcttcccgttgcagggggatatgcgattagtctgaaagataatgagaaggtcgagcactttttggcgtttttagccgagttccgtttctaa

SEQ ID NO: 1115 - DNA, 1092 bp, Bacillus licheniformis
atggtttatcatgggttaaaagggattacttgtgttgaaacagccatcagccgcattgacggtgaaaaaggaaagctgatctacagagggtacaatgctgatgaactggcgctttcgtccacatttgaagaagtcgcttacctgattctcaacggggcatttccgacggaagctgaactcagcagattcaatgagctgctcgcttcatttcgtgtgcttccagaagcatgcgagcgattgatccgcagtcttccggccgaattagacgatatggcggttctgcgcacggccgtctcttcattcggggacatatcgtttgcgttcaagccgacaatggagcaggccctcaggctgattgcggccgtcccgtcaattatcgcgttcagaaagaggctggctgatggagaagagcctgttcagccgctggatgagctaggttttgtggaaaattatttttacatgctgaaaggaaagcgtccgacagaagctcagaaaaaagcgcttgaaacgtacatgattcttgcgatggaacatggcatgaacgcttcaaccttttcggcaagggttacggtgtctacggaatccgatcttgtttctgccgtcacatctgcacttggcacgatgaaaggacctttgcacggcggagcgccgtctgcggtgacggatatgctggaaggcatcggggaaaaacagcacgctgaaagctatataagagaaaagcttgaaaaaggcgagagactgatgggatttggacaccgcgtctataaaacgcatgatccgagagcgaaggctttaagggtgaaagccgaggaaattgccgggggcgacagggatatcgaccttgctcttcatgttgaaaatacggcgatccgccttttggaagaatacaagccgggccgcaagctttatacgaatgtcgaattttacgcagccgctgtgatgaaggcgatcgattttgatgccgcattgttcacccctactttttcggcagcgagaatggtcggctggtgcgcccatgtgcttgagcaggctgacaacaacatgattttcaggccatcggctaaatatgtcggagaattggtctcacagtag

SEQ ID NO: 1116 - DNA, 1065 bp, Bacillus licheniformis
atgaaaaaaggattcctgatgttgatcatgctgttttttctaggtgcatgcacggaaggccgggattttgatgctgaatatgaagcgacaagcgcgaaagaaggcggaagcggcgccgaagtcatcgcagatcgcctggatgtgccttggacgatcgctcatactggcgagaccttttacattacggaaagaaacgggggaattgtgtccattgctgacggcaaaaaggagcgcatgcagcttcagctgaaaaagcccgttcatcaagaaggggagggcgggctgctcggatttgtactccatccggattttagaaacagtcaggaggcgtacgtttatcatacatacaaagacgggagccatctgaaaaaccggatcgtaaaattgacgcttgaccgcctcacttggacagaaacggatgaactgcttgccgatttgcctggaggcgcgattcataacggcggccggatggcgatcgggcccgatcaaaagctgtacatcacgacaggcgatgcaggggaaagggaatgggcccagcagcctgaaaagatggcgggtgtgattctaaggatggagcttgatggtacgataccggctgatcagccctttagctcgtcttatgtatacagtttcgggcaccggaatccgcaaggcctcgcatggatcggccgacagctttacagctccgaacacgggcagtctggacatgatgaagtaaataaaatagaacccggagccaattatggctggccggtgattgaagaaagcgatgagaagcagggaatgaaggcgccgctcatacattcgggagaaaaaacgcgggcgccatccggtttagcacagaaaggggacgtcctctatatggccgggctgcggggagagggtgttttccaggtcgatccggcggaagccaaagtagtcaagtggcttggcggatacggcagaatcagagatgtgaaagtgatcggcgatgatctgtatttcattacgaacaatggcgacggaagaggcgaaaaaaaacagacagacgatcggctcatccgcgtacctctgcctgacaagtaa

SEQ ID NO: 1117 - DNA, 870 bp, Bacillus licheniformis
atgaatccggcaaacagacagacagatggacagaaagcgcaaaaacaagaaaaacaacccggtgctgagcacaagatggtgccccttccgctctcggaagaccgcgactacaaaggaagcggcaaattaaaaggaaaaacagcgattattaccggaggagacagcggaatcggcagagcggccgccattgcatacgccaaagaaggtgccgacattgccgtcatgtacttggatgaacacaaggatgccgaggaaacgaaagagcgaatcgaacaggaaggagcagaatgcctcttgattcccggagatgtcggtgatgaggcgcattgcaaatcatctgtcgaaaaaacggtgaatcactttggcgggcttgacattctcgtgaacaatgctgcagaacagcatccgcaaaaagggatagaagatatttcgaccgaacagcttgaaagaacgtttagaacgaatattttctccatgttccatatgacaaaagccgcgctcccgcatttaggggaaggcagcgcgatcatcaataccgcatcgatcacggcgtatgaaggcagtccggtgctgattgactattcgagcacaaagggcgcgattgtcgcgtttacccgttcgatggctgcatcccttgtcaaaaaaggaatacgcgtcaacgctgtagcgccgggtcccatttggacgccgcttattccggctacttttccgccggaaaaaacggaaaaacacggcacagatacgccgatgggaaggcccggacagccttctgaacacgctgcagtgtatgttctgctcgcttcagacgactcctcttatatgacaggacagacgatccacatcaacggcggaagatatgtgacgacataa

SEQ ID NO: 1118 - DNA, 114 bp, Bacillus licheniformis
ttgaaagtggtctttcaaattcttatttttccgaaaaaacaaacagaaaaaaaccggctgccttacaataagcagccggttgggattatgtcgtcacatatcttccgccgttga

SEQ ID NO: 1119 - DNA, 1359 bp, Bacillus licheniformis
atgagcgaccgcagaatgacagcaaagtgggcatccaaacttggatttgttctcgccgccgcggggtccgccatcggtctgggagcgatttggaagtttccctatgtggcgggaacgagcgggggaggcgcatttttccttgtgtttgtcctatttacgatactgctgggataccccctgcttttgggggaatttgtattaggccgaaaaagccaatcggacgctatcggcacctatcaaaaaatagcgccagggacgccttgggtgatcacaggctggatcggaatcgccgcctgcttccttgtcctgtcgttttacagcgtgatcggcggctggattttgctttatatcattaaagcagtaaccggttcattgtcgggtctcacgcaggccggatacggggagctattcggttcgatcatccaagatccgctgcagacactggcagcgcagctagcgtttatcatcatgacgatcctcgtcgtggcgaaaggtgtgcaaaaaggaatcgagcgcgtcagttcgattatgatgccgctattatttattttatttattgcgctcgttttaagggctctgacgcttgagcatgcgatcgacggcgtgcgttttctgcttgtgcccgattttggcagcctgacgccgcaggcgattctttttgcgctcggacaagctttctttacactgacgcttggcgtatctgtgatggtgacgtacagctcctatttgtcaaagtcacaaaaccttccgaagtcggcgctgtcgatcgtgatcatgaaccttgccgtcacgctgcttgccggcttggcgatttttccggccgtcttttcattcggccttcagccggatcaggggccgactttattatttgcggttctgccggcagtttttgaccggcttccattcgggatgctgttttttatcggatttttgacggcctttttattcgccgccttgacttcggctttttcgatgatcgagatcattgttgcggccattacaaaaggcgaccaaacgaaaaggggaaaatggacgtggacgatcggccttttgatttttgccgtcggcattccttcctgcttgtcttacgggatgcttgatgagccgttcatttttaagaagacgttttttgatgcggcggattatgtcgtcagcaatattttgatgccgcttggcgcgctctttatctccatttttattccgctgaaattgtccaaacacgatctatatgaagagatgaaaagcggatcaaaagcggggaaaggcttttttatcgtgtggttttatcttcttcgtttccttgttccgcttgcgattgtacttgtttttttaaatttaatcggagtgttttcattttaa

SEQ ID NO: 1120 - DNA, 1629 bp, Bacillus licheniformis
atggtgttagactttcaacagatgtttccgagcgaggatggcaatcacgaggcgcggtatcagctgctggcattgcttgaagcggtattggccggaatggacaggctgaaggatcccggccggctgacgcttggccgcgagtctgaagtttcatctgactactatcaaagcgtcattgaagaggccgtcttgccggaaaaaggcttcggggcggaaaaaagcgttgaagagctattgaaattgcttgacggccaccgctttttaaacaggcattatgtggccaacgcgacgcctctgccgaacaacgccagcatcgccgggaatcttttaatggttcttttaaacggaaacaatttatgggatgtcgacggcacggctgcagccaggacggaagtgcagatcacggcgatgctttctgatattgtcggctatgacaggcacaagagcggcggttttacaacctggggcgggcagggagccgtttttcagtcgctcaggctggcgatcgcaaacgcgtaccctgaagcgaatcagcaaggtacgccgcatcatctgtacgcgttctgttcagagctttcgcatttcagcctttataagtcgatggaagcttccggaatcgggacggaccatttgatcaaggtcaagacgaatcacgatcattcgatggatctggccgatttgcgggaaaaaatgcaagccgtgattgaaaaaggcggacatccgatttatgtattggcaacgcttggcacaaccgacgcatttggcatcgatgatttggccggaatcaagaacgtgactgaagaaatagaggccgcatacggtttgccgcctgtttatattcatgccgatacggcgatgggcgggatgtacagcttttttaacggatacgatttctccggcaatccgttgcatattgaagatgaggtgcttgagacgcttgcccgctacaaacaacattttcagcatttgcacctggcggacagcttggtctttgattttcataaactcggacaaacgccgtatatcacaagccttttcttggtgaaaaaccgcaaggcattgcaggctgttgatttggatccggatgagacgccttatgtcggcaacagagggtttggcagctatcatacgagctatacgctagagtgttcgcgaatgggaagcagcataccgatttatgcttctctgctcgcatttggaatcgaaggctaccaggagatcttggccaattacatcagggttaacctggcgtttcgaaaaaaactgctgcaggcttttccgaatgcagccgtcaccaatgatgtatcacctgtgacgacattccgcttctatccgggaaatgtccgctatcacgaagaaatcagcggcgccatcacggaggaagaagtgcggaatattaacaaatacaatgagaaaatcgccgaaacattgggaaggtaccgcagtcacacctatttcggcagcacgaaaaagcaaacatacgtttatcctgctgacagccgtttgccagtgccgctttatgtccagaaattctacagtgtctcgccttacacgacggttgatacaactgatcaatatatcacctttttaaaagcgcatgttgaaacgtcggatgtagcggctggataa

SEQ ID NO: 1121 - DNA, 888 bp, Bacillus licheniformis
atggatttgctgaagaacatgaatcaagccatggcgtatatcgaagaacacctgacggacagtatcgactttcaaacggttgcgaagctttcttactgctctgaatatcattttaaaaggatgttttcttttcttgccggggtttcgctgtccgaatacatccgccgcaggcggcttacccttgcagcgtttgaactgaagaacacaaaaagaaaagtgattgatattgcggtgaaatacggctatcactcgccggatgcttttacgcgcgcatttcaaaagctgcacggcattacgccgacagaggccagacacgatatcagcacactgaaagcatatcctccgatgaccttccagttaacaattagaggaggaaacgaaatgaactaccgtattgtagaaaagaaggcattccggatcgtcggaatcaaaaaaagagtccctgtcgtctttcacggaatcaatccggatatcgcctcgatgtggaaaactttaaccagtgaaaacatcgatgaattaaaggagctttcaaatgtggaaccgcttggactgattcaagcatcagcgaacttctccgaaggcaggatggaagagcagggagaacttgaccattatatcggtacagcgacaacgaaagaatgtccggaccaatatgaacagcttgaagttccggcctcgacatgggctgtctttgaagcggccggcccgtttccggacacccttcaaaatgtctgggggcgcatttatgctgaatggttcccgtcttcacattatgagcaaacgaaagggccggaaatcctctggaatcaggatcaagatatcagctccccaacgtttaaaagcgaaatatggataccggttcaaaaaagaacggcatgtaagaactaa

SEQ ID NO: 1122 - DNA, 1413 bp, Bacillus licheniformis
atggatataaccccctttttaaaccgcagcggcagcgagccgctttatcagcagctgtacacttttttcaaacgcggcattcattcgggacatataaagcctggaacaaagcttccctccaaacgaatgcttgccaaacatttaaatgtcagcctgacaactgttgaacacgcttatgaacagctggctgcagaaggatatttgctcagcaagcctagaaagggctggtttgcggctgaagcggaaggtgactttgcacagactgcgcctcctcctcctgccgaaaaagaactggaagaacatgagacggcggcggacatgatcgattttcaccacggccatgtagacctcgcgtcatttcctgtttcccaatggaaaaaaacgctcgccaaaaccgttggtgaatcagggtacgacctttttcaaagcggccccccggccggagacattccgctgcggaaaatgattgcggtttacctcagagaatcgcgcggcgtggtctgttcccccgagcaaatcatcatcggagccggcacaccggttttgctgcagttgctgtgccatctgtttcctaaaggcacaaccgtcggatttgaaaatcccggatttcatcgctcaaaaacagtcctgaaaaccggcggcttcaatgtggttccaataccggttgacgaaagcgggatttccgtgcaggatcttgaacaatatcagccgcagctcgcatacaccactccgtcccaccagtttccgctcggaatgatcatgccggtcggccgcaggctgcagttgcttgactgggcagcagcgaccggagcttatatcattgaagacgattatgacggggaattccgctatgcgggacagccgattccttccctgcaagggcttgaccggaacgaccgggtcatctatttagggactttttcaaaatcgctgattccctccctcaggatcagctatatggttctcccctttccgctcgtcaaagaagggcttaacatggcatccttatttaaacaaacggtttcccgccatgtacagcatgccattgctctttttatgaaaaacggggattatcaaaggcacttgaatcgaatgagaacactctaccgaaaaaagcgaaaaacgctccttgatgccatcaagcgtgaatttggcgatcatgccgcagtcagaggagagaacgccggtcttcacatcatccttgaggtgaaaagcgccccgagtgaagagtggctgacccaaaaagcgctggaaaaaggggttaaagtatatccagcctcagtctcgtatatgcccccccctgatacacacgcggtcctcctcgggtttggcggactttctgaaaaaagcatcgcagacggcatcaaaaagctgaagactgcatggtttaacggcggacagtctcaagattga

SEQ ID NO: 1123 - DNA, 435 bp, Bacillus licheniformis
atgttgcttgattgtagggaattgcactctgaaacagagcttaaggaagtctatccaattatgagacagctccgcccccatttggatgaaacgtcttttgtggagctcgtcaaagaagcgcgggaggctgaaagctacacgttatttgcgctgtacgacggggatattccggtggctttggccggctttttgccgagggtctctttgaaccaaggccgtcatgtttgggtagcggatctcgtgacgtgtgaaaagcatcgttcaaaaggctttggaaagaagcttttaggcgctgttgaagagtgggccaaacggaacggattggcttcaatcgctttatcatcaggggtgcagcgcgctgacgctcaccgtttttacgaagataaaatggagtataaaaaagcgagctatctatttcgcaaggcgctgaaatga

SEQ ID NO: 1124 - DNA, 291 bp, Bacillus licheniformis
atggaactggtaagaatctttaaggagcacaacgtatttggatgggtgtctgtcgggacggccattctgtccctgttcgtcttaaacttggccattttaagcgacacgatcgcatattcgtataagatgcttccttttgcaatggccgccgttccgctcggaattatcgagctctttatcaaaaaaggacggaccggtctcggatttctcggtgtcgtcctgaacattttcattctcgtttgcgtatggaccatcgtctccatcgatacgaatctgcagctcggcttttaa

SEQ ID NO: 1125 - DNA, 1071 bp, Bacillus licheniformis
atgaatgaagattttaaaaaacgttgggaaaaatataaaaacggcgaactttccgaatcggaaatgctccgggtcgaagaagagcttgaacagcttgaggaataccaggacatgctggaacaggaaatgaaagacgaagactgggatttggcaatcagccctgaaaagcaaaaagcgattttaagatacggaaaaaataaatcatatatgcggatttccacacttgccgtaatttcaacgcttattattctgccgctttgcacactcggcagctatctatactacggcttgggcgggcatgaaagcaaaggaaatgaactggtgcaaaccgcttcaatgacagttgccgtcacaaaaccgaatattcaggtcgataccgaagcacttgtcaacaaagtaaaactctttggaatccaaacacaattcccgttaaagaagcaaatcggaaacgtcacaaaagtagttggaaatgaaaacgtggaaatgttcttcgatcagctgaagtctccgcagattcatcaatacaaccaggagctgtcaaatgaagaacggcatttcgtctaccctgacggcatcaaagaaaaatcagtgtccaaagccgagtcgattttaaaacagcttcctgacggcaccgtaactgaagcttttctttcctttgaaagagcatatccgacaaaggagctgtatgatcaattaaaaggctatgacattcgcgttctgtggaatgcgatcgagacagagggcgatttaaaagatcatccatacgcagagccgatcggttttcctggaaaagattcaaaccggatttttgaaattcagcaccctgccgaaaacggcgaggaacagtttaaagcggcgctttcctatatgatcaagcacaataaatgggctgaaaccatttcaggcaggaaagacctgaagctttccaaacggcttgcctatgtggaaaagaacggtgtgaacgtgtatggagcagtcattaccggaccgtcaaaagaggttgaacggctgatcaaaaaagggcctgtcaaagcagctaaagtaggtgaggtggaattatggaactggtaa

SEQ ID NO: 1126 - DNA, 492 bp, Bacillus licheniformis
gtgactatcgacgaaatttaccaaatgtatatgaatgatgtttacaggttcctgctctccatgacgaaagataaacatctagcagaggatttgcttcaggaaacctttatgagagcttacatacacatccattcttacgaccacagcaaggtgaagccatggctttttcaagtggcgcgcaatgcgtttatcgactatgtcagaaagcataaaaaagaggtgacgatttctgacgatatgatcggaagcctgtttcaaaacgcggtgcaaagccctgcccaccaggtcgaaatcaaggaagtgttaaccttatacatgaaccagctccccgataactaccgggaagcgcttacgctgtactatttaaaagaattgaactacaaggaagcgtcaagcttgatgaatatctcagaggctaattttaaaagtgttttatttcgtgccagacagcggctgaaagcactttacaacagaggtgttaacgatgaatga

SEQ ID NO: 1127 - DNA, 543 bp, Bacillus licheniformis
atgcatccatatcaatttccttatcaccttccttcgccttacagcgccggacggtttcacggatcagggtatgcaggcgcttttcgaacacccggcaccgaagaacgtatcgtgttaagagattatggacaaaaaccgtttgcctctaacatcaatgaagcggcaaagcagaacaaaacgtttcgcaccgctttatggacaggaaggcatttgcaagttaccctgatgagcctcaacccaggcgaagacatcggattggaaatgcatcctcacgtcgatcagttccttcgtgttgaactaggcaggggaattgttcagatggggccgagcaaacatcatttgccatttagaagaaatgtatatgatgacaccgctatcgtcgtccctgccggaacatggcacaatctcaccaatacaggcaatactccgcttaaactttattcgatctatgctccgcccaaccatccattcggcaccgtccatcgaacgaaagccgatgcgctggccgcggaaggacaccgcgctcatgaccgttacttttga

SEQ ID NO: 1128 - DNA, 189 bp, Bacillus licheniformis
atgggccatcggaggctccaagggaggaagccgattcaaacgattcatgccgcgcttgatcaagagatcaacctggttaataccgctccggcatacggtttcggaacagatcgggccaaaattcacggctccgccgacaaaagaaaaagtcaggaaaccggggaggaaaattccccggtttttttgtga

SEQ ID NO: 1129 - DNA, 600 bp, Bacillus licheniformis
atgtatcaatttactggttatgctgcaaaagcgattctttctttgcgcggcggaattaaagtatacaataaagaaaatcttcctaaagacacaggtttcgttattgcctgcacacatgcaggatgggtggatgtcgtcgcactgggtgtcggcattttgcctatggaaattcattacatggcgaaaaaagagctttttgaaaataaattaagcggttcttttctttcaagcatcaacgcttttcccgtcgacagggaaaatcccgggccaagcagcatcaaaaccccgatcaagctgttgaaagaaggaaaaatcgtcggcattttcccaagcggaacgagatcatctgaagacgttccattgaaaagaggggctgtcacgatcgcccagatgggaaaagcgccgcttgtgccggctgcatacagcggcccttccaacggaaaagagcttttcaagagaggcaaaatgaaactgatcatcggcgaaccgctcaatcaggaagatttcgctcaatactcgtcaaaagaaaagctggtcaaaatgacggaggctttgaatgacagtattaaagctttggagaaaaagctggagcagctataa

SEQ ID NO: 1130 - DNA, 144 bp, Bacillus licheniformis
atgacagtattaaagctttggagaaaaagctggagcagctataattcaaacatacgcagggaaaaacagcttctcatgcacagagaggctgttttttttatttttctaaaattcaccttgcactccatttttatgataaaatag

SEQ ID NO: 1131 - DNA, 366 bp, Bacillus licheniformis
atgaaatggtatttgaaagcaataaaaaactatgcaggatttacgggaagggcgaggcgaaaggaattttggctgttttgccttttctcatacatggttctggtcatctacggattttttaaagccattctgcatcttccggaatatgaaatagagacatttttaggaatggtttatttgctcgccaaccttgtgccgggcttggccgtcacgatccgcagattgcatgatacagggaaaagcggattctggatctttatcggtttaattcctctcattggaaagatcattttgctcattatgctttgtcaagacagtgaaaaaggggaaaatcaatacgggccgaacccgaagacagcgctctaa

SEQ ID NO: 1132 - DNA, 1278 bp, Bacillus licheniformis
ttgattaccttgcaaccggttttgcacatacctgcagtttccaaatgggatgaaaaaataaacttgaagataagcggacttcaaccgtttgacaccattgatatcatcgttacagtgaaagatgaagctgacgcagagtggagatcacacgctgtttttcaagcgaatagattaggagaagtcgcccctgcatcagcagccccactaaaaggaacctatcagtctaaagatcaaatggggcttttttggtcaatgcaggctgttgaatcttcctgctcattttacaaaaaatcggttcatccgtccgcttaccgtattgaagtgaagcaaaaagaacgcatcatcttgagtaaagaaataaaacgagtgctgctttctgaaacagttgatagactggaagtaaacgaagatgggttgtgcggcactttttttcgcccgcttgccgttaaccgccctcccgcaatcattatattagggggatctgacggcggccttgacgaaacaatggcaggcatgttagcaaattacggatacgcaacacttgcaatcccttattttcaatacaaacagctgcctaaaaaactggttgaaattccgcttgaatactttcaaaaagcgatcgattggctcggtcgccaggaaggacttcatcatcgtcagatcggaatatgcggacggtcaaaaggcggcgaactggcgctgttaataggttctcattttcctgaaatccgctttgtcgtttctcatgtaggcggcggagtcgtctttcaaggggttggattaaaaaaattccggcagacatcttcctggagcctgaacggcgcaccgctcgcctttgcaccgctgccgatgttttcgcttcctcagctgtggaatatgatgaaacataagctcacaagacagcctcatgcttttcttgatctttaccaaaaggctttacgaaaagtgaaagatgatcatcctgcaatcattaaagcggaacttattaaaggtcctatactgttaacttcaagcactgacgatttagtatggccctctgcctcaatgaacgagaaaatcgaagaacggctgaaaaagaacagattctcttattctgttaaacatctgtattttgaaaaagccggtcataatatcaggcctccatactttccgacatccggaagaaaaagcagaaaaatagcctatggcggaaaaactgaatacgatgccattgcagctcaaacattttggcaggaactgcttttgtttttagaaaaagcaactgcacccggcaattaa

SEQ ID NO: 1133 - DNA, 597 bp, Bacillus licheniformis
atgtcaacacaatctacaagggatcgattaatccaagcggcgcttgccctttttaaagaaaaaggatatacagccgcatccaccagagaaattgcccaaaaggcaggagtcaatcatttaaccctttttagacacttcggaaataaacagaatttatttcgggaaagtgttattcaacatgttgcatccggagattttattggagaacttaaagcaatactgaccggcgatttacgagaagacctctcattgatagcaaaagcgtatttaaaagaaaacctggaaaaagggactgtttttttactttactttaatgacgccgtatctgataaagaagtttgcgaattaatcatggatattccccgccgtctcaaccgctttttagaggcttattttgcaaagctctacgccgaaaaaaaaatttcagacggcaactttcaaatgttaagccaaatgtttttcggtttactgaatcaatatattatgtttcaacatttgcccggattcaaggagtctttcaatgatcggattgatgactatgttgaagagtgcgtcgatttattttacacaaaacttgaaaaggaagtgccgtcttga

SEQ ID NO: 1134 - DNA, 1320 bp, Bacillus licheniformis
ttggaaatagttaatttgatttttgttgctgtattaattgctttaacagcatttttcgtagcgtctgagtttgcgattatcagaatcagaagctcgcgggttgatcagctcattgctgaaggaaacaaaacagcgatttcggtgaaaaaagtcattacgcacttagacgaatatttatcggcctgccagctcggcatcactttgacggctctcggtctcggatggctcggggagccgacggtcgcccggctgcttgaaccgctatttgttaaatggagcattccgagctctgtatcacacatcgtttcagtcgtgatcgccttcagcttgattacgtttttgcatgtggttgtcggcgagctcgctccgaagacgcttgcaatccaaaaagcggaagccgtttcctttctttttgcaaaacctttgatctggttctaccgcattatgttcccattcatctgggcgctgaacggatcagcaaggctgttgacgaaagcgtttggccttgaagcggtttctgaaaatgaaatggcgcactcagaggaagagctgcgaattattctgtcagaaagctataaaagcggcgaaatcaatcaatctgagttcaaatatgtcaacaaaatttttgaattcgatgaccgtcttgccaaggaaatcatgatcccgagaacagaagtcgtcagttttccaaatgatatgaaaatcgccgagatgattgacatcacgaaggccgaaggctatacccgctatcccgtcgaagacggtgataaggacaacatcgtcggcgtcatcaatgtcaaggaaatactgacggcctgcatcagcggagaatgctccaaagaagacacgattgaacagtttatcaatccgatcattcatgtgatcgaaaccgttccgatccacgatctgcttctgaaaatgcagaaagagcgcgttcatatggcgatcctttctgatgaatacggcggaacggccggactcgtgacggtcgaagacatcattgaagaaatcgtcggcgaaatccgcgacgaattcgatattgatgaaattaatgaaatccgcaaaatcggcgaaaaccactacattctcgacggcaaagtgctcgtcaaccaggtcaacgatttgctcggcattcagctcgacaatgaggagattgacacgatcggcggatggttcctgacgcaaaaatatgacgtccaaaaaggcgacatgatcaccgagcagggatttgaattcacgatcagcgaaatcgacggccaccacgtttcatacgtagaggtgaagaaagctgcggaaacgctgctcgaggaagcggaataa

SEQ ID NO: 1135 - DNA, 426 bp, Bacillus licheniformis
ttgaggagggatgcagatggggcagagaaatatcgcattggcgaattagcagctgctgcaggcgtaacaaaacggactgtcgattattatacgaatctcgggctgttaacgcctgacagatcatgttcaaactaccgttattacgatgaagccgctctcaaacggctgaagtttattatggactgcaagcagcagagattggccctgtccgacattaaagaaaggctggaaaaccagtttccctcttcaactgtgaatgatgatgaaattggaagcctgacaacggaaatcgatcatgtcaatgacaatatctccgtgatcataaacagattgaaacggctgaatcccgatgaacggaagattctgaaaagccgtctttctcctgaaaaaatgacggtcatccagtcatttttgctgctgctttag

SEQ ID NO: 1136 - DNA, 1374 bp, Bacillus licheniformis
atggacgatattgttagtctgataatcatcgggattctgattgcattaaccgcttttttcgtggcatcggaatttgcgattgtcagagtcagaagctcccgcattgatcagctgattgctgaaggaaacaaaaaggcggttcgcgcaaaacaagtggtgtcggatttggatgaatacctttcagcttgccagctcggcattacgattacagcactcggactcggctggatgggggagcctacggttaaaaaggtgctgcatccggtctttgaaagcttgcatgtttctggagctgtatcgcacgctctttcagttgccattgcatttttagtgattacattcctgaacgtcgtggttggagaacttgccccaaaaaccatcgcgattcaaaaagccgaacagatgacactgtggctggctggacctctgcactttttcaatgttgtgatgttcccgttcatttggacgctgaatgcctcagccagagtgctgaccgggttattcggtttgaagcctgcttcggaaaaggatgaatcccattcggaggaagagctgcgaatcctgttatcagaaagctacaaaagcggagaaatcaatccgtctgaatatagatacgttaataaaatctttgaattcgacaatcggatcgccaaagaaattatggtgccgcgcactgaaatcgcctccgtcccggtggatatgccgatcgatgaggccatttcggtcatgctgcaggaaaagtatacgcgctggcctgtctataaaggcgataaggatcatgtcatcggcatgatcaatacgaaacagctgtttacggatatgctcatgatgtcagaggctgagaaaaagcgattgtcccttgaagcctatgtccgtccggttattgaagtcattgaaaccgtgcctgttcaaaagctgctgatcaaaatgcagcgggagcggattcacatggcgatcttaacggatgagtacggcgggacatctggtcttgtgacggccgaggatattcttgaagaaatcgtcggggaaatcagggacgaattcgatgaagacgaaaaaccgctcatcgaaaaagtttccgatcacgaatacatcatggacggcaaagtgagaatcgatcaggtcaatgagctgtttgaagacgatctcgaggaagaggaagtcgaaactgtcggcggacttgtgctgaaagaaaacatagatatcgcggaaggccaggcggtgcatatcggctcttacacgataacggttctcgaaatggaagggcgtctgattaagcacgtcgaagtcaagcgggaacaaacaacagaacatgtagagctggcaccggcaaatccggtcgtcgtaaacgaaatcaccttgagcgaaaaatag

SEQ ID NO: 1137 - DNA, 402 bp, Bacillus licheniformis
ttgctgtggtacgagatcatttcggaggaagagagaaaaacgtatattaagcggatcgaatttcatttgaggaattggaaaaattacaaagccgccgtgctcaatttagaaaggagaatggagaaggagcaaaagaatgggctcgccgtcaaagaaagaaacgctgaatatcggatcgacgccgaaaaaaggctctatcaatttttgcttgattcgatggaaacggctgtctccgaattggatgaactcgagcggaagttggtggaatgccggtatattcataattggagcatgggaaaatgcgcgatggaaatcggctacagcgaaaaaacgctgtttttaatgaagaaatcgctgctggacaagctgcttgtcagcttggcggcgatcacgaatatttaa

SEQ ID NO: 1138 - DNA, 288 bp, Bacillus licheniformis
atggatttttctgaaattgcgctcgttccgctgattacgggattggtgcatacagtaaagcttgtcggcattcagaaacgatttctccccatctgtgcaattgtcttcggcatctcgatttctctgttgtttaccgcaggggactggaaggaagatatgatgatcggaacttggcttggcttgtcatcagttggattttactccggctcaaaaaacgtcttgaaaccattatcaaaggaggagattgaacatgaagatttatttggatccgggacacggcggaagtga

SEQ ID NO: 1139 - DNA, 678 bp, Bacillus licheniformis
atgaagatttatttggatccgggacacggcggaagtgatccgggagcatcgggaaacggtttgctggaaaaggacgtgacgcttgccattgctctcaaaatcaatgacattttattaaaagagtatgcaggcgcagagacgaggctgagcagaacgacagacaaaacggttacgcttcaggagcgcacagacgatgcgaattcgtggggggccgatttgtttgtctccattcatacaaacgcttttgacggcacggcgtacgggtatgaggattacatctacagcggcctgtccgatgaatcagttaccgctctttatcaacggatcattcacggcgaagtaatcaagcagaacggactcagggacaggggaatgaaaaaggcgaactttcatgttcttcgggaaacagcgatgcacgccgttttaacggagaacggctttatcgatcaccccgaagattcggcaaaaatgaaaagcgccgcctggatcgaacagactgcgcggggacatgcaaatggcatcgcgctctgcctcggcctgacgcagcgcgaattccccttgtataaagtgacgatggacggggggcaaatcggggcttaccaagaaaaagacgacgttttgaaagttatttctgcgaattgggacagctttcaaaaagcggctattgaaaaagggtag

SEQ ID NO: 1140 - DNA, 357 bp, Bacillus licheniformis
atgatggcagctgcttttatgatcgcgggaggaatcgggtccgttttgagattttggctgggcaatgtgctcatggcgatgattccgcgcccccgcattccggtcagcgtgatggtgatcaatattctcggctcattcgctctcggcatattcataagcctcggcattgacaatcaaacggtctctatcgtggtcggaactggatttttcggaggcttcacaacattttcgacgttcagcgttgaagctgttcagcttttggctgcaaagcgggtaaaggcttcagcggtttacatcctgcttacaatggcaggctcaatcggcggattctgggccggcagcatgctgattccgtga

SEQ ID NO: 1141 - DNA, 399 bp, Bacillus licheniformis
atgaaatcatatgttgccgtttttatcgggggagccatcggatcgctgctgcgctacgcagtcaatctgctcggcggcaccgccgtttttccttggccgacttttattgaaaacgcgtccggaagccttctgctcggccttttgacaggcttttttgcggctcgggcaaaaaagccgctcgtccaattatgcttagggacggggttttgcggcgggtatacgacaatgtccgctttttctaaagaaaccgtacttctgctgcaatcggccgctcacatcggagttctgtacttgatggcatcgcttgcctgcggggtatgcttcgcatttttggggatcgtgatcggcaaaaaggtcagcggagctgcggggaaagaaaaggagcggtatcaatcatga

SEQ ID NO: 1142 - DNA, 705 bp, Bacillus licheniformis
ttgcatattatcgcacatcgcggagcctcggcttacgccccagaaaatacgtttgccgcttttgaaaaagcggtggagctcggggctgattttatcgaactcgacatacagattacaaaggatggaaaacttgccgtcatccacgatgacaaggttgacagaacgacgaacggtaccggtttcgttcgcgagtatacgatgaatgagctcgaacagctggatgcaggaagctggttcggccctgaatatcaaggcgaaaaaatcccttcacttgaagctgttctgaggaagtatcacaataagacgggccttctcatcgaaatcaagtcgtccaaaacccagcccggaatcgaaaaagcggccggacaactgatcagccggtatggccgttcaatgaacacaattgtccagtcgtttgacgccggcgccatgagggcgtttcatcacatgtatccttcgattcagactgccgttttgatcaggccgagatttggattgctgccgcgcggccggctgcggcaaatcgcttcgtttgcccaatacgtcagcctgaaagctacgatgatcagcccttttctgatcaaatcgattcacagctgtgatttgaaggcgctggcttggacggtcaacgggcagaaaacgggaagccgcctcaaaagctggaaaatcgatgggatcattaccgactacccggattatttttga

SEQ ID NO: 1143 - DNA, 108 bp, Bacillus licheniformis
atgggtaaagggagaattaaagtggaagaacggattaagatcgaaaccgatgctgaaatgtttaaagcgactctccttgatcaaacacagtctcagaagaagaaatag

SEQ ID NO: 1144 - DNA, 1077 bp, Bacillus licheniformis
atgttcgaaaagtatatgacaatggatttcgctgccgatatcgggatcagcatcggtatccttcttttatttttcgcgtttagaaaaatatttacgaagtacttattcaacctgatactgaaattgacgaataagacgaaaacggactttttcaatcaggtggtgctggcgtttgaaaagccggccaggtggttttttgcgatactcggtatttatctggcgattatttattccccgttttttgaggggcatatggggatcgttcataaactgtacagagtgtccgtgattttggtcattgtaagcggcctgtataacttaacggcggcttcgtctgttttattcgataaaatcaataagcggcttgagcttgatatggatgatattcttgcgccgtttttgtccaagattctccgatttatcattgtagcgcttggaatcagcgtcatcgccggagagttcaattatgatgtcaacggatttgttgccggactcgggctcggcggattcgcttttgcccttgcggcaaaagacacagtcggaaactttttcggcggagttgtcattattatggagaagccttttacaatcggcgattggattgaaacgaaaattgtcacaggaactgttgaagatatatcgttcagaagcacgaaagtccgcacggccggagaggctctcgttaccgttcccaactctgtgctggccaacgaagcgatcatgaactggacgaaaatgcgaaagcgtcaggtcacctttacgctcgaaatcgatccgtcaaccccgcgggagaaagtcgagcggtgtggtgagcgttttaaagaaatgctcgaatcgcacgaaggggtcaacccggatgtcattatggtcaatttcgatgtcctgaaggatacgcatttaagcatcttcttcaactactatacaaatacgacggtctgggccgaaaacttggacgtcagacaggatgtgaactaccgcattcttgacattatgaaagaggagcaggttgattttgtttctccggggcacagcctctttgagttgaagaaaatgaaagatcagcaaggaaatgcttag

SEQ ID NO: 1145 - DNA, 750 bp, Bacillus licheniformis
atggaggaagaagccctgagatttgcggatatgatcgaaaatgccgagcgcattaccgttttgacaggcgccggtatgagcacggaatcaggcattcctgattttcgttcagccggcggcatatggacggaagatctgtcgagaatggaagcgatgagccgtgattattacgaacgatatccaaaattgttttggccgaagtttaaagagctttttcaaatgaaaatgacgggaacttatcggccgaatgacgggcacctttatttagccgaactcgagaaaagcggtaaggatgtcagggtgttcacgcagaatatcgacgggctgcatcttaaggcgggaagccgccatgtatatgaactgcacggttcgattcaaacagccgcatgcccaaaatgcggggcgcgctacggtcttgaccacattcttcaagaagaagtgccaaggtgcaatcgcgtcaatggcaaggggagagcatgcggatttatattaaaaacggatgtcgtgctgttcggcgacgccgttcagcatttcgacacgctttttgaagtcctcaacgaatccgacctgcttctggtgatcggcacttcactcgaagtggcgcctgtcaggtttgttcctgaagaagcgcacctgatccccggtttgaagaaagccatgatcaatctcgatgaaacgccttacgatcatttattcgacattgtcatcaatcaaaaaatcgccgagtttgttgggaaactcaatcattaa

SEQ ID NO: 1146 - DNA, 494 bp, Bacillus licheniformis
atgaaaatcgaagagttgcattcaaccgcggaatatgccaatcaattggccgagcttctcatccgcgtcgtcgatgacggggcatcagtcggctttctgcctccgctcgaaaagcggctggcggaggcttactggaaaacagccgtcgcaccggattcggttttatggattgccaaacaaaatggccggatcgcaggaagtgttcaattgcacttatgcacaaaacaaaacggccgccacagagcggaaatctgcaagtgaatgacagatcccgccttcaggcggcagggcgtcgccaaatcgttaatgcaaaaagcgatcgacagggcgaaacaggaaggcagatctcttctcgtgctggatacaagggaaaaagacccctccaacctcctttacgcttcgctcggctttgccgaagccggacgcattcctgaatacgcggaatctgcagacggccggctcgatgcatccgttttttattataaaaaactgtg

SEQ ID NO: 1147 - DNA, 912 bp, Bacillus licheniformis
atgcgccaagtatcaaaaaaaactgccccatctgtagcttatttgttgacgaaagcagcgtgctttttcgtgttgtgtctgattctcctgtacgtgtgggacctttcacagtcctctgccgctactgagaaaagagagcttacggtgtcggaaaacagccaaatgaggcatgaaggagacagcgttccgctcaaaaaagcaacgcaaggcgaacttctcgatcacttgagcacaaaacagcagatcgaaaagcgcaagcaggaaaaagagaagcaaaaagctgctgcggaaaaaaagaaagaaaaatcgaaggaaaaaacggtttatttgacgtttgacgatgggccttcagccgtaagccaaaggctgctgcaaattttatccgaacatgatgctaaagcgacattcttcatgctcgaaccgaacatgaagcttcacaaagaagccgttctcaatatgaagcagcagggccatgcacttggacttcacggggtgacccatgaccaaaagcaattttataaaggcgccaattctcctaatctggaaatgaagcaggctcaaaaaacgctgaagtctatcaccggggttgaaacccatttgatcagaacgccgtacggaagcaaaccgtcgctgaccgaagcgcagaaaaaagtgctgaaaaagaacggatttatttattgggactggaatattgacagcctggactggaaatacagaagccaaaaattcgttccggaagtcatgaaccagctgaatatcctggaaaagcggcagacaaaacagccgatcgtgatcctgatgcacgatattccttcaacggttcaatcattgccgttattgctgacaaatttaaaaaacatggggtattcatttgcaacacttgatgaatccatgacacccgttcatgaataa

SEQ ID NO: 1148 - DNA, 120 bp, Bacillus licheniformis
ttggtcctgaaggcggaaaaaagtttttggaaatattgcactattttgatcggcagggtcgtgttagaatggaatggagaaaattcagaagtcaacaaaaataaggggatggagaaatga

SEQ ID NO: 1149 - DNA, 852 bp, Bacillus licheniformis
atgaaagttctttttaacggccggctgattgaacggagcgagtgtgcggttgatattgaggacagaggctaccaatttggagacggcgtctatgaagtcatccgcatttacaatggaattttgttcacgcttgatgaacacattgcccgcttatataaaagcgcagccgaaatcggaatcgacctgtctttttcagaagccgagctgaaaagccagctgaaagagctcgtcgacatcaatcagatgcgggaaggcgggctgtatcttcaagtgacaaggggaaaagctccgaggaagcatcaatacggagcagggcttacgcctcaggtgacggcttatacatttcctattcagaagcctgaaaaagaacagcaaaacggcgtttcggctattactgcggacgacatgcgctggctgaggtgcgacattaaaagcttaaatctgttgtacaacgtcatgatcaagcaaaaagcgcatgaagcttcttcattcgaagcgatcttaattcgcgacggtttggtgacggaagggacgtcttcaaatgtttatgtcgtcaaacaaaacgctatctacacccatcctgcgacaacgctcatcttaaacggcatcacgcggatgaaagttcttcagctgtgtgaagagaacggcttgaattatgtagaaaaagcggtgacaaaggatgaattgctgaatgcggatgaagtattcatcacgtcaacgacagccgaagtcattccggtcacctcgattgacgggcaaacaatcggctccggagcgcccggaccgctcacaaaaaatgtgcagaccgctttgcaaaacagcattttgtcggaaacagccaaaacggtttaa

SEQ ID NO: 1150 - DNA, 1359 bp, Bacillus licheniformis
ttgtcaaacgaaaaacgactatcgttttccatatcggctctattgtttatggccatattgtttattattttcacctgcttattcatatttaaagcagaaccgcacataccgcttttgatttgcgtcggttttttggccgctgtcggcgcggtgaaagggcattcttggaaagatcttgagagcggcattgtctcaggcatccgaaatggcgttcagccgatcatcatcctttgcctaatcggcatcttaatcggagtctgggagtacagcggcgcgattccgacggtaacggtttacgcgttgaatctgattgaaccgcagcacctgctgctcaccgcacttttcagctgtcttgtgatcagttcattggtcggctccagctttacgacggtcagcacgatcggcgtcgccctcatcggtgtggccgcggcggcaggcgttccactgacatgggcggcgggagccgtgatttgcggcgcctgcttcggcgacaaaatgtctccaatgtcagacacgaccaactttgccgcaggagtcggggagcttccgattttcaagcatatcagacatatggcgggaacgacgatccccgctcttttgatcacgattttgcttttctttttcatgggccgttctttaacggcggcaccggcttcaaccgaaaacattcaagcgatcataaacggaatagaaggcatggtcaacatcagcgtcttcacgcttctgtcgcctctgcttgtgattgtacttgctgtcagacggacgcccgtcattccgtcgcttgcagcagggatcgtttccgccggaatttttgccgcgctgattcagcctgacgccggcatttcatcgtttttgtcagcgatgcagaatggcccggttttctcagccgatactgaagccgttgaaaagattttaaatcgcggcggccttcaatcgatgatgggctctgtttctctcatcatcatcgcattcgcgctcggcggtctcatggaaaagatcggcatgattacaagcctgcttgaaggcgtaatcaagggcattcatacgaaaggccggcttgtgttctcaaccgtttcatcaagcatcggcatgaacctggcgacaggagaacagtatttatcgatcttgattcccggtcagtcctttaaaaagctgtatgacaagcttggaatcgaccggaagcatttgtcgagatcacttgaagacggagggacattaattaatccgatgatcccatggggagtcagcggcgcgttcatgtccacagcgctcggcgttcccgtcattgaatatttgccgtttgtgtttttcctttatttatcgccgctcttttcgattttgttcggtttccgcaaataa

SEQ ID NO: 1151 - DNA, 90 bp, Bacillus licheniformis
atgtatttgatacacgtttcaatatccttaagccaaaatagggggaaatgcgatgtcttgcactgttcagaaaagccggtttttacatga

SEQ ID NO: 1152 - DNA, 981 bp, Bacillus licheniformis
atgtcttgcactgttcagaaaagccggtttttacatgaggaagcgatacggtttgaaaatgatgatttagaggcagtacttgtgcccgggtggggaagcaatttgatttcattgaggtggaaggcgggcggtttgaatttgttgaaaacgcctgaaacaaaggaagaatatgacgcgaatccgtttttattcggaatccctgttctttttcctcccaaccggatcgatcacgggagatttacatatgcgggaagaacatacgagctgccgatcaatgaaaagccgctcgaaaaccacctgcacggatttctttacgataaaaagtggacggtaaaaaaaatggaggcaacagaagagcggatcatcgtgcagacgatgctggactctgatgatcatccgggcatcaaatcgatcttccctcactctttttccatcaccatcacctacacattagaaggacagcatctgaaaattgatgcgtcggctgtcaaccgcggtcaagatccgatgccgatcggattggggtatcacacatctttccgctatcctttaaacgaatcaggggataaagaaaagtgcctgtttactcttcctgcctcaaagcattggacgctgacagaccgcatgctgccgactggcgagtatcgggtgacagaggagttcaaagcgggaaaaatggcagcgggtgaaaggcttgatgatatattggcggttgagcaagaccaagaaggaaacagcaccgccgtcattgcggacagcctcgccggcattcgcgtacgctatcaatgcgacggccattttaagcactgggttgtgtttaacggtacatctgatcaggatgatctgctttgtattgagccatacacttggatgacgaatgcaccgaacgtgaaccttccgaagagtgtgaccggatttcgggatttggggccgcaggaagagctgacgatgcgaagcaaaattgaggtaggcggaatataa

SEQ ID NO: 1153 - DNA, 378 bp, Bacillus licheniformis
atgaagaacatttttgtaagtctattggtcctttgtctagtctctattagtgctttcatcggtattgaagatgcttttgctgcagaggaattacaagaagaggcttattctgaacctattaaaagcgcagacgatctacaatatgatgttaataaaaatttgactcaggaagaaataacatctagatttaacaagataaatacaaaatacgatgttggtcaggctttttctgagcaggatgctgagtttataaagttttatgcggattctcaactggaaactccttccgagttaaatgatgggatatcaattagtgcaattcaatggtatccaggtcaaacagccagcaaatctttcaatacttacaaaaagttctaa

SEQ ID NO: 1154 - DNA, 414 bp, Bacillus licheniformis
atgggatatcaattagtgcaattcaatggtatccaggtcaaacagccagcaaatctttcaatacttacaaaaagttctaatggagtgaaagttaaattctctgggaaagtctatggtacaattggtattgtaaatcatagttatagagggaaattgagtgcaaaaataacttctggaacatctaaagtaaagaaagcattgaaagtacgggtaactcactcggcttatgggttggtagggaaaaaatcaattggcattgtatataacagtggaaaatcttctacgggaacaaaatccaaagtttctatggataatactgttaaatatagtgctcttgcagttgtttatacctatacgaatgcttatgtatcagttactacaaaaacaggttctttcaacaagtatgctttctaa

SEQ ID NO: 1155 - DNA, 477 bp, Bacillus licheniformis
atgaaacaggaatacaagcggccggtactattcatctcctccctcttcatggccttttgcgccgtttatttcggcggcagactgatcggtttctatatggcggaaaacccgaaatggaacgggcaaagcgctgacggaaattgggaggccgtgatcaaaaagatagaaggccgcacgctgttcggtggagacctctactggacaggcgaccgcggggagctggacgatatatatttggaaaaattggtcgtaaagtttggcgatgaaatcgttttgaactcccaagtcgagacgccgatgaaagattacgcgggaggcgaattccccggcggagggtcaaaagaacaatccgtttcttttttggaagagcttgaaaaagccgaattcgccggccgcaaggtaacggttcaattggattggagagagggcaaacaagcgtcccatacagcatttacgcttgataaaagctcatggtaa

SEQ ID NO: 1156 - DNA, 1935 bp, Bacillus licheniformis
atgaaccgctccattttggtcgttggcgaaggattgatggcagaaggcgcatcacaacaattatctgctgaatataacgtgatccgaaggtctgattttgagaacagcataccggaggagactgcgttcgctcttgtgctgcacgatgcttggcggcctttattatatcgcgaggctgaaaaggtgctaagggcggcagggattccgtggcttcgcgggtttgcatcttttggcgaaggagtcatcgggccgctcgttaatccgtcagcgtcaggatgttcccaatgcgccgataggagacggtatatctccggccccgacagcagagagacgcttgaactggaacaaaaaagcaatggtataagccgtgatacgtgggtttcaatgaccggctgccgccagatggtcagcctggtctgcacagaagtcgacaacatcatgaacggcgggcgcggccgattgaaaaaaaacctttacatcgtcaatttgaaaacgttagaaagttcgctccacgctttcatcccggaaccgacatgccctatatgcggcagtctgcctgaagacggagcggaatccgcacggatatcgcttcggcccagcctgaaaacgaacccggacagctttcgcgtgcgaaacacggacgatttaaaacaaacgctcgccaaagactatctggatcatagaacggggatattcaacgccaaaatttatgacgcgattctgccgttcgccgatatgatcgtcaatatgcctttatggacgggaaatgaaggtgtcggagggcggagtcattcgtatgaagacagcgaattgaccgccattttagaaggtttggaacgctattccggaattgaaccgcgcggcaaacggacggtcgtacatgacacctacgaaaatgtcaaggatcgtgcgctcgacccggcaaaagtcgggctccatcaagccgaacaatacatgcatcccgattttcctttccagccatttcacccggcccgcccgctccgctgggtatggggctattcatttttgcagaatcggccgattctcgttcctgaatcgctcgcctattacagcctgggccgcgaagacagcttcgtctatgaaacatcgaacggctgtgcactcggagggagtttggaggaagcgattttccacggcatattagaagcggctgagcgcgattcatttttgcttgcctggtacgccaggcttccacttcggcagctggatctcgactcttcaggagatccggaattgcgcctcatgacagagagggtgcgaagtgtggcgggatatgatctgcatatctttaattcaacgatggaatacgacattccaagcatttgggcgatcgccaaaaacagaaaacgggaaggattgaatctgatttgttccgcaggcgcccaccccgatcccgtaaaagcggtgaaaagcgcccttcatgagctggcaggcatgatgttgaagcacgaccgcaaatttgaatctgaaaggagcaaatatcaccagatgctcagcaatcctgctttagtgcaggaaatggaggatcacagcttcatgtacggactgcccgaagctgaagagcgcctccggtttttgctgaatcaaagcgggcctctgcaaacattcgacgatgcctttaaaaaaagaaagaaacaccttgatttaaccgaagatctctgcgacctgcttgaagctttccgaagtctcaaccttgaagtgatcgtcgttgaccagacttcacctgttatcgaacggaacggactttactgtgtgaaagtgctcatcccgggcctgattccgatgacattcggacagcgcttcatccgcctggaaggacttgagagaattttcactgtgccgaaggagctcggctttgcggaagagccgttaacaccagaacagttgaacctgcacccgcacccgttcccttaa

SEQ ID NO: 1157 - DNA, 1854 bp, Bacillus licheniformis
atgacacacctgactgcttccgctcgcctgaaagtaaaccaggatacatggtttcttcctgatccgaacggcggcgcatattttagaaataactccgggtcgtttcgcataaaaggatcttcgattgctcaatggatcgaaaaacttctgccgatgttcaacggggaacattcgcttgaagacttgacaaaagggctgcaggctccgtaccgaaagagagtatatgaaatcggagaaatgctttataaaaacgggtttgttcgcgacgtaagccgggatctcccgcacaaactggaaagctcagtgcttcaaacgtttgaagcccaaatcgaatttattgaaagctttgccgattccggcgcataccgttttcagctgtcgcgtcaaaccaaaatatcggctatagggaccggctcctttctcacaaaattggtccggtcgctgatcgattccggtttttcaagaatccgtgcgatcgtgacggatgcatccgggcatgctttagacgaactggcagaaatatcagggcaaacagaaagcggactggagattggctgcgccgaaacgcaacactggcgggaagcggtgcgatctgccgattgggttttatatgtctctgacctcggcttcacagatgagctccgtgctcttcaaacgttttgcctcgaagagaacaaaggcttcatacccggcatctgcctgaaacaagtcggactggcaggccctgtctttcatcaacaaggagacggatgcctggaggatgcctggaggcgcctccatcggtctgcgctccatgaagaacgaacgcttggaacctttccttcggcaggaaaagacatgctggcaaacgttattgtgttcgaattgatgaaagcagctgctgagcttgcaccattatctaagaagaatcaagtgtacctgattgatttggcaacgctcgaaggcggctggcatatgtttcttccgcatccggacttcgcttgcggcaaggattcgcctgaaatcatctgcgaccttgaagcgaaactttcggagcgccccggaagagaagcagaaagccggttattccaatgtttcagcgaactgacctcacctgtaacgggcatttttcatctgtgggaagaaaaacaattgcggcagcttcctttagcacaatgctttgttcagacagcagaccccctctcttccggacctgcggagcttctgcctgagacggtgtcggtcggtttgacccatcaagaggcgcggcgggaagccgggctgacgggtattgaaatgtatgcatcaaggttgacgcgttcttatccgaataacggggagttcgcgatcgccgccggagaaacgctggctgaaggcgtattaaggggattggagaaatgcttggaacaccggtttcgagaacggataaagagcggaaaagaaacgatttccctcgttcagctgggcgggatggaagaccggcattcctcattttatttaaaagcgctgacagtcttgtacggcaaaccggaaatcggtttaggaaaaaacatagaaggcttccctgtcgcatgggcgggaattcgcggccgctggtacggaagttccggactcaacatcacatttgctctcagaaaagcgctcgaacgggcgctgacagacaaagatcctgtgaaaggcgcggatgttctgctggagcctagtgacctgaagcttgccatccccatttccgctgctttgcagcaaacactgctttccgccttgaaaaacaaccgcggcttgccgctttatgtctatgagctgcctgctgaaccatttttcaaagaaaaactagcaggtatttactgcgtgcagttgcgaaaggaggaaccttga

SEQ ID NO: 1158 - DNA, 117 bp, Bacillus licheniformis
atgcagctccaacagcaatggcccgcgcagctccagcagctgtggcccgcgcagctccaacagctggcacagcttccgcagctccagcagcttgcgcagtgtttaacattggcgtga

SEQ ID NO: 1159 - DNA, 501 bp, Bacillus licheniformis
ttgtttaaagctgaccggatcatagtcgcgtttgacggaaaagaggaaagcaaaaaagcgctgagaaaagcgatcgacctgtcgaaaaggctcggctcacaattgaccgtcgcccatgtccatgaaccgaggcaagtgagaacagaggctgcggccgaaagaccagctgccggagcgccatacctttacagcggcttcccggccgcaccccggatcccccgcgattcagacttggccggtgaacccatgatctacgaggacagcgcggaagaagcgattgcggcagcgaaaatcatattgagcgaaaaccagtacgacgcggaaatcgaggtgctggaaggagacacggccaacgcagttctgcagcatgcggaaaacatcggcgctgacctcgtcatcacaggtacgcgcgaccagaaccgcctgaaaaagctcctgttcggcagcgtcagcgacaagatatcgacaaaatcggagatccccgtgctgattgtgaaataa

SEQ ID NO: 1160 - DNA, 147 bp, Bacillus licheniformis
ttgatttcgttttttctgatactcggcataaaaaattcctccttatgtgcggttgatttattggaaaaacatgctgctccgcatcggaaacaggatgttttttctccgaaaaaaaaggcacactgtgtaccagcatgccttttttaa

SEQ ID NO: 1161 - DNA, 1755 bp, Bacillus licheniformis
atgttttctgttttatggaagctgggctggttttttaaagcctcatggcggcgctacacgatagcggtcgtcctattgattattgtaaacgtattggaaatgtttccgccgaagctgcttggcaacgcgattgacgatatgcaggcgggcactttttccaaggccggcatgctcggctatatcggtttatttcttgcgcttggcgcagttgtttataccctgtcctattattggatgtatcagctgtttgggggagcgaacctggtcgaaaaaattctcagatccaagctgatgggccatttgctgaaaatgacgccgtctttttacgagaagaaccgcacaggggatttgatggcgagggcgacaaatgatttaaaagcaatttccatgacggcgggcttcggcattttgacactggtcgattcgacgatgtatatgctgacgatccttttaacgatgggttttttgatcagctggaaactgacgcttgcttcgatcattccgcttccgctgatggccgccgccatcagcatctacgggaaaaaaattcatgagcgtttcacggaagcgcaggatgcgtttggcgctttaaatgatcaagtgctcgagtccgtgtcaggggtaagggtgatccgggcctatgtacaggagaaaaatgatgtcagccggttcaacagcatgacggctgatgtgtacaagaaaaatatgaaagtcgctttgatcgattcgctgtttgaaccgacggtgaagcttttggtcgggatcagctatttaatcggtcttggctacggcgcctatcttgttttccgcagccagctgacattgggtgaactcgtctctttcaacgtgtacctcggcatgctgatctggccgatgtttgcgatcggagagctgatcaatgtcatgcagaggggaaatgcttcgcttgacagggtaaatgaaacattggcatatgagcctgatgtgagagagcccgctgaacccgaagcagcggagccgggcgatattgtgtttgacggggtcacttttacgtatccgagctctgcgtcggaaaacctggccgatatttcatttaccgtattagaaggacagacggtcggaatcgtcggaaagacggggagcggcaaaacgacattagtcaagcagctgctgaggcagtatccgcaaggaaaaggaacgatcaccatttcgggcgtgcccattgaacgtctgccgcttgatcagctccgcagctggatcgggtatgtgccacaggaccacgtgctgttttcaaaatcagtgaaagacaatattttgttcggcggacacctcgctgaagaacgcgatttgcacgccgtcatctctgcagcacatctgaaaaaggatattgagatgctttcagacggcttggagacaatggtcggagagaagggagtcgctttatccggggggcagaaacagcggatttcaattgcgagagcgatgattgcggagccccatattttaattttggatgattcgctgtccgctgtcgacgcgaaaacggaagcggcgattattgaaaacatccgcagcagacggaaaggcaaaacgacgtttattacatcacaccggatgtcggctgtcgaacacgccgatttcattctcgtcatggaggatggaaggatcgttgagagagggacgcatcaagaactgatcggccggaaaggctggtattttgaacaatatgaagcacagcagcttccttcgggagaagaagggggcactgtagcatga

SEQ ID NO: 1162 - DNA, 2019 bp, Bacillus licheniformis
atgacaacaggaaaaaggcttttccaatatgcgcttctttataaaaaaattctcatctgggcgctcgtcatgctgacgaccgccgtcacagccgagctgactgggccgatgatcgccaaaaagatgatcgacgatcatattctcggaattgaaaaaacgtggtatgaaacgacagagaactcgaaatatactgtttcctacaaaggaaaggaatatatcagggaagacaggacagacccttcagctgaaaagctgcaggaagttcacatctttcaagtcggtatgaactactactttgtggggaaaccggtttcctttgacggggagcggacggtttccgggggagagctgagaatgacgagcggagaccggacggaaacctacaaggccgatcgcctgtctttgtctgaagtgtatgctttttacgagcctgaaataggagggctgatctcgctcgtttctatttatttcggccttctcattttctcgatctttttccattacggccaattctacctcttgcagatgagcgcaaaccgcatcattcaaaagatgagacaggatgtattcgccaacattcaaaggcttcctatccgctattttgataatttgccggcaggaaaaatcgttgcaagggtgacgaatgataccgaagcgatccgcgatctgtatgtgaccgttctttcgacgtttgttacaaatatcatttatatggccggaatattcgccgcactgtttttccttgatgtcaggctggccggcgtctgtctgttgattgtgcccctgattgtcatttgggcggctgtttatcgaaaattcgcttcaggctacaatcataaacttaggtcaatcaacagcgagatcaacgccaaaatgaatgaatcgattcaaggcatgacgattattcaggcattccggcgcggacaggacacaaaagaagaatttgaacagctgaatgacagccactttcattaccaaaataaaatgctgaaattaaactcgcttatgtcccacaacttggtcaacattctgagaaatgtgatgttcaccgctctaatatggtatttcgggggagctgccctgaacgcggaaggaatgatttcaatcggcgtactctatgcattcgtcgattacttgaatcgtttatttcagccgattacgggcatcgtcaaccagtttgccaagcttgaattggcgcgcgtatcatcggagcgggttttccgcctgctggatgagccgggcgtcgatgtcaaagagccgagcagcgaaagagcgcgggggcgagtcgtgtttgaggatgtatcatttcgctatcatgacggtgaagatgtgctgaaaaacatctcatttgaagcgaagcaaggggagaccgttgcattggtcgggcatacgggctcaggcaaaagctcaatcatgaatgttcttttccgcttttacgatattgaaaagggcgatgtcaaaatcgacggcagaagcatatatgatatgtcaaggcaggaaatcagaaagcatatgggcatcgttctccaggatccttacttattttccggcacgattgcttcaaatgtcagccttgacaatgctgatattactagagagcaaatagaagacgccttgaaacaggtcggggctcttgaggtgctcgcccgtctgccgaaaggccttgacgagccggtcatcgaaaaaggaagcaccctttcttcaggagaaaggcagctgatctcgtttgcccgtgcgctggcatacgatccggctattcttattttagacgaggcgacggcccatatcgataccgaaacagaagcggtcattcaaaaagcgcttgacgtcgtcaaacaagggcgcacaacctttatcatcgcccacaggctgtcaacgatcaaaaacgccgaccagattctggtgcttgaaaaaggccggattatcgaaaggggaaatcatgaagagctgatgaagcaaaaaggccaatactatcaaatgtatgaattgcaaaaggggaaaggaaccctgatagggtaa

SEQ ID NO: 1163 - DNA, 621 bp, Bacillus licheniformis
ttgaagattgcgctttttggaggtacaggccgtgtcggacaggcctttctcaattttgttgaagaggatgggcaccattccgttaacgcacttgtccggaggacggaaggcgccagcattccggatttatgccaagcacatataggaaacgccaggaaccggcatgacgtcgagtctttaataaaagattgcgatatcgttgtcagctgtttaaacacagatggagacgatacattgaccgtctccatcgaacacatcataaacgccatgaacgtacatcggatcaaacggctgattaccatcggaaccgccggcattttaaacgcaaggcagaacccggccctttaccgctttgaaacaaacgaatcaaaacggcgctctacgcgcgcagctcaagaacatgcccgtgtgtacgaacggctccgcgaatctgatctggattggacgatcgtctgcccgacgtatctccccgatgggccggcattgaagacataccgttttgaacaggatgttctgccgcccggcggaagagaaatatccaccggcgacaccgcccattttctttttacacagctagagtctgaccagtttgtcaaggcgagggtggggctcgcttattaa

SEQ ID NO: 1164 - DNA, 123 bp, Bacillus licheniformis
ttgatgctcaacatcagctgcatgccgacccctcctttataccagcatatgaaaaaaggagaagcgggtgcgggctttcacaagatatgccagaggggaggcccccgtgatggtaatgaatga

SEQ ID NO: 1165 - DNA, 204 bp, Bacillus licheniformis
atggctaatcaaaattcttcaaatcaactgcttgtcccaggagcagcgcaagcgatcgaacaaatgaaattcgaaatcgcttctgagttcggcgtaaaccttggcgctgacacgacttcccgtgcaaacggttctgtcggcggagaaattacaaaacgtttagtttcccaagctcaagcatctatgggcggtcaacaattttaa

SEQ ID NO: 1166 - DNA, 225 bp, Bacillus licheniformis
atgatgtgtccagtgtgcaacgggattctcgtccagacgaggcattgtccgaagtgcggcggggaaatggcggacgccgggagagcaaccgattttttcggtccttacagtccgtacatggagttcgattcatttaaacaaacgcaaaccgcgtgcgttcatttatatacgtgccaagactgcacttatgaagaaaccgttgaaattgaaacgaccgaagcatag

SEQ ID NO: 1167 - DNA, 1107 bp, Bacillus licheniformis
atggcggaactcgtgctcgatcggatatacaaagtgtatgacaacaaagttacggctgtggataattttaatcttcatatcgaggataaggaatttatcgtctttgtcggaccgtcaggctgcggcaagtcgacaacgctcagaatgatcgcaggccttgaggaaattacggatggcgaattcacaatcgacggcaaacggatgaatgatgtcgctcctaaagaccgcgacattgcgatggtattccaaaactatgccctgtatccgcacatgaacgtctatgacaatatggctttcggcttgaagctgcggaagtttccgaaggatgaaatcaaacggcgtgtccatgaagcggccaaaattctgggccttgaacaatatttggatagaaagccaaaagcgctttccggcggacagcgccagcgcgtcgccttaggccgggcaattgttcgggatgcaaaggtgttcttgatggatgagccgctatcaaaccttgatgccaaattgcgcgtacaaatgcgcgcggaaatcacaaagcttcatcagcgtctgcagacgacgaccatctatgtcacccacgaccagacggaagcgatgacgatggctacgcggctcgtcgtcatgaaagacggaatcatccagcaggtcggggcgccgaaggaagtctacgaaaatccggaaaacgtgtttgtcggcggctttatcgggtctcctgcaatgaacttctttaccggcactctgaaagaagacatgtttacattcgacggcgtttcggttcgcgtgccggaaggaaaaatgaaagttctgcgcggccagggttatgtcggcaaggaaatcatcatgggaatcaggcctgaagatatccatgatgaacctgttttcattgaagcgtcaaaagactcgaaagtcgatgcgaaaattgaggtagccgagctgatgggcgcggaaacgatgctttattcgcaggccggcactcagccgtttatcgccagagtcgattcaaggaccgacgttcaggccggcgatacgattccactggcgcttgacatgaataaagctcacttttttgataaagaaacggagctccgcatccgctctgaaggataa

SEQ ID NO: 1168 - DNA, 882 bp, Bacillus licheniformis
atgctggagaaattaaagacgctttacggtgaacggatggttggatctgatgctgtttcaaaacacgatgcattatggtttcaaaccgacgaaggcgaaactttcggcgttttgaaaagcgcggtcaccgaccgggaaaaagagctgctctattgcctattccggcctttttcagaaccgcatcgtccgcagcagctgacaaagcgggagaaagaatggcacgaatatttcttttgcgatgcccccctccaaaacccgggaaacattcagctgattcaaggccatttttttaaaatggagcatgcccctgaagaaagacaggcgattaaagaagcggtcagcggcttttttaaagacccgcttgttgtatggtacgaccggcatgaagccgttatcgtccacgaaaatccttcaccgtttctcgcaaaaaaagagctgtccgagcttgcggatgcactgacaagcgatttcatggcaactcctgtgtttttcagcggccagcttcatccagtcaacggatcgcttcaaggcaaaatccgctttgaaaaacaaatgtttcattacatgctggaagcgggtgacatcggaaacgtcgccacgttttgccagtgcctcccgtcttttttgacggcaaaaccggagcgggttcatgcttcttcattttcggacgccgtaagagaagcgctgtctgatcccgagacatccctgaccatcaaaacgtatatgagatgcaacctgaatgcctctcttacagccaaacgtttgtttatccaccgaaacagcctgcagtacagaattgataaatttatcgaacggactgcaattgacatcagacagtttgaagaagcagccgctgtttatttgatgatgcatctcctttag

SEQ ID NO: 1169 - DNA, 210 bp, Bacillus licheniformis
atgatttctcactttcaatggaagccgctgtttaaaaaagaaaggcttcccggctggaaaatatcgttttatcataaagggattcattatgaaggaatttatcataaatcgggggaaatcgagtggggcagcacctatcccccgcatgatgacgagccttccctgaaaagcgaaattcatgaattaatgctcttccatatttacgagtaa

SEQ ID NO: 1170 - DNA, 135 bp, Bacillus licheniformis
ttgttatcattgtatctcattcacagaaaagatcatagattcttttcaaatggagattttacaaaaaaataccgtgaagaagcagattcttcacggcttgaggtcatgccacatgtcctccggattaaggattga

SEQ ID NO: 1171 - DNA, 1359 bp, Bacillus licheniformis
atgaccggtcaaccgctgacggtcggcatccaccagacgagtgaaaacacgatgctcctgcccgcttctttcaaacaggacggtctgttattcgccgctttcggtacgagtgttgaacggtgccacgtctcatttgacagccatttgaagcgcaccgttttattatccgaaaatctgtacaaaaacctgcggattccgtaccgcggcaaagcctccctgctttttcgcgacaataccgtctatatcggacctttaatcgggattttcacggccggtttcacaaaatcgcagcttgatcctgtcagaggaaggtctttatttttttcgaagcttttgacgatggatctcccggcaggaggctacagctatctgttcggggcgcaccagattaattgggaagaaggcacggtgcaggctctcattttcagggaaaacggctgggaggaggccatagtcccgctgcctaatgttgtatacgacagactgccgaaccgcaaagccgaagaatcctccgccttgcgggaaacaaaaaaacggcttatggatgaataccgcattccgtggttcaatccgggcttctttaataaatgggagatctatgaatgtctggagcaagacgagaggacagcggaattgcttccattttcggcattggagcccgatgccgataaaatcgaagacatgatcgaccaatacggcttcatttatgtaaagcccgccggcggcagtttcggcaaaggcatatttcagctttcaaaacgggaagaaaacggtattcttgccagacatgccgaaggcgtcacatctttttcgtccgctgctgaatgtttaaaagaatggcagatgcttcacaaacatacttcttatcttgcccagcaaggcatcgaacggatcgaagtggatcatcacccggcagatttcagggttcatacaaacaaaaacggaaaaggtcaatggaccgtcacagccatcgcggccaaaatcgctggaaaggacggaattacaacccatatgtcgagcggcggcgccgtgaaaacacttgcagagatttatgatgatcctcaggaaaggcttcacactctgcaaaagctgacaaaagcggcggtccttctcagccgggtccttgacgaaaagcttgacggtttcatcggagaaatcggctttgacctgggattggaccgttcgggaaaggtgtggctgtttgaagccaactcccggcccggccgaggaatcttctcccatccccgtctggcatctgtcagccgcttaacgaagaaaagaagctttgaatatgcttcttatttaaccgaacagtcaatccttaatccggaggacatgtggcatgacctcaagccgtga

SEQ ID NO: 1172 - DNA, 1086 bp, Bacillus licheniformis
atgatgacgcttggatttatgtcgttgtcgcacgaacatgaaaaagcctatgccgaagaactggccaaagtggcttcggactacggaatccggtttatccggttcacacccctggatatttcccccggttccctgcttgtgaaaggactctcctttcacccgaagtcaggacagtggaatgaaattgaacgagaaatcccggaattgatttatgaccgctgcttttacggcagggatcagcaatcgaaaaaagcaaaaccgattgtcgaatggctcaaaaagtatcctaaaacgacatttttaggacttggacttcctgacaaatggacggtttacaaaacattgaaagccgatcccgtcatcaagtcctaccttcctgcaacaacgattgcagaaaatgcccaggatatcctgcgcaagcttgcaaaagaaaaatcgtgcatcttgaagcctgcatccggatcaggaggccgcggcatcattcacttcgagcttacgggaaaaacggtgaaggccgcctaccaaactggaaaacacaaacagctgaagtcattttcgaaacaggcctcatttgaaacgtggtgccagaaagttcttcagcaccgctatctgctgcaatcgttcctcgatattcaagacaaagacggttttccgtgtgatatcagactgctgcttcaaaaaaacagctatggcgaatgggaaacagccggtaaaacggtaaggcggagctatcagcacggactgcttgcaaacctggccggtggctctgaggcggtgagctttgacagctggcttttatccgtgccgaaaaagcgccaggccgtccttctcgatgatttagagacaatggcgcaggccgttcccctggcgcttgaatcaaatcacgggccattattcgagctcggccttgatatctgcctgacaaaagacggaaaagtctggctgctggatgtcaactcaaagcccggaaaacacgcttttatcaagcactctcctgaaaaaagggagcttttgtataaaggtcctttggagtactgctcattcttaacggcttcagccggcgcgaaaggggctgagaaaagatga

SEQ ID NO: 1173 - DNA, 1131 bp, Bacillus licheniformis
atgtatgtatttgggatttttgccgttatgattgcagtcggtgcacttatcggcgctgtaacgaatcatgttgcgattaaaatgctttttcgcccatatgaagcgatctacatatttggaaagcgggttccatttacacccggattaattccgaaaaggcgcgatgaattggcgaggcagatgggacagatggtcacaggccatctgctgactacagaagggatcaaaaaaaggcttgcatccgatgcggtaaaaagccaggcggtgcaggtcggagagcggctcctggcgcacctctcgcaatcaacggccaccgttgaagaagcattggaaagcatcggaatttcaaatcccgctcaaaaagcggatcgagcggtatccagatgggcggatgagaaactgtccgcatttttagaggcgtatgaaaatgaaccgctgaaagagcttatccctcttgaagcccaggaaaagctgaaagagaaaattccaatggtgtccggctatattttaaaccgggctgtcagctactttgaaagtgatgaaggaaagaaacgcctcggacatatgattgacgattttttgaaagaacggggcatgctcggcagcatggtgcagatgtttttaggtaacagcagtctggttgaccgcgttcagccggagattgtgaagtttttaaagaacggcgagaccgcgcggttcttaacagatctgcttgaaaacgaatgggacaagatgaaagaatatacgttcaaggaagcggatgacaaatggaacctcaagcctctcattttcgatttgaaggaaaagtttttgaaacgattctcgcttcagccgtttttcgaaaagacgataggctccactatttctagttttgagcgggatatcgctttgcgccttccgcagatggccgaccgccttctggaagaagcgggccgccgccttgatcaagcgctcaaacagctggaactcgagcaaatcgtcaaggaacaggtggacaacttccccgttgaacgtcttgaagaaatggtgctgtccatttccaagcgggagttcaaaatgatcacgtatttaggcggcctgcttggcggaatcatcggagcggtgcaagccatctttgtgattttgatctaa

SEQ ID NO: 1174 - DNA, 354 bp, Bacillus licheniformis
atgacggtcaatttacatgactcggcttatgacttggaacaagccttgcgtcaaagcgatgaatattcccgattgaaaaatctttatgatgaggtgaatggcgatccatctgctaaaaagatgtttgataactttcgcgatattcaattgaaccttcagcaaaaacagatgaacggcgaagacatcactcaggaagaggtcgaacaagcgcaaaaatccgtggcgctcgtccagcagcatgagaaaatctcgcagctgatggaagcagaacagcggatgagcatgctgattgctgatttaaacaaaatcattatgaagcctttggaagagctttacggaaatccggagagctga

SEQ ID NO: 1175 - DNA, 201 bp, Bacillus licheniformis
ttgacaacccctttatttgaccagcagacggtgctttcaatctgtcaaattcctctgtaccccttatcattttgccgccagtccgtttttcatgatcgtatcccggcaaaaatgaaagcacttacatttagtattatcgcaactatttcacaaattgacaagtcttttttaaatctttatgaacattatttgttcacttag

SEQ ID NO: 1176 - DNA, 225 bp, Bacillus licheniformis
ttgccgggatacgatcatgaaaaacggactggcggcaaaatgataaggggtacagaggaatttgacagattgaaagcaccgtctgctggtcaaataaaggggttgtcaatatacggtgaattgaacgaaaggggcgttgaattcactgttttgaatatgagggagaatcatgatcgtatccacaagatgcgaagtcaaaagtctgtgaaaacaggctttttttag

SEQ ID NO: 1177 - DNA, 129 bp, Bacillus licheniformis
atgtacatactaaaaaaagcctgttttcacagacttttgacttcgcatcttgtggatacgatcatgattctccctcatattcaaaacagtgaattcaacgcccctttcgttcaattcaccgtatattga

SEQ ID NO: 1178 - DNA, 864 bp, Bacillus licheniformis
gtgtcaaaacaaatgcttgcgctgaatatagacggaacgctgcttcggacaaacggacggcttcatcccgcaacgaaggaagcgatcgaatatgcaaagaagaaaggtgtatatgttacgcttgtgacgaacagacatttccgctccgctcaaaaaatcgccaaatctttaaagctggatgcgaagctgattacgcacagcggagcgattatagcggacaaaatcgccgaacctttattagaaaaaaggatttccgaagaacagacatttaaccttgttcaaatactggaaagctatgattgcaatatcagaatcctccatgaaaaatattcgattggaaatcggaaaaaaacgaattcaaacctgctggggaaaacgatgattcacccgtctgacccgattttttatcccgtccagtttgtcgattcgctgagcgacatgctgatggatgaaccggtcagcgcgccggtgatcgaggtttattgctcaacaggtcagtccgaagaaatcaggcagacgatcacaaatgcgtttcctctcgtcgacatcattgaagcgggagaaaaaatgctgattgtccataaagggatttcgaaagaagcgggcttgacgatgctcgccgccgacctcggtttaaaaatggaagatgtcgttgcgatcggccatgatatcgacgatcttccgatgatcgagcttgccgggctcggagtcgcaatgggcaatgctcctcaggaggtcaagcaaaaagcggattgggtgacgcgctccaatgatgaacagggcgtcgcttatatgattaaagaatacttcagaatgcagcaaagcaaagggtttcttaaaaaattccatattaaaaaagtctga

SEQ ID NO: 1179 - DNA, 1506 bp, Bacillus licheniformis
ttgcgcatttatatagaagggctccaagacgaaaggttccagagaccgcttgagcatatagcgaacttattctttgaggaaagcgaagtcgctcttggcgaagaagcgccggcagaccttgcgatcgttctcggctatgaacgggaagaaaacggcgtcaaggcttccggtgcgataaaggatacggacattacagcagaatatgcgaaaaacattgaccccaagctgacggaaaaggaagcgtttaagcaggtgaagaataccgtttcctacgtttttttgagcatgcttcaggagcataccgggatcattcagaaatgggggattctcaccggtgtccgtccgacaaagctgcttcacaaaaagctggagagcggcatgccaaaggaagaggcccatgccgagctgaagcgggattatttaattcacgacgaaaagatcgaactgatgcaaaacattattgaccgtcagctgaaagctgtacctgatttgtatgagctgggccaagaggtcagcatttacatcggcatcccgttctgcccgacgaagtgcgcctactgcacgttcccggcgtatgcgatcagaggacaagccggacgggtcggctcatttttgtgggggcttcactatgaaatgcaaaaaatcggcgaatggctcaaggagaacgatgtcagcatcacgaccgtgtatttcggcggcggaacgccgacaagcattaccgccgaagaaatggatttattgtatgaagaaatgcaccgttcatttcccgatgtgaaaaacatccgcgaggtcacagttgaggctggacggcccgatacgattacagaagaaaagctcgcggtcttaaaaaaatggaacatcgaccgcatcagcattaacccgcagtcttacgaaaatgaaacgctgaaagcgatcggacgccaccataccgtggaagaaacgatcgaaaagtaccatctgtcgcgaaatgccggcatgtcgaacatcaatatggatttgatcatcggccttccgggcgaaggagtaaaagaattcagacactctctttccgaaaccgaaaaattaatgcctgaatcattgaccgttcatacgctgtcatttaagcgcgcgtctgaaatgacgaagaacaggcataagtataaggtggctgaccgcgaggaaattgtcgcgatgatggatgacgctgtctcgtggacgaaacagcacggttaccatccctactatttgtacaggcagaaaaacattctcggcaacctggagaatataggctattcccttcccggccaggaaagcatctataacatcatgatcatggaggaaaaacagacgattatcgggatcggctgcggagctgcgagcaaattcgtcgatccgggaacgggaaagatcacacatttctctaacccgaaagacccgaaaacgtacaatgacagatttgaacactatacagaagaaaagcttcgctacctgtccgggctttttgacaagaatgctaaaggcagttaa

SEQ ID NO: 1180 - DNA, 1212 bp, Bacillus licheniformis
ttggatcatctagtatttgaagtcggcactgcactcttgcttgtcgcaattgctgccttaattgcgaatcggattaaattctcgatcattccctttttaattgttctcgggatgatcgtaggcccgcacgctccgacgatcggtatcatcaacttgaagtttatcgagagctcggagatcatcgcctttttcggcagaatgggcgtcttgtttttactcttttatctcggactggaattttcgatcggaaagcttattaaatcaggacggtccatcgccgtcggaggaagcatttatattctgatcaacttcagtttaggcctcatgttcgggttcatcgcgggcttcgagtttctcgaagtactgatcatcgccggggttattacgatttcttcgagtgcgattgtcgccaaagtacttgtcgacctaaagaggacagcgaatccggaaaccgaactgattctcggaatcattatgttcgaagatatttttctcgccgtttatttatccgtcgtctcggggctcgtccttggtgactcaacttcagtcggatcggcgctgctttcgattttgatcgcttttggctacatgatattgttctttatcgttgccaggaagctgccaaaattgttaaatcggctgtttgatatccgttcaaacgaagtctttattatcgtgatttttgcgctgctgttctttgtcgccggcttttcggaaacgattcacgttgccgaagcaatcggcgccctgcttctcggactcgtgttttccgagacagaacatgcaagccagatcgagcatttggttgtaccgtttcgcgatttcttcggtgcaatgtttttcttcagcttcggattgagcatcgacccgtttacactgggagatgcggtatggctttcaatcggcgccgtcatcctcaccttggccgggaactttatcgccggcatgatcgcaggcagaagggccggactttctcataaagcttcatccaatatcggcttaacgattgtctcacgcggcgagttttcgatcattgtcgccaacctcggaatcgccggcggactttcggccacattaaagccgtttgccgctttgtacgtactgatcctggcaattttggggccgcttttgacaaaagaatcaaaacggatttttcatatactgaacaaaatatttaagtggaaaaaatccgaaacaaaacaaagaggatga

SEQ ID NO: 1181 - DNA, 498 bp, Bacillus licheniformis
ttgaatattaaagaaagtgatctgccgggtatcggcaaaaaatttgaaatagaaatgagaaaccatgaaaaaatgacgattgtcgttcatgacgacggaagaagagaaatctatcggtttgacgacgaagatcccgatgaaatcgtgaccaacatctcgcttgatgacagcgaagcaaggcagatcgccgccatcctcggcggaatggtctataagccgcaggcgcttgaatcgattgaaatggcgtttaacgacctgatcatcgagtggttcaaaatcgaaaaaggagcaaatgccgtcggcaaaactctcggtgaaatcgacgtcaggcaaaactacggcgtcactgtcatcgcgatcattaaaaagaatcaggaaaaattcttgaatcccggggcagattccgttcttgatgaaaatgatacactcgtcctgtccggtgaaagaaaaaacctcaaggaaatgaagcaggcttttctttcccgaaaggaagggtga

SEQ ID NO: 1182 - DNA, 777 bp, Bacillus licheniformis
atggaatatatcaaatggaaagacgaagacgggatttttgaaattgtactgaatcgctctgaggcgtacaatgccttgaatgaaaaaatgcttgaagaactgaatgaagctttgcgtgttgcagaggaaagcgaatcgctgcttctccttgtgagaggcagcggcaaaggattttcggcaggcggagacattaagatgatgctgtcttccggagatcaagacagctccgcccgcgtcattgacacaatttctgaaattgcggtgaagctttacagcatgccgaagatgacgacagcggctgtccacggtgcggctgcgggtctgggattgagcctcgcgctcagctgcgaccatgtactggtcgaaaaagaggcgaagctggcgatgaattttatcggcatcgggcttgttcccgacggaggcggacacttctttttagagcggagaatcggtgaaactgcggccaaagaattgatttggagcgggaaaaaattgacgggggccgaagcgctcgagcttcggatcgcagacgccgtattcagcggggactccggccgttttgcgcgcatctttcttgaaaagcttctgcacgctccgctggcagcgatgattgagacaaaaaagatctatcaggcgttgaatggaggcaggctgcagaaaacgcttgaactcgagaaaacggcccagatgaaaatgaggctgacaagcgaccatcaggaagggatccgcgcatttttagaaaagcgccagccgcaatttaaccgtcagcaagtataa

SEQ ID NO: 1183 - DNA, 138 bp, Bacillus licheniformis
atgaaagctaaactgttgttcgccatggtgccgctggctgttgtgttaccgtcttcaagctttttggcagataaggggaaagccccttccttgtacgcggacaaaatgatcacgactgacaaggaggctcgagtttaa

SEQ ID NO: 1184 - DNA, 279 bp, Bacillus licheniformis
atgatttcatctgagaatgagcgggctgacgcagcgaaagaatgggcgatgtatattgcagtttcttgccttttcatcctgatcgtctctgtgatttgttttttcgctccggcctaccgcttgcaggatctcttgtttcgaatgtttgatgctgtcatcatctgtgtgctgacggtcaatggcctttattatctgaaaaaaaataaaggcgtcgcttgcgcatcgtttttactcggcttcatcaacatgggactgctcgttgttttgatggtccgctag

SEQ ID NO: 1185 - DNA, 186 bp, Bacillus licheniformis
atggaaaattattatgtaaccgttttcgatactagtggaaaaacgcttttgaatgagcgatttgaagcggctgatgatgaagaagcgaaagagaaaggaagaggaatgctgaaggaaaagcaatttttggagcatacacaccgggtagtacattcgtccggtaaaatcattgttttccgcagctga

SEQ ID NO: 1186 - DNA, 897 bp, Bacillus licheniformis
atgctcaaaatcgatcacgtcacgaaaagattcggttcatttacagctgtaaacgatctgacgctggagattccagacaagcaaatgttcggtctgctcggcgccaacggagcagggaaaacgacgacattccgaatgatattaggccttttgaatgcgacagagggtactgtcacatggaaaggacagccgattaactacggtgtcacaaacagcatcggctatttgcccgaagagcgcggactgtatccgaagctgaaggtgaaagatcagctcgtatacctcggccgcctgaaaggcatgacaaagcaaaatgcgctcaaggaaatggagaagtggctcgaacggttccatattacggaatacgccgacaaaaaggttgaggagctgtccaaagggaaccagcaaaaaattcaattcatcacggccgtgctgcacaagccggagcttttgattctcgacgagccgttcagcggtctcgatccggtgaatgtcgagcttttaaaagacgcggttatttctttgaaagacgacggcacttcgattgtattttcaagccacagaatggagcatgtcgaagagctgtgcgaacacgtctgcattttgcagcgcgggacgcctgtcgttcaagggaaattaaaagaaatcaaacgttctttcggcagaaaaaatgtcacgattcacgcggacggcgacttgagcttcttgaaagaggcggacggcatcgtcaaatggcgtgatcattccgaaggagtccgcctgcaggtcgagaatgaagaagtctctcaagagctgtttacaatgctgcaaggacgcgggtttatcagaaagtttgaacttgaagagccttctttgcatgatattttcgtcgaaaaggtaggtgcccgttatgaataa

SEQ ID NO: 1187 - DNA, 1269 bp, Bacillus licheniformis
atgaataagttttggattgttctttttcatacatatatcagcaagctgaaaacgaagtcgttcatcatttcaacggccatcacgcttgcgcttgtcgtgctcgtcacaaatttgggatcgattatttccatgtttgacgacggcggagagggtgacaagatcgctgtcattgatcgctcaaatcagctgtacgacacgtttgcccagcaggtgaaagcactcgatactgatgaagcgctggaggtccaaaaagcggataagccggaaaaagagcttgaaaaagacgtcagagacgaaaagctcgagggcattttaatcctggagagagataaaaaaggggtgctgaaaggaacgtataaagcgctcgatatcgctgattccacagctgtctccacgattgaacaggcgctctcgcaagcaaagatcgccgttggaacggctgaattgaacgtacctcaggaaaagctgagtgaactgtttacaccggtaaaagtcaacagtgttgccttgaaagaaggcgcgaaaaccgaggaagagcttcaaaaggcgacagggcttgtgtatgttgtgctgtttgtcatctatttttccgttttgatgtacgcttcaatgattgcgacagaagtagcgacggagaagtcttcccgcgtaatggaaattttaatttctagcgtgccgcctgtccagcaaatgttcgccaaactgttcggcgttgccctattaggcctgacacagcttgccgcgctccttcttgccggctatctgtcgcttcagtccagccaggaaagcggaggggatgcggctgagctggttaaaggattttttgatgtttccggcgtacctactgcaacgcttgtgtacgcggtcattttcttgatgctcggctacttcttatacgcaactcttgcggcatttctcggaagcgtcgtcagccggattgaagatgttcagcagatgatttcgccgatgatcctgttggtcgttgccggattcatgattgccatgttcggactgaatgctccggattcgacgtttattaccatcacttcattcattccgttttttgcgccgatgatcatgttcctcagagtcggcgtgcttgatattccgttttgggaagcggctctcggcatcggcatcaccgctctcacgattgtgattctcgccgtcatcggggcgagggtgtataaaggcggcgtgctcatgtacacaagcggcggcggattgaaaaatatcaaacaggcgcttcgtctgtcaaaagatcgataa

SEQ ID NO: 1188 - DNA, 1227 bp, Bacillus licheniformis
ttgacaaacatcactttcattcatgcggcagatctgcatctggacagtccgtttcacggcatcagccagcttcccgaggagatttatcagcggatcaaaaacagcacatttaaaagcgctgaaaatgtgtttaagcttgccattgatgaacaggccgacttcattttgcttgccggggacctgttcgacgaagcaaaccgcagtttaaaagcacagatgtttttgagaaaacaatttttaaagcttaaagagaacaacatccaagtctatgtgatttttggcaatcacgatcatctgggcggcgattggacgccgattgaatggccggacaacgtccacatcttttcagcggaagacattgaagaaaaatcgttttacaaagacggccggctcgccgcaagcatctacggctacagctatcccgagcgctcagtttatgccaataaggccgctgaaatcaaaaaaacgaccgacgcgcccttgcatatcggcatgattcatggaacgctttccggagagagcggccatgacccgtactgtcctttctcccttcaagatttaaaaaacggacagatggattattgggcgcttggacatatacataaaagacaggtcatttcagccgccgatccggcggtgatttatccgggaaacacacaatcccgccatatgaaggaaacgggggagaaaggctgctatctcgtcaatgtttgcggcggagaactgtccttcgaatttaaagccgtatcggatgtcctgtgggaaacggccagcatcgatatctccgggacaaagcagatgacagagctgatcagcctcatgcacgatgcctttcaatctttcagaaaaagaggcaagcccgcatgcgtcaagatggtatggacaggagaaacaccctcttatttggcggaaggacaggccggcatcgcggacgagatccttgacatcttccatgaagaagaacgggaggaagacgcgttcatctggcttaccgcgatcgaagatcaaaccgatgccgccttgtcgggaatcgaaagggacgcttttttccaggagcttttgcaagaaatccatgagtttcaagatttcagcctgattcttgacgatttggagcggcatccggtctttagaagacacggagagctgtttaatgaggaagacttccgggacattcgcacgcaggctgaaaaactgctgcttcatgaactgaagacattgaaaagataa

SEQ ID NO: 1189 - DNA, 2967 bp, Bacillus licheniformis
gtgaatatacatgcgatacatatatacggatacggtaaattcgccaatcagacattccgcctgtctccttcaaatctgcatttgatctacggactcaatgaagccgggaaaacgacgctcatgtcgtttattgaaagcgtgctgttcggttttccgaagacgaaacggtacgagccgaaaacgggcgtcatttacggggggatgcttgaggtcggacaccctgatttcggccaaatccgaatcgaacggacggccggaaagcccgagcgggtcaccgtttacttggaagacggcagcacgaagccggaaggttttttaaatgagctgctgtcaggcatcgacaggcagctgtataaagcgatctactcatttgacgtgttcggccttcaggaaatccataaattcaaccgcgacaaaatcggccgttttctgctgttttcaagtctgttcggctctgatgcgatttccaagctggatgccggcctcgtgaaaaagcaggaagagctgtttaaaccgaacggaaggaagccggagctgaaccaggagcttgatcggttaaaaaggctttctgaagatttgaaaaaggcgaaagcgcgggaaggcggctattaccgtctcttaaacgaaaaaaaaggcgctgaggcgtcgataaaggaaagcggacaactgctcaaagatcttgagcatctcgtcttacaaatcgagcaggccattgagattctgccggcggccgcggaaatgcgccagctaaaagagcagctcgcatccctcggcggctcagaagaaagccgtttccccgagggcggacttttcgagctcgaaaagctcgaatcccacctgcatccaaaagcggctcagctgaaggcgctggaagaaaaaaagcgcggtttggaacagcgcgccgccgcttttgcaccggctgaagacttcctcgagcacgaagccgaagcggaagagcttttaacggcgtatccgttttaccagtcgtataccgaaaaaatcgcgtctttgactgaacagcttcaccagataaacggacgggttcaagcggggcttgaccgcctgcaaatcgaggaatacgatatcctcaatgcggacaccacgtatgaatacgagtggaagttgcaggaaaccgttcaggcatacatagagctgcgcgaactgaagcggtcgctcgacgagcggtttgagcaggcgagggctgatctggaggaagcggaacaggcccatgccgctctcagcaatgaagtgatgcccgatgatgtccgaaaacaaaaggaagaaacccttggccgccttgcgtccgccggcggtcatgccggaaggcgggaagagctgatccttcagctgtcctatctgaagcaagaacaaaaagttcggatgaaaagaagaaggaccgcttttgcgggagcgctttgcgctgcttttgcggcagcttttgcggcgctctttttcaaggagtggttcccgggcgctttgctcgcgccgatcttgctgatatttgccgcttttattttaaaaaagcctgagccttccgcggcggcggcttttattcaaaaacagctggatgatattgaccacagcggttcaaaaggcggagtaagcgacagcgctttaagggaggagctgtggaaggacgaccaaacccggcagctccttatcgccaaacaagctgagctcagacagaaagaagcggaatatgaaagagcgattcaaaaattcgaagagtgggaaaaggatatccgtccgtatcaggagaagaccgagcgctatttaaaagagctgaatctttcaattgacccgtcatttttagctgatgcgtacgctttgattaaggaactcagagaggaaattttgaaaaagcgggatatcgagaaggaactgagccgccttcatgctaaaaaagcatcctttgaagcgggattgagaaagcttgtcacatccctcagccttgcgggcggaagcgtccaagagcaggtgtttcagctgaaaagcgagcttgagtcccaaaaagagaaacttcgtcaaaaacaggaagcagacgtgtctttaaagcatgcggccgaacaaatcaaagagctggcgaaagaggtggaatacttccaatctcaaattgccgaactctttcaaaaggcaggggcggacgggcgtgagatgttcgtcggactggcgaagcgcgatcaagccagaaaagaactaacggctaggctcgggcagctcaaaagagagctcggcagacaggacgagaaggccgttatgctcgcctcaggccactctctggcagaactgaaaggaaagctggccgagactcaggaaaaaagagcgcgcatagaaaagcagctgacagaagaaaggcagacggcggctaatttccatgcagagctcgccagacttgaggaatcaggagcggtatcggagcttgcctatcagaccgggatgcaaaaagagcgggtcgccgaattggccaaaaagtgggcagccgtcaagctgatccggcaggcggtccaaaacaagatagatgaacataagaaggttcggcttccgaagctgttacagacggctgaaacattactgaacccattgactgccggacaatacgaaaaaatttatttttctgaaacagatgattccatgatggtcatgcggaaagacggagctcttttttgcgcacacgaactgtctcaggcgacttgtgaacagctctatttagcgatccgattcgctctggccctctcccatcaaaagaatgtcaaattgccgttccagctggatgacagctttgtccacttcgaccaagagaggtttaaacaagtgctgaacattttaaaaaagctttcaggcgaagatcagcaaatcttgtattttacgtgtcatgaacatgtaagagaagctttccgcgatgaagatgtgattctgctgccttccggaatgaaaaaggtggaaggaaaggagatgactaacaaataa

SEQ ID NO: 1190 - DNA, 945 bp, Bacillus licheniformis
atggcaaaaggtatcatgctgcacgaagttggcgagcaggtggatttgtacttgctcattaaatcgtcaacgaaaggaatcgcaagcaacgggaaaccgtttttaacgctgatgctgcaggatcagtccggagatatagaagcaaagctgtgggacgccaagcagcaggacgaagtgacctacggcccgcagacgatcgtgaaagtggtcggcgacattcatcattaccgtgggcggaaccagctgaagctgagaaacatcagacctgcaggcgagaacgaaaacgtcaaaatcgatgactttcttgaaactgcaccgattcccaaaaacgaaatgatggatgcggtcactcaatatatttttgaaatgaaaaacccgaatatacagcgaatcacaaggcatcttgtcaaaaaatacggcaaggaattcattgattatccggctgcgacgaaaaatcaccacgagttcgtgtcaggtctcgcgtaccatgttgtttccatgctgaacctggccaaatcggtcgcagacctgtatccgtcgctcgatcgcgaccttttatacgcaggcgtcattctgcatgaccttggaaaagtaaaagaactatccggcccggtgtccacgacatatactgtcgaagggaacctgctggggcacatatcgattatggtgacagaaattgcaaaagccgccgaagagcttcaaattgattcagaagaagtgctgattcttcagcatttgattttaagccatcacggcaaacccgaatggggcagtccgaagccgccgatggtcaaggaagcggaaattcttcactatatcgacaaccttgacgcgaagatcaatatgatggacagagcgctcgaacgggttaagccgggagaatataccgaacgggtcttcgcattggataaccgttccttttacaagcctgtttttcacaaataa

SEQ ID NO: 1191 - DNA, 234 bp, Bacillus licheniformis
gtgctgctgtttccgtggtgggtgtacctttgcatcgtcggcattattttcagcgcctataagctgatgacgacggcaaaggaagaggaaaagattgaccaggcttttatcgaaaaagaaggccgcatttatatcgaacggatggaaaaagaaaaagcaaagcgcatgaagcgtacactggatgaagatcaagaacagcatgaaaaatcggctgacagccattccatcgcataa

SEQ ID NO: 1192 - DNA, 861 bp, Bacillus licheniformis
atgaagaagattgcaattgcggcgattacagcgacaagcgtgctggctctcagcgcatgcagcgggggagattctgaggttgttgcggaaacaaaagctggaaatattacaaaagaagacctttatcaaacattaaaagacaatgccggagcggacgcactgaacatgcttgttcagcaaaaagtactcgatgataaatacgatgtctccgacaaagaaatcgacaaaaagctgaacgagtacaaaaaatcaatgggtgaccagctcaaccagctcattgaccaaaaaggcgaagacttcgtcaaagaacagatcaaatacgaacttctgatgcaaaaagccgcaaaggataacataaaagtaaccgatgatgacgtaaaagaatattatgacggcctgaaaggcaaaatccacttaagccacattcttgtgaaagaaaagaaaacggctgaagaagttgagaaaaagctgaaaaaaggcgaaaaattcgaagaccttgcaaaagagtattcaactgacggtacagccgaaaaaggcggcgacctcggctgggtcggcaaagacgataacatggacaaggatttcgtcaaagcggcatttgctttgaaaaccggcgaaatcagcggacctgtgaaatcccaattcggctatcacatcattaaaaaagacgaagaacgcggcaaatatgaagacatgaaaaaagagcttaaaaaagaagtccaagaacaaaagcaaaatgatcaaactgaactgcaatccgtcattgacaaacttgtcaaagatgctgatttaaaagtaaaagacaaagagttgaaaaaacaagtcgaccagcgtcaagctcagacaagcagcagcagctga

SEQ ID NO: 1193 - DNA, 84 bp, Bacillus licheniformis
atgagcggaggatactcaagcggttttgctttattggtcgtgttgttcattttattaatcatcgttggtgcagcttatctgtac

SEQ ID NO: 1194 - DNA, 216 bp, Bacillus licheniformis
atggagcagaaacagagagggggatctcctatcatccttttttatttcatcttgtttgcggtttttactgtcttcaacataaacaagcttacaaactctttatgccttgtcagagagattcctgaagagcggcaggataaggtatttagaatgattaatgtgctgatcttaattttattgatctcatcattcattgagatttcctttacggtgtaa

SEQ ID NO: 1195 - DNA, 516 bp, Bacillus licheniformis
atgagttgctggaaaaccatcaatctcgttaaagattatggaggcatgcgcatcgtgctcactgccgtcagtttaatgattttattttttattcccgaatatttagcgatgcagcttattcatccgcaaactgttcagagaggcgatcatgcccttttgtttgcaggacttttggttgcggctataatcgcccataaaattcttcatatcttgccgatgatcagcaagaaaaagttagaaaaaaagatttattggttgaaaatgagaacatggagagaaattccgaaaaacatgatgcttgtctctcttctctgcccttttttggtcatcacgcctgttttgttttacgcgggggcggcgatgccgagctttgctcactatttctgcatcatctcaagcattcatttcggctattgtctgcctgattttctgtttgcctggaaactgatcaaagcgcctaaaaactgctttgtcgatcaggaagccgacgattttgatattttaatacaaaaataa

SEQ ID NO: 1196 - DNA, 348 bp, Bacillus licheniformis
atgaactcaatggagcaacgcctcgagcggctggaatattacatcaaactgttattgaacaatgcggatatggaagagtatccgtactataaaatattgatcgaaaagggcttatcagaggaagaagcaaaggaaacggaaaagctgtgcgaagagctctcaaaggagcttgaagcacaaaaagcgcaaggatttgtgatgttcgatcatctcctcacgctttttgccggacagttaaatgaaaaacttgaagtgcacgaaacgattttcgcccttcacagacaaggtctttacaaaccgctgatgagcgaattcatcagcattatcaggcagtacgatctggcttag

SEQ ID NO: 1197 - DNA, 621 bp, Bacillus licheniformis
atgaatcgagcggaagagccctatacggtgaaagaagcccttttattcagtcaaagaatggcacagcttagcaaggcgctttggaagtcgatagaaaaggattggcagcagtggattaaaccttatgatctgaacattaacgagcaccatattttgtggatcgcctaccagctgaacggagcatccatttcagaaatcgccaagttcggcgtcatgcacgtatccacagcgtttaatttttcaaaaaagcttgaggaaagaggttacctggagttttccaaaaaattgaatgacaaacgcaacacttacattcagctgactccgaaaggtgaagaagttttccttaaaatcctcgagtcttacgatccgacccggaacgccgtcttaaaaggcgctcagccccttcatcagctgtacgggaagtttccagaaatcgtcgagatgatgtcgatcatccgccatatttacggcgatgatttcatggaaattttcgaaaaatcgttttcaaacatcgaaaatgaatttacgagcgaagagggcaaaatgaagaaaaaacaagaagcaaaagaagccggggaatcgatagaggtggacaaaccgcttgagcctcttaaaaactaa

SEQ ID NO: 1198 - DNA, 357 bp, Bacillus licheniformis
atgtcaaaaggccgatctttagcagctggactgattgtaggcggtgttatcggcggtgttgcagcattgctgaccgcgccgacttcaggaaaaaacttgagaggacagcttaaagccaactgcggtaaatgggaagacaccgtcaaaaggctgaaaaacgacggaatcgcattaaaagagcaattcgtcaaaaccgccatagaaggcgcggaaatcattaaagacgtcggcagcgaactgcaaacgtccatccaggaatggcgcgaggaaatcaaacctcatcagcaggacttaaaaaaggaaatcgctgagatcgaagaaaagataaaacagctggagaaaaccttacaaaactaa

SEQ ID NO: 1199 - DNA, 222 bp, Bacillus licheniformis
ttgtctgtcataatcattgttttgacaattataagcgctgtgtttaccgccggctccttttattatttaaggcttctcggatattctgcatcttatccgccgaaacgcattcttaaacaaaaagcgcttttttgcacgggaagcgcagggttggcgctcctgcttcctttttttttattcagcttcttatataaaatatcgggcggattcccctttttttga

SEQ ID NO: 1200 - DNA, 528 bp, Bacillus licheniformis
atgaaaacaaaagaattagtggctatggccctgtttgtcgccattggagcggcgctgcacgctgtgattccgccttttttctacggaatgaagccggatatgatgctgatcatgatgtttatgggaatccttttgttccctagactgcaaaatgttctcgtcatcggagccgtgacaggcgtcatttccgcgttgacgacggcttttcccgggggacagctgcccaacatcatcgacaaaccgctaacagccttgatgttcttcggcgtatttctgcttgtgaaaaagctgaacagcaaaacgcttgctgccgccggattaactgctgcaggaaccgttctttccggaacgattttcctcacggctgcactgttcattgtcggcctgcctggaaatcagggattcatcaccctgttctctgttgtcgttttaccagctgccgtgatcaacacgatcgccatggcggtcatctttccgatcgtgcagtcgatcatgaagcgttcaaggctgattgaacaagtcaaataa

SEQ ID NO: 1201 - DNA, 1074 bp, Bacillus licheniformis
atgatacgtacaacgaactttaacgcaggaccagcagcactgcctttagaagtgcttcagaaggcaaaagacgaatttcttgatttcaatggtgcggggatgtccgtgatggagctgtcccatcgcagcaaagagtatgacgccgttcatcaaaaagcgaaagctctgttaaaagaactgatggacatacctgatgattatgaagtcatgtttctgcaaggcggagcaagccttcagttttcaatgattccgatgaactttctctccaaagacaaaacggcccacttcattatgacaggcgcttggtctgaaaaagcgctggccgaagcaaagctcttcggaaacacatcgatcatcgcgtccagcaaagaagatacgtacagctatattcctgaagtaccggagattccggcagacggggcctaccttcacctgacttccaacaatacgatctttggaacgcagtggcaaaagttccccgacgctccgattccggttgtcgcggacatgtccagcgatattttaagcagaaaaatcgatgtttcccaatttgacatcatctatgccggcgctcagaaaaacctcggaccgtcaggggtgaccgttgtcatcatgaaaaaagactggctcggcaaggaaaatgagcaagttgccaaaattctgaagtactcaacacatgccaaagcggattcgctctacaatacccctccgacatttgcgatttatatgctgtctctcgtgctggagtggctcaaggaaaaaggaggcctcgatgccattgagaaacgcaaccgcgaaaaggccggaattttatacaatgcgatcgacgaaagcggcggattctaccgcggccatgcgagagaagacagccgctcaaacatgaacgtcacctttacgctcaaaaatgatgagctgacagcatcattcatagcaaaggcaaaggaagaaaaaatgtcagggcttggcggacaccgttcggtcggtggctgccgcgcttcgatttacaatgccgtatcagttgaagactgcgaaaagctggctgcctttatgaagaaattccgcgaagaaaactga

SEQ ID NO: 1202 - DNA, 420 bp, Bacillus licheniformis
atgagcgactgtattttctgcaaaatcataaacggggaaatcccttgtgcaaaggtatttgaaaatgaacatgtgctggcttttctcgacatcagccaagtcacaaaaggacacacgcttgtgattccaaaagttcataaaaccaatatttacgaaatgacacctgaagtttcacgagagttttttgaagcggttccgaaaatcgcgcaagccatcaaagacgaatacgagccgatcggcttgaaccttctgaataacaatggcgaaaaagcgggacagtccgtcttccattatcacatgcacattattccccgctacggcaaaggagacggattcggagccgtctggaaaacccatgcggatgactattcaccggaagacttgcagaacattgcagcttccatcaacaaacacctgtaa

SEQ ID NO: 1203 - DNA, 303 bp, Bacillus licheniformis
atgacgaagacgtcaaataaagcaggtgctttctcaattcagtggatgaaagaaatttctaagcttgacatgtttcatactcaggactcttgccggattttgtctttgacaaacacctcattcgccagagttgataagctttcccttcttcaagaattagaatgtcctaaggcgctttcgattattcgttttatttttacggccgaaaagcgggagggaaaacgtttcaaatacattcttgtttttggtactattaagaaaaatgcaggaaaggaacgaacgtatgtcactactgactgttaa

SEQ ID NO: 1204 - DNA, 741 bp, Bacillus licheniformis
atgtcactactgactgttaaagagttaactggagggtatacaagaaacccggtgctgcgcgatgtttcatttgcgattgaacgggagcagatcgtcgggctgatcggtttgaacggagcggggaaaagcacgacgatccggcatatcatcggcttaatggaaccgcacaaaggatcggttgaattgaacggcaaaacgttcatggacgatccggaaagctaccgttcccaatttacgtttattccggaaacgccgattttatatgaagagctgacattgaaggagcatttggagctgactgcgatggcgtacgggctttcgaaggaaacgttcgagaaaaggctgccgccgcttttgaaggaattcagaatggagaagcgtctgaaatggttcccggcccatttttcaaaaggaatgaagcagaaggttatgatcatgtgcgctttccttgtcgaacctgacctgtacattatagacgaaccgtttctcggtcttgatccgctggcgatcaatgcccttctcgagcggatgaatgaagcgaagaaaaacggctcggccgttttgatgtcgacgcatattttggcaacggcagagcgatattgcgactccttcatcattctccataacggcgaagtgcgggcgaaaggaacgcttgaagagctcagagaacagttttcgatggaagaagcgagcctcgatgacctgtatcttgaactgacgaaggaagagagctatgaatag

SEQ ID NO: 1205 - DNA, 1224 bp, Bacillus licheniformis
atgaatagcattctggggatttggaagacaagaattgaggagtatgtcaaagaaacaagatcatatttgaaatacatgctgaatgaccaccttgtcatcgtcatgatttttttcctcgctggagctgcgagctggtacagcaaatggctgaaagagatgcccgaaggttttccagcctattgggtgatggccgtcatcttttcgctcattttgacaggctcgtacgtccgcacgctgattaaagaagctgaccttgtctttttgctgccgcttgaagcaaagatggggccgtattttcagcaggctttccggtttagttttttgacgcagctgtttcctctggccgccgcggccctcgctttggcgccgctgtattttgaagcaagcggcaaggggttttccgcgtacctcgtcttgctgattcaactgctcgtcttaaaaggatggaacacggctatgcaatggcggatgacgtttttcggcgaaaaaaacatgagggttaccgaccggtttgtcagactgcttctcaacacgatcgggatctatttcgctttagagtcttcatacgcatttgccgcagctgtctacctgatcatggccgcactgtatgtgtattttaaggtgatcgataagaaaaaatcgtttaaatgggaactgcatattgaagacgaaatcagaagaaagcagcggttctacagaattgcgaacttattcacggacgttccccaccttagaaaacaggcgaaaagaagagcatatctcgattggatgctccggtttattccgtatgaacagagccggacatttacatatatgtacggaagggcatttatcagatcaaacgactatttcggcatcgtcgtcaggctgaccgtgatttttggcatcatcatcgcttatttttcggcatatgagtgggtatcggccgcgctcatcgtcttcaccgtattcattacaggaattcagctgacgccgctgtttgatcatttttcacacctgccactgcaggagctttatcccgtcaaagcagaagaaaaacggaagagctttttcggcctgcttcacatcgttctgagcgtccaggcgcttgttttgtctgccgctgccggagccatgatgcagtggaccgggatgctcgccggactggccggatccgcgctgcttatatttgtgattttgaagccttatttcagcagcagattgaagaaaagtgccaagagatag

SEQ ID NO: 1206 - DNA, 711 bp, Bacillus licheniformis
atgaatgaaaaccagctatatttggaggaagcgacccgctggaaaatgaagtttctcagaaagccgtcgatggctgagcggatgtcgaaaggggtacagtcgaaaattaacgcccgcattcccgccaaagttcacaaggcgataacagaaagcattaaaaagatggtcgaggctactttgctcggctcaaatttaacgacttttgacaagaaaacaggcacgctttcgctaagggaaaaagatgagctggctcagaagacaatcgctcaatatcaaaaggcggctgctgttgaagggatcggaacaggcgcgggcgggatttttctcggactggcggactttccgctcttgctcggcattaaaatgaaatgcctgtttgaattggcgtcgatttacggatacgatattaaggagaaagaagaacggatgtttcttctgtatatttttcagctcgccttttccggagaagcgcaccgaaaagaaattttccgcatgatcgaacattgggataccgaaaagcgcgaaatcgattggcaggcttttcagcaggagtaccgggactatctcgatcttgtaaagctgcttcagcttgtgcccggcttcggcgcggtcgtaggcggaacggctaactataagctgcttgggcaccttggggaaacagcgaggcacgttttccatctgagattgattcatgagacagccggatattga

SEQ ID NO: 1207 - DNA, 1233 bp, Bacillus licheniformis
ttgagcgcatccgcattcatccgacaaatcaatgagcagcttgatgcacactacgatgaaatggtcaaattgaggcgccattttcatcagcacccggagctttcttttcaagaaaagaaaacagccgcatttatcgcctcttactatgaagcgctcggtattcctatccgcaccaacgtaggcggaggcggagttctcgcctacatcgaaggcggatctcccggccccgtcattgcgcttcgagccgattttgacgcgctgcccattcatgatgaaaaagacgcgccttaccgatcgactgtgccgggagtcatgcatgcctgcggacacgacgggcacacggcaaccctgcttgtcctcgctaaagttttgaatgagcacgcggaccgtttaaaaggaaagatcgtcttcattcatcagcatgccgaggagtattcgccgggcggagccaggccgatgattgaagacggctgccttgacggtgttgacgtgattttcggaacccatttgtgggctacggagccgacgggaaccgttcaatatcgaacaggaccgatcatggccgctgcggaccgttttacgattacgattaaaggtaaaggcgggcatggcgcacagcctcataaaacaaaagacgccgtgttgatcggatcgcagatcgtcgcttcactccagcagattgtcagccgcaggctcgatccgactcagccggcagtcgtttcgataggttcatttgttgccgaaaactcctttaatgtaatcgctgataaagccgttttaatcgggacggcgcgttccttcaatgaagaaatccgcaccttgattgaaaacgaaattgaacaggttgcaaaaggtatatgcggcatgcatggcgctgactgcgactattccttcgaaaggggctatccgcctgtctgcaaccacccggaagaaacgtcttttctcgcaaaaatcgccaaacagacggaaggcgttgaaaaagttgaagaaagcggcatgcaaatgggcggggaagatttcgcttactacttgcagcacgtcaaagggacatttttcttcacaggcgcccgtcctgaagatccggaggcggtgtttccccatcaccatccgaagtttgatatcgatgaaaaagcgatgctgatcgcagccaaagtgctggcaaatgccgcggtctcctatcaggagaaagagcaggcggtccgcgaaacgcctgcaatggaacaaccgaaatag

SEQ ID NO: 1208 - DNA, 123 bp, Bacillus licheniformis
atgcgctcaaaaaaattcctccttttaggaatggtaagtttttataattttatgacaattggagccgctgttcaaccttgctgtcccgtatttatagaagaaaaatggcggcaatcgttgtga

SEQ ID NO: 1209 - DNA, 1374 bp, Bacillus licheniformis
atggaaattgaattaacgtccgttcactttatatatttgggctttatcgctgcaattctcgcatttatgcttcttcgtcttgataccacctttatatcgcttgccggggtttttttcatttcattagcggcgacccattctgccattgcctctgtgatgggcctgttcaacagcttaatctacgccgccggagaacttctcccgaccattttcatcatctgctttaccgtttcgatgagcgaactgctggcaaagaccggcgttaatgaagcaatggtcactccgatcgccaaatggatgaaaggtcctgccttggcctactggatcaccggagctttaatgtttatcatttcttcatttttttggccctccccggctgtcgcattggtcggcgccgtcctcctgcccgccgcgctgaaagccggcctctccccgatggcggtagcgtgcgccatgaatttattcggccacggtttcgctttatcaggcgattacatcatccaggcagcgcctaaattgaccggagatgcagccgggctgcccgttgcggaagtgatgtctgcaagcgttccgctcgtcttgatcatgggcttttcgacaacgggggcagcctttttgatgctccggaaagagaaaggcaatagagcagcggccagtaagcagctgcaaagcgagcctgagtggcttcttccccagacctccagaaaatggctcgcgctgttgattccggtcatttttttaggggatatcgccgcgatgctgatattggaactgcagggggacgaagcgacggcgcttgtcggaggaacggcagtcttcgtcatgattctcattcattttatcgtccacaaacaccggcgtcttgagaaaatcaccggctatttcattagcggatttcagtttggctttaaagtgtttgcccccgtcattccaatcgccgcctttttttacttgggcgatgcgggttttgaaaaagtactgacagcagagattcccggtttttctaataggatcgtgcaggacctcggctcggcctttgcccacagcgttccgctctctccggaaatcgccgctgttgcgctcactgtcacaggagcggtgaccggtcttgacggatccggattttcggggatttctctcgcaggatcagccgcttcgatgtttgctgcggcggttgacagcaatccagccgttctgactgcgctcggccaaatctcagccatttgggtcggcggcggtacgcttgtgccatgggcgctcattccagttgcagcgatttgcaaagttgacccgttcgatcttgccagaaaaaactttattcctgtagctgccggattaaccgtcacaacgattgccgccatttttcttctataa

SEQ ID NO: 1210 - DNA, 504 bp, Bacillus licheniformis
ttgaatttttacattacatacggaactgtcgattttttaaaaaagctcgccaaacagcacggtcttgaaaacatgttatttatgaaaagccacgattccgccattctctttcacgaaaccgacggagaaagcgtctttcattctcctcaccgctacgaaatcatcgatcagtcgggatctttggaacattccggattcgccgtcctcaacaacatccctgtcacaccggaaggaaggccgcttttcgaagcccgttttaaaaacagagccggaaaaatcgaaaatcagcccggctttaaagccctcagggtgctgaggccgaaagacagcgatacgtatatcgtattgacactgtgggacacagaacagtcatttcaagactggaaaaactccaagtcgttcagcgaagcccaccaaaagaaggaatcttccgcaggaatcaaccaaggcggaacgattttttcccgcccatcctatatttcttcgtatcattctgtcgaataa

SEQ ID NO: 1211 - DNA, 2139 bp, Bacillus licheniformis
atgagaaagagatttttcattccaatcatcattacagcggcgatattccttttatcgttaatcggatatattacgattttgtttctgggggattatgtgattgatgaaaagaaactgattttccatgcttcttctaaaatcgtcgaccaaaatggagaagaagtcacaagcctctatactgaaaacagaagacctatttcaattgccgaggtgccggacggcgtaaaaaatgcctttatcgcggttgaagacaagcgcttttatgagcaccacggcatcgattttaaatccgtgagccgtgcggtctataaagatatattagcaggaggaaaagtggaagggggaagcacgatcacccagcagctcgcaaaaaacacttttttgacaaatgacaaaacgtttttaagaaaaacgaaagaagtcattatcgctatcaatttggagcgggattacagcaaagacaagcttttggaaatgtatttgaaccagctatatttcgggcacggcgtctatggaatccaggcggcggcaaactacttttttagcaaagatgtgaaagacttgacggtcagtgagggagcggtgctggcttccattcctaaagcgccttcaacgtattcgcccattctcaatccggaaaaaagccgggagcggcgcaatgtcattctcggcatgatgaacgagcagggatatatcagctcaaaggaaaccgtcagggcccaaggcagcacattggggctccatgtgaaagaaaaatcaaaaaatccgtggcttgacagctatattgatcttgtcatgaaagaagcggaagacaaatattcgatttcaagtgaacagcttcttcaaggcggatacacgatcagtgttccgctcgacgtttcgatacaaaaagcggcttacacgctgatgaagcaggacggctattttcccggaacagacaataaagctgaagggagcgccgtttttatcgataaccggacaggcggcgtagtggccgctctcggaggtcgggaatacgctccgaaaggctacaacagggcaacagccccgcgtcagccgggttcgacttttaaaccgcttgccgtttacggccccgctcttgaagaaaagcggtttaagccgtactccatgcttgaagataaacagctgtcatacggcggctactcgccgaaaaactatgacggccagtacgagggcaaggtctctatggtggatgcgctgacctacagcaaaaacgcgcctgccgtatggacgctaaatgagatcggaatcgaaacggtgaagccttatctcagccgcttgggcatgaacgtgccggatgagggcctggcattggggctgggcggcttagagaaaggagtgtcgccgcttgagattgccggggcataccggacctttgcaaattcaggacaatacaccgagccgttctttattaaaaaaatcacggacgaaaacggggatgtcatattccgccgcgaggaaaaatcagaaaaggtattcagcaaacaaaccgcttggaacatgacgcgaatgctagaggaggtcgtgaaaagcggaacgggaaaagccggtgatttttccggagagattgcaggaaaaacgggctcgaccacgtataccggaaaagagggcggaacaaaagatgcctggtttgcggggtatacgcccgaagtgacgggagctgtctggatgggctacgataaaacggatgaatcccattatttaaaaggcggcagcgcttatccgacaaggctgtttaaagacattttaaaacgctccaaccataagcctgaacgatttaaggcgcctgaaggtgtaaaagatctggacaggccgatccgcctcgaagatttggaaagtgttaaagcagactattcctttacgccgatggggctgattacggtgtcattaaaatggcatgaacaagaggataaaagggttgaataccgaatatatgaaaggaaaaacggaaaagaaacgctcattgatacggttaaggggaaaggaagctattcaatcccttatgcaaacatcttttccaatgcttcctataaaattgttccgtacaatccgcagacgaaaacagaggggaaagggactgattatatcgaaccgaaagtgtttccttcgggtcattag

SEQ ID NO: 1212 - DNA, 1062 bp, Bacillus licheniformis
atgaaaaacgacaaggcttttaatgacacattcttaaaagcgtgccgaggagaaaaagccgcccatgtaccggtatggtacatgaggcaggctggaagatcacagcctgagtacagagcgctcaaggaaaaatacggactgttcgaaattacgcatcagcccgaactgtgcgcttacgtgacaaggctccccgtcgaacagtacggtgtcgatgcggcaatactttataaagacataatgacaccgcttccaggtattggcgttgacgtcgaaattaaaaacggcatcggtcctgtcatcgatcagccgatcacatctctcacagatgttgaaaaactcggcgaactcgagccggaggagcatataccatatgtgctggagacgatcaggctcttgacagaagaacagctgaacgttccgctgatcggttttactggggcgccgtttacactggccagctatatgatcgaaggcggcccgtccaaaaactacaataaaacaaaagcgtttatgtacagccagcctgctgcatgggacctcttgatgaaaaagctcgggaagatggcggctgtatacgtcaaagcccaaatccgcgccggcgccaaagccattcaagtgttcgattcctgggtcggcgcgctgaatatcggtgattactgccgctatatcaagccgacgatggacattcttttcaaagagctgaaaaaagaaggcgtgccgctgattatgttcggggtcggcgcaagccacctcgcgactgaatggcacgatcttgaccttgacgtcgtcgggttggactggcggatgagcgtgcaggaagccagggataaagggctgacaaaaacgcttcaggggaatttggatccttcgatcctcctcgccccgtgggaagtcattgaagagaggacgaaagccattctcgatcagggcatgcagacggaccggtttattttcaacctcggtcacgggatttttcccgaagtgagtcctgacacactgaaaaaattgacggcatttgttcatgagtattccgcctcaaaaaaatcgagcctgatgacatga

SEQ ID NO: 1213 - DNA, 939 bp, Bacillus licheniformis
ttgggtaaaaagaaaatggggcttcttgttatggcgtatgggacgccttacaaagaggaagacattgaacgttattatacacacatcagaagaggcaggaagcctgagcctgacatgcttcaggacttaaaagaccgctataaggcgatcggcggaatttctccgcttgcaaagatcacgcaagagcagacgaagcagctggaaaaacgcttaaacgagcttcaggatgatgtggtattcaagtcatatatcggtctcaaacatatcgaacctttcatcgaggatgccgttcaggagatgcataaagacgggattacagaagccgtcagcatcgtgcttgcgccccatttctccaccttcagcgtacagtcgtacaacaagcgggcgaaagacgaggctgaaaagctcggcggattgtcgatcacatcgatcaacagctggtatgatgagccgaaattcatcgcatattgggcggatcaagtgagaaaaatctatgacgaaatgccttcggaagaaagggaaaacgccgtcttgattgtatcggcgcacagccttcccgaaaagatcgtcgaaatgggtgacccatatcctgaacagcttaaagaatcagcgaagctgattgccgaagcggcgggtgtaaaagattacgccgtcggctggcaaagcgaaggaaacacccctgatccgtggcttgggccggatgttcaggatttgacccgtgacttgtcagagcaaaaagggtacagcgcttttgtttatgctcccgtcggcttcgtagctgaccatttggaagttctttatgacaacgattatgaatgcaaagtcgtcacagacgatatcggagcaagctattacagacctgaaatgcctaacgcaaaacatgagtttatcgatgctttagcagatgttgtattaaaacaattggagaaagaacagtaa

SEQ ID NO: 1214 - DNA, 1413 bp, Bacillus licheniformis
atgagtggagaacgcaggcagattgtcatcatcggcggcggtattaccggattggccgccgccttctacttggagaaggaaatcaaaaagaacgatctcccggccgaagtcacgcttgttgaagcaagcccgagactgggcggaaagatacagacggtacacaaagacggctatgtgattgaacgggggccggattcatttttggaacggaagcaaagcgcacctcagctcgtgaaggatctcgggctggagcacttgctcgtgaacaacgcgacaggccagtcttatgttcttgtcagcgaaacgctctatccgattccggaaggagctgtgatgggggtgccgacaaaaatcggaccttttctgacaaccggcttgttttccttgccggggaagttgagagccggaatggatttgctgcttccagcgagcaagccgcaggaagaccagtcgctcggagaatttttcagaaggcgcgtcggcggtgaagtggtggagaacctgatcgaaccgcttttgtcaggcatttatgccggggacattgaccgcctcagtctgatgtcaactttcccgcaattctaccagacagaacagaagtacagaagcttgatcatcgggatgaaaaaatcgcgcggcgcccagagcgccaaaaagcctgcgaacaaaaagaaaggccagttccagacggtgaaaaccggcctgcagacgattgttgaagaactggaaaagcagctcgatatcacaaaggtttataaaggcacaaaggtcgtcagcattgagcgcgcgggctcgggctacagcatgaagcttgacaacggcaaggtgcttcacgctgattcggccgtggtcaccgctccccataaagcagctgccgcgatgtttccaaaagcggattggctgaagggtttagaagatatggtgtcaacatctgtcgccaatgtggcgctcggatttccggaagaagccgtccaaatggagcatcaaggaacaggctttgtcatttcaaggaacagcgacttttcgattacggcgtgtacttggacaaacaaaaaatggccgagcacaacgcctgaaggaaaagttctgctaagggcttatgtagggaaagccggcgatgagtccgttgtcgaacagtcagataacgaaatggtgaaaatcgtcctcgacgatttaaggcggattatgaagatcgacggcgagccggaaatgacctgcatcacaagatggcatgaagcgatgccgcaataccatgtcggccataagaaaagaatgaaagagatcagggaagggttacaggcgtcatatccgggcgttttcatgacgggggcctcatttgaaggggtcggcatccctgattgcatcgaccaaggcaagcaggccgtcgccgatgtactctcacaccttttcgaataa

SEQ ID NO: 1215 - DNA, 126 bp, Bacillus licheniformis
atgtactctcacaccttttcgaataaagaagagcaaataaagctgtccgaatccattcggcggctttttttatttcactctttttacagctttcatcattttaaagtttgtttatggaaaagataa

SEQ ID NO: 1216 - DNA, 573 bp, Bacillus licheniformis
gtgagcaaagatcgaaaagcactgattttagaagcggcgacaaaatcgtttacacaattcggctacaaagcgacgacgatggatctggtggcgaagcttgccaatgtcggcaaaggtacgatttatacttttttcaagaataaagaggaactgttcgacgacattttttcttcgcttctgattgaaatgaagcaaacggctgatcaagcgattgatcctgatctgccttttcacgaaaatgcccatcgcgcgatgatggcgatattggaatacagaaagaagcaccagctgaccattaagatctttcaggaaggtgcggagctcggcacaccggcggcccgcgaggtgattgaaaagctggaacgcatggtcatcggctatattaagagaaaaattaaagaagcaattaaaaatgacgatattagaccgtgtgacccagagctgaacgcgtttgtcatcttcaagctttacatcgcgctcatctttgactgggaaaaaaaccatgaaccgctgaaagatgaagagttggcagagatgctgaaaatgtatattttaaaaggattatctcgttag

SEQ ID NO: 1217 - DNA, 2163 bp, Bacillus licheniformis
atgaatgttttcaaaaaccagtggagagaactgataaccaataaaaaactactgatatccgtgatcggggttctctttataccgctgatttacagcagcatatttttggcggcttactgggacccatacggaaacgtcgatcagctccctgtggcggttgtgaattccgacaaggggacgacatatgaaggaaaagaccttcatatcggcgacgaccttgtcaaagaactgaaagaaaacgataaattcgactggcattttacgacgaaggaaaaagcaatgagaggcttgcaaaatgaggaatactacatggttgtagaaatccctgaaaacttttcgaaggatgccagcacggttatggataaacatccgaaaaagctgaatctgatttatcatacaaacgccggacgaaactatgtcggcgcccagatcagcgataaagcgattgaacagcttcagcattcagtcggctctgaaatcacggagcaatatgctgaagtcatctttgacaatttcggcaaaattgcaaaaggtctcggtgaagcaagcgaaggagccggaaagctggataaaggactgaaagatgcgaaagaaggaagcgaaaagctgaaaaagaaccttgaaaagctcgcgaaaagccaaattcagttcaacaaagacggaatggagaagttcggcgcggcattcaatacgctgaacgacaaaattcatgagcttgattccgggcttgcacaatttttggaaaaaagcggccagctgcacagcggtgctcaacagctccaacaaggcatgcctcagattgtggcgggattggagcagatgaatgaaaaagcgcagaagataagcaaactcgaagaagcgatttcaaatgaaaaaattcagcagctcgaaacggcgctttcaaatgccgaaaaagcgaaaaaagaaatcagccagatttcgaaaaatattgatgagcttgaagcggcattgaaaaaccagcacagcgaagtcaaacaaattattgaatccagcaacatgctgacacaagaacagaaagccgcgcttatgaaacaagtcgatgaaaaaatgggaacggtgaaactccctgagtttgacaagttgaaagcgcaaattcccgatgtcagcgaacttcccgatttatccgggctgaaacagaagcttgaggaattgaagcgagtcccttcggatgtgaataaactttataaaggatcgcagaagattcagcaagggcttgatgcgctgacaaacggtttgggtgcttacaacgaaaaattcgcagaagcgaaaagcggatcatccaaaatcgccgaaggcagccagacgttagtcggaaagttcggcgatctgcaaagcgcggccgataaactgaaagacggttcttccaaacttgcagaaggggctaaatcccttgatgaaggtcttggcaagctgtctgacggaagcggggagctgtttgataagctgtctgacgctgccgatcaaaccggcgatattcaagcgggagacgaaaactacaatatgttctcagaccccgttgatgtgaaaggcgataaaatcgatccggtttccaactacggaacaggattaaccccgtatatcttgtcgctcggcttattcgtcggcgcattgatgattaccgttgtcttcgatgtgaaagagccggctgtccggcccgaatcagcctttggctggtttatgagcaaattcagcgtgctttttgcagtgggaattcttcaagcggcgattgcctgcacgatcattctctggggcatcgggcttgaagtgcaaagcgtctggagattctatctgttcagtataatcatgagcattacatgtcttgcgatcattcagtttttggctgcgacaatgggaaatccgggacgattcattgccgtcattctgctcgtgcttcagcttggaggaagcggaggaacatttcctcttgcacttgtccctaagttcttccaggtcatccattctgcactgccgatgacctacagcattgccggatacagagcggtgatttcaagcggagactacgcgtatatgtgggaacaggctgccgtgctcggcggtgttgcgatcgtcatgatggctctgacgctgacttattttaaagtgctgctgaaaaaaggaaaaattgaagagcagcatgcataa

SEQ ID NO: 1218 - DNA, 996 bp, Bacillus licheniformis
atgaaaactttatcaaaagcgcgaatttccgccatcggcacctatgttccagaaaagcgcatgacaaacaaagactttgaaaagatcgtcgatacttctgatgaatggatcgttcagcggacaggaatgaaagaaaggcgaatcgccggaagtcacgaattcacatcagatctttgcataaaggctgttgaaaatctacaaagcagatacaacggcacgcttgacgatattgacatgatcatcgtctctaccacaacggcggactacgcttttccaagcacggcatgccaggttcaggagcacttcggatggaacgaagtcggcgcggtggatgtaaatgcgacttgcgcgggattaacatacggattgcatatcgccaacggcctgatcacttccggactgcatagaaaaattcttgtgatcagcggtgaaaccttatcaaaaacaaccgactacacagaccgcgcgtcttgcattttgttcggcgacggcgcgggcgtcctgcttgtcgaacgggacgacaaagccccaagcttcattacttttgcccaggatacgaaaggtgacggagcccgccatttatacagaaccggcttgcgaagcgaccttaaaggggagccgctctcaggcgaaggaaaaatggttcaaaacggccgcgaagtgtataagtgggcggtcaggtccattcccgaaggcgtcaaaaagctgcttacccaagctgaaatggagctgaaagatatcgattggttcgtcccgcacagcgcgaatttgcgaatggtcgaatcaatttgcgaaaaaaccggaattccactcgaaaaagcgttgacgagcgtcgaatggtttggcaacacttcatccgtatcaatcgttctcgcccttgatgaagccgtcaaaaacggaaagttgaaagagggcgataccttgattctgttcggtttcggcggggggcttacatatacgggactgattgtaaaatggggcgcgccagcttcctaa

SEQ ID NO: 1219 - DNA, 1038 bp, Bacillus licheniformis
atggcaggacagaaaacgctggagctcatcaaggagctcgtctcgatcccgagccctaccggaaatacgtatgacatcatagactatatcaatcgcctattacaggaagaaggagtcgaaacaaagtttaaccgtaagggggggctgatcgcgacgataccgggctctgacaaatcccggcacaggatgctgaccgctcatgtcgataccctcggagctatggtgaaagagattaaaccgaacggaaggctgaaaattgatttaatcgggggcttcaattacaactcgattgaaggcgagtattgcaacattgaaacagcatctgggaaaacttacaccggcacgatcttaatgcatcagacatcagtgcatgtatacaaagacgccggaaaagccgagcggaaccagaaaaatatggaggtccgcattgacgaaccggtcaatagtgaagaagaaacccgggcgctcggcatcaatgtcggcgattttatctccttcgatccgcgcgttgaaatcacgccgagcgggtttatcaaatcgcgtcatctcgacgataaagcaagcgtcgccctcctcatcgagctgatcagaaccatcaacacagaagggatgacactgccttatacgacgcactttttaatttccaacaatgaagaaatcggttatggcggcaactccaacatcccgcctgaaacggtggaatatttggctgttgatatgggagcgatcggcgatggacagtcaacagatgaatatacggtatccatttgtgtaaaggatgccagcggcccatatcactacgggcttcgaaagcgcctgacagccctttgtgaagcacatggaatcgattataagcttgatatttacccatactacggttcagatgcttcagcggccgtcaaagcgggccatgatatcgtccacgggctgatcggcccgggaattgacgcatcccatgcgtttgaaaggacgcatcaatcgtccttggagcagacggcaaagctgctgtatcactatgttcagtctgacatggcataa

SEQ ID NO: 1220 - DNA, 198 bp, Bacillus licheniformis
atgtatttttaccatgaccattgcaagaaagattacgactatgactaccacaagaaagaccacgactgcaagaaatactactactactattattactactattatccatgctataagaagtatgattatgactatgactacaagaagtatgaccactatgatcactgcaaaaagaaaaaacactatgattactggtaa

SEQ ID NO: 1221 - DNA, 1287 bp, Bacillus licheniformis
atgaaaagacttaaattcggattagccacacaaattttcctggggctgattttaggtgttgcagcaggagcgatttggttcggaaaccctgcagtcgcaacgtatctgcagcccgtcggtgatttgttcttaagattaatcaaaatgattgtgattcctattgtcgtttcaagcttgattgtcggggttgcaggggccggcagcggcaaaaaggtcggcaggctcggttttcggacgattctgtactttgaaatcattacgacttttgcgatcgggctcggacttctccttggaaacatcgttcaacctggacacggcgtaaacttttctggtgctgaaaaacaggatatcagccaatatgtagaaacagaaaaagaggcaagcaccaaatctgtcgcagacacgttcctgcacattgtgccgacaaactttttccaatcgctcgctgaaggcgatctgcttgcgatcatttgcttcactgttctgttcgcactcggagtgtcagccataggcgaaaaaggcaagcctgtgctctccttttttgaggcaacgtctcaagccatgttccacgtcgtgaacatcgtcatgaaattcgcgccgttcggcgtttttgctttaattggtgtaacggtttcaaaatttggtttttcttcgcttttatcattaggaaagctcgttttgcttgtctatcttgctcttgctttcttcctgattgtcatttttgggatcgtcggcaagctgtgcggtatcaatatatttaaatttttggcctatatgaaagatgagcttcttcttgcatacagtacatcaagctctgaaactgtgcttccgcgcgtcatggaaaaaatggagaaaatcggatgtccgaaaggcattgtgtcgtttgtcattccgatcggctacacatttaaccttgacggctctgtcctgtatcaggcgatcgcggcgctgtttctggcgcaggtctacggcatcgatctgtccattggacagcagctcacgctcatccttgttctgatggtcacttctaaaggaatggctgccgttcccggcacatcattcgtcgttcttcttgcaaccctgggcacgatcggcgttcctgctgaagggctggccttcattgccggagtcgaccggattatggacatggcgagaacggtcgtcaacttgaccggaaacgctctcgccgctgtggtcatgtcaaaatgggaaggtgaatatgacgccgttaaagggcagaacgtcttaaatcaacgggagccggcagatatagaagtatccggctga

SEQ ID NO: 1222 - DNA, 135 bp, Bacillus licheniformis
atgctcgctaaaatcaccgagttcttcagaaatttgccttccaaaaaatgttcagtgtgcggccacgatattgatgagcagcacgaatgctacggaaacacctgctctaaatgcttaaatgtaaaagatatatag

SEQ ID NO: 1223 - DNA, 735 bp, Bacillus licheniformis
atgaaggtgacagtcatcggctgctgcggaggatttccggctgcaaatgaagcgacttcaggctatctctttcaatcggggtattattctgttttaatcgactgcggcagtgccgttttatccaagcttcagctgtttctgcccgttgaggagcttgatgccgttatattatcccattatcatcacgaccatattgcggatgtcggccctttgcaatttgccaaactggtcggttcattcctcggcaagggggcgaatgcccttccgatatatggacatccttttgatgaagagcagttttcaaagcttacatataaaacgcataccgctggattagcgtatgatccgacacagcctttggctatcggaccgtttacgttcacgtttttaaaaacggttcaccctgttgactgctttgccatgagggtgacggacggtgttcattctgtcgtttatacggccgactcgagctttcagaaagcctttatcccgttcagcgaaggagccgatctcttgatctctgagtgcaatttttatgcgggtcaggatgggggaagcgccggtcatatgaacagcctcgaagcggggcgcattgctgcggaagcgggtgcggggcagcttctcttgacacacctcccgcatttcggggaacatcaaaaactagcagaagaggcccaaaccgtttataaaggcgcggttgatctggcgcacaccggttatgtgtggggagaatag

SEQ ID NO: 1224 - DNA, 990 bp, Bacillus licheniformis
atgctgtttatcgataatcaaaatattacagatccgaggatcaacttggcgattgaggagtactgcttaaagcaccttgatcctgaagagacgtatctgctgttttatatcaaccagccgtcgatcatcatcggcaaaaatcaaaatacgatcgaggaaatcaacacaaaatatgtagatgaaaacgggatcattgtcgtccgcaggctgtcaggcggcggagctgtctaccatgacctcgggaacttgaacttcagttttattacgaaggacgacggcaacagcttccacaactttaagaagtttacggagcccgttgtggctgctttaaaacggcttggcgtcgatgcggagctgagcgggcgaaacgatttgatggcaaacggccggaaaatttcgggaaacgcccagttttcaacgaaagggagaatgttcagccacggcacgctgttgttcgattctgagattgaacatgtcgtatcggctttaaaagtgaaaaaagataaaatcgaatcaaaaggcatcaaatcgatcaggagccgtgtagccaatatcagcgagtttctcgatcagaagatgacaacagtggaattccgaagcatgcttctccgctatatttttgataccgaaggggaaataccggagtataagctgactgaaaaagactggaaaatcatcaatcaaatttcaaaggaacgctatcaaaactgggattggaactatgggaagtctccgaaattcaatcttcagcattcaaaacgttttcaagcgggatcggtcgacatccgcctggaagtgcaaaaaggcgtgatccgcgagtgcaaagtattcggtgactttttcggagtcggcgatgtcagcgacatcgaagaaaagctgacaggcgtacagtatgaaagaaaagcaattgaagaagcccttcaaggcgtggacatcaagcattacttcggcaatattcaaaaagaagaatttttggatcttgtctactaa

SEQ ID NO: 1225 - DNA, 1542 bp, Bacillus licheniformis
atgaatttagtttcaaaattaggggaaacagctcaatcaaagcctgacagaaccgcttatatttttggagagcaaacggaaacatacgggggattgcagcagaaaattgattgctttgccgaagggctgcgcgaaatcggggtggaaaagggagatcatgtcgctttgctactcggcaatacaccgcattttgtgattgcgttttacggcgcgctgaaggccggggctgtcgtcataccgatcaatccggcctatacgccgactgagatcggctatatgctgacaaatggcgatgcaaaagtgatcgtggctctgggacagctgcttccgctttacgaaaaggtgcatgaatcccttccgaaagtcggctgcgtcgtgctttgcgaaactggagagccgcttcaggaaccggaaaacacagaggttaagatgaaattgaaatcgtttacaagcattatgaaacctcctgtccggccgtttcctgaaatcgatgacgaagatacggccgccatcctctatacgtcaggcaccacgggaagaccaaaaggggcgatgctcacacatcaaaatctattttcgaatgcaaatgatacagcccgctatctgacaatgaatgaatctgaccttgtcgtcgccgccctgccgatgttccacgttttttgtttaacggtctgcatgaatgcaccgctcatgaacggcgcagcgattttgatcgtgccgaaattcagtcccgccgaggttttcaagctgattaaaaagcatcaggcgacgatcttctcaggcgttccgacaatgtacaattacctgtaccagtatgaaggagcggatgaaacaggctttcggtccatcaggctttgcatctcaggcggagcggccatgcctgtcgctctcctgaaaagctttgaagaaaggttcggcgtcctcgttttagaaggctacggcttgtcggaggcttctcctgttacatgctttaacccgttcagcaccggccgcaagccaggatcgatcggcacgaacattctcaatgtgaaaaacaaagtcgtcaatgaactcggggaagagctgcctgccggccaagtcggcgagctgatcgttaaagggcctaatgtcatgaaagggtactacaaaatgccggatgagacggcccatacgataaaagacggatggctgtatacaggtgatttggcaaaacgggatgaagacggttatttttatatcgtcgacagaaaaaaagatatgattatcgtcggcggctataatgtctatccgagggaaatcgaagaggtgctctacctccatccaaaaatcgcagaagcggttgtgatcggagtgcccgatccgaatacgggagaagccgttcattgctatgtcgttccgaaggataaaacgctgacagaggaggatgtcttgtcgcactgcaaaaagcatcttgccaaatacaagcgcccgtcggcgatcgttttcatggatgaaattccgaaaaactcgaccggcaaaattttaaggcgcgctttaaaagacattctgacaaacaaatcttga

SEQ ID NO: 1226 - DNA, 252 bp, Bacillus licheniformis
atgaagaaaaagacagcgcatcacctgccttctccggcgtatcacggatacatcagcatgaccggcacacatcgcgttcacttcaccgtctggctgaagaaagatgaagccgtcatcctgaaagaagaggaaggcacatatttcgttctccgacaaagggaaaaagacgccctcctaggagaattgcaaaaaagggacgcggcaggcgtcccttttagcgggtcaagatttgtttgtcagaatgtcttttaa

SEQ ID NO: 1227 - DNA, 552 bp, Bacillus licheniformis
atgaattcgattgaaaaacaagtcgcagaaaacataaagaggctgcgaaaagtccgcaattacagtcttgatcaattgtcatcgatgactggcgtcagcaaaggcatgctcgcgcaaattgaaaaaggctcttcaagtccgacgatcacaactttgtggaagatcgcaaacgggctgcaagtatcatttacttccttggcagaaaagcctgccggggagccgacggtcgtcagaaagcacgagaaaacgcccgttatggccggagaagaaaaatacgcggcatttccgcattttccgttcgaccagaaaaagaagtttgaaatcttttatattgaacttgcgcccggctgtgtacacgaatcagagcctcaccacggagggattgaagagtatgtgctcgtctctagaggagcgatcgcggtgacggcgtgtgattacacctgcagcctgaacgaaggcgatgcgatgcatttcaccgcaaacaccgtgcatacgtacgaaaacaacacggaacaaacggcatcatgctatacactcatttattatccgtaa

SEQ ID NO: 1228 - DNA, 717 bp, Bacillus licheniformis
atggaaaagcacgattcactcaactttctagacgggcttcgttcaggggtttcccttgccgtcggctacattccggtcgctttgacattcgggcttttggcgaaaacaacggggctgtcgctttttgaaacgtttttgatgagcgcccttgttttcggaggagcgtcccagtatatgtctttaagcatgctcgccgttcagacgggaatcatcgaaatcgttatgacgacgttcattgtgaatatcagacattttttattttcggcgactttgaatcaattggtagaaaaagattcgccttggaaaaaagcgttttactcatttttcgcggtgacagatgaatcgtttgccgtcgctgctctaagaaaggaaaagctaacgaccgggtatatgatcggcctcggttcgatcggatatgtaagctgggttttttggagtgcggccgggcattttgcaggggccgccatgccggccgttctccaggaaagcatgagcatcgccctttatgccatgtttatcggattgttggtgccgcctttgaaaaaacagcgaaaagtcctgctgctggcgggggcggctgcgctattcaatacggttttccaaatgaacggaatattgtcggcaggatggtcgatcgtctgcgctacgcttttatccgccgtcctgattgaatggctgtaccaatttagaacagaggggaagagaaactatgtttag

SEQ ID NO: 1229 - DNA, 312 bp, Bacillus licheniformis
atgtttagcccgatcatctggatgattatcggcatggctgccgttacatatgtgccgcggatggtgccgctcattgcttttgaaagcctgaagcttcccggatttttggagcgcgtgctgaaaaatgtgccgtacgccgtcttaggggctctcatttttccgggagtttttttggtgcaaagcggtatgctctacggacttgccggcgctcttatcgcatttttattttcctattttggagcaagcgtcatagtcgtcgtgatggggacgattttgacgctcgcaggcgccggcctcttgctctcattgtaa

SEQ ID NO: 1230 - DNA, 1257 bp, Bacillus licheniformis
atgcggaaatggatcgcgggagccggtctcctgtatgtgctgtacggcctttttttctattggtatctctttatggctggtgaaccctccgttcctgaggcgctgaaagggacaagcgcagacccggcggcatttatgaacgaaagagaactcatgctgacggaagagtactcgaaaataaaggactttctgttttttatccggattccgtttgaatggtttttattttttatattgttgattgccggtttatccaggaaaatgaaaaattgggcggagcagacctcgaagaggagaagcattcaaatcacggcatatgtttttgctttgtttctgatcgtcacgatcgtttctttgccgcttgactggatcagctatcaatattcgcttgactacggcatatcaacccagacaaccgcgagctggatcaaagaccaggtgatcgacttctggatcagttttccgataacggctgcggcggtgatcgtcttttactatttgatcaaaaagcatgaaaaacgctggtggttttatgcctggtgcctgacggttccggttacgctgtttttattttttctccagccggttgtcattgatcctttatacaatgacttttatccgctgaaaaataaagagcttgaacaaagcattctgaagctggccgatcaggcggatattcctgcgaatcacgtctatgaagtgaacatgtctgaaaaaacgaatgcgttaaatgcctatgtaacaggaatcggcgccaataaaaggattgtgctctgggataccacgctgaacaagctggatgagccggaaattttattcatcatggcgcacgaaatggggcactatgtgatgaagcatgtttacataggacttggcgggtatctgcttttatcccttgctgtcttttatgtgatcgacaagctgtacaagcggatcatcggccgctatggaagaagccttcatattgcaggaaaatccgatctagccgcacttccgcttcttctgatgctgatgggggtcatctctttcgcgtcgtctccatttacgaacgcagtttcgaggcatcaggaaaaagctgctgaccagtatgcgattgaactgacgcaaaacagcgatgcagcggtttcgacgtttcaagagctctcaaaagccgggctgagcgaggcaaacccgccgtttctcgtcaagatttttaaatacggccatccgacgatcatggaacggattcaaaatattgaacaaccttcatcagaatga

SEQ ID NO: 1231 - DNA, 1002 bp, Bacillus licheniformis
atgaggaaaaagagtttttggcttgggatgctgacggccttcatgctcgtgttcacgatggcattcagcgattccgcttctgctgctcaaccggcgaaaaatgttgaaaaggattatattgtcggatttaagtcaggagtgaaaaccgcatctgtcaaaaaggacatcatcaaagagagcggcggaaaagtggacaagcagtttagaatcatcaacgcggcaaaagcgaagctagacaaagaagcgcttaaggaagtcaaaaatgatccggatgtcgcttatgtggaagaggatcatgtggcccatgccttggcgcaaaccgttccttacggcattcctctcattaaagcggacaaagtgcaggctcaaggctttaagggagcgaatgtaaaagtagccgtcctggatacaggaatccaagcttctcatccggacttgaacgtagtcggcggagcaagctttgtggctggcgaagcttataacaccgacggcaacggacacggcacacatgttgccggtacagtagctgcgcttgacaatacaacgggtgtattaggcgttgcgccaagcgtatccttgtacgcggttaaagtcaatgcatatgcaagaggggttgtcgttgtagctgcagcagggaacagcggatcttcaggaaacacgaatacaattggctatcctgcgaaatacgattctgtcatcgctgttggtgcggtagactctaacagcaacagagcttcattttccagcgtcggagcagagcttgaagtcatggctcctggcgcaggcgtatacagcacttacccaacgaacacttatgcaacattgaacggaacgtcaatggcttctcctcatgtagcgggagcagcagctttgatcttgtcaaaacatccgaacctttcagcttcacaagtccgcaaccgtctctccagcacggcgacttatttgggaagctccttctactatgggaaaggtctgatcaatgtcgaagctgccgctcaataa

SEQ ID NO: 1232 - DNA, 930 bp, Bacillus licheniformis
atgaaatcagctcatgtgaaaggcgtattgatggtgcttgcaggggcttcattgtggggattatcgggaagcgctgcacagtacatatttgaaaggggagcggttgaagccggctcgcttgtctctgtcaggcttctggcatcgggagtcattctcttgttatatgtttcaatgaaaaacggttttcaacatgtgtgtcagatatggaagaaaaaaacagatatttgttcgattttagtattttccatttttggaatgcttactgttcaatatacgttttttgcttcaatcgaaaagggaaatgccgcggctgctgcaattcttcaatacttggcgccttttttcgtattgttttacctatatgttaaaaaagaacttccgcctaagtggaaagatgccgtacttactttattggcgcttttcggcgtgtttcttcttttgacaggcggaaggccggacagtttgtatattccggccgaggccgccgtttggggcattttgtccggtggagcgcttgctttctatacggtttttgcaggaggattaattcaatcgttcggtgctttgacggttacgggatggggtatgctcgtcggaggggccggaatttcttttttgtttccgccgtttcggtttgacctttcgcacattggggcaggggaggcggcagccattctgtttgttgtattgtgcggcacagctttggcgtttgccctatacatcggcagcctttcttatctttccgcaaaagaaacgagctgcctgagctgcgccgaaccgcttgcggccgttctgtcgtcggcgctctggctgggtgtgcccttcaatgcctttcaaggagccggtacggtgatggtgatcattacggtcatcatcctttccctcagcagagaaagaaaagcagcagattctgtcaatgaaagggtgtag

SEQ ID NO: 1233 - DNA, 978 bp, Bacillus licheniformis
atgaagcacaaatattttgctattttatttttattgatgatatcagtgatgacggcctgctctggaggaagcgagagcacgaaaacttccggtcaggattccgtgacagttaagcatgatcttggagaaacgaaagtgcggaataaaccgaaaaaagttgtggttcttgaattgggatttattgatgcgctccttgatgcgggtattaagcctgtcggaattgcggacgacggcaaacctaagtttattaacgagaaggtcaggggaaaaatcaaagggtatacttcagtcggttcgcgcgcccagccaagctttgaaaaaattgcttctttaaagcccgatttaattattgccgattcgagcaggcacagcggcgtctatgataagctgtcgaaaattgcgccgacaatcgcgctcaaaaacttgaatgccgattatcaggacacgcttgatgcatctcttacgattgcgaaagccgtcggcaaagaaagcgcaatggagaaaaaattggctgaacataaacaaaagctggatgaattgaaacagaaattcggcagccggaaacagagcattcttctgctcgggaacacaaatgaagaaatcaccgtgcgcgatgaaaactttttcacgtctcagcttctgacgaaaatcggctatacatacggtgtcggagacagcggcaaaggcgatgccgaaaacggtgaatccgtcaatattaaaatgacgctcgaacagctgcttgagaaagatcccgacgttattgtcctgatgacgggagaaaaagataaagtcgatgaagacgggaaaagaccgatcgaaaaagatcctctttggaaaaagctcagcgcagtcaaaaacggcaaggtttatgaagccgacagattcgcctggtcgctccgacgcagcattgacggagcagatgagctgatggatgaaatcgatcagcatcttctgtctgaggatcaaaagaaatcttag

SEQ ID NO: 1234 - DNA, 990 bp, Bacillus licheniformis
atgaaacgttttgcaccgctcatttttgtttttcttttgcttgcgagttttgcgctttctgtttcaatcggttcgtcaatgattgcactgtccgatatttgggcggctgtttttgcgtacgacggttcaaaattgcacgcgattattcagtccatccgaattccgcgcgcattgaccgccgcattaatcggcgcgaatctaggggctgcgggcgcgctgatgcaggcggtgacaagaaatgcgctcgcatctccgagcatcttcggaatcaatgcaggggcctcgcttgctgtcgtatgtttgacggtgatgtttcctgcgcttgcagctccccagacagcgatgggagccgcatttgccggcggtgcagcggccgcgctgatcgtgtacgcggttgcctcagtattcagcgaacatgacagggatatcagctttgccttgattggcgttgtcattcaggcgattcttgcttcgatgacgcaaatgctgcttatctttcatgaagagtcgacggaaacgctattgttttggctttccggttctttagcggggagctcatgggataagcttcatttattggttccggtgagcattgcgggtttgttgacggctttggccttagggagggcggcttccgtcatgagtctcggagatgaagtttctcatgggctgggacaaaaagtatggctcagcagattgctaatcgccttcactgttgtcgcattggcgggagtgtccgtttccgccgccggtccgattggtttcatcggtttgatggttcctcatatgatccggtatctcatcggtgctgactaccgggcggtgattccgtattcggcattgcttggagccgttcttttgctgtttgccgatattttgtcccgctttgtctattttccgtaccaaacgcctgtcggagttgtcacggcaatgattgggacgccgttttttatctatttggcgagaagacggaaaaagggggcggcataa

SEQ ID NO: 1235 - DNA, 1029 bp, Bacillus licheniformis
atgaacaatccggcaagaaagacgaaaaggcggcgcggacaatcggcggttgttctctgtgcgctattcgcctgtttgtttgtgctcattgtactcaatttggcgatcggcgatgaaaacatcggactgtgggacgtattgaaatcgctggcaggacaaggcgatgcgggagtccgctttttggtgatggaatttcgaatgccgcgaatcctcctcgctgtgcttgccggaggggcgctttcgatcgcgggtgtagtcgctcaatttctgatgaaaaatccgctggccgcccctgacacgcttgggattacaggaggagcgggattgggcgctgtgatcgttacggtcttgttttcacagcaaagtccgcttctgctgacaggcgccgccttttcaggaagcgttttagctgcgatcctcgtctatttattggcttatcgaaatgggatctctcctgtgcggctggctcttgtcgggatagcggtcaatgctttctgccattcgggcattcagctgttaatctcaagggggagcccgaatgtcaacagcgcattaatttggctgaacggaagtctgtggggaagaggctggcaggatgtattgcctcttttcatatggtgctgtctggtgattcctccgatatggcttgcggcaaaaccgctcgatatcatcaaatcaggggacgggattgccgtcggcctcggcatccggcttgaaagaacaaggtttctgctgcttgccggtgcggttttgctgacagctgctgctgtgaccgctgtgggaacgatcggttttatcgggctgatggcgcctcatatcgcaagaaagctcgcaggggctgaaacgaagatcttgattcccgttgcagctctcgtcggcggcatcgtccttttgatagccgatgccgccggaagaggtcttgttccgccgcttgaaataccggccggattgatcgcagccgttatcggcgggccgtattttatctatttgctgcgccgcgaagaacataaaaaaagacggcatgcttga

SEQ ID NO: 1236 - DNA, 573 bp, Bacillus licheniformis
atgactgcgatttgtttgatccggcacggcgagacggactggaatgctttaggaaaactgcagggaagaacagatatccctttaaatgaaaccggtaaaaaacaagcaaaagaaaccggggcgtttttgaaagggtccgactgggacgtcatcattacaagccctttaagaagagcgaaagaaaccgctgaaatcatcaatcaatacctcggacttgaaatcatcgaaatggaggatttcatcgagaggaattacggagatgcagaaggaatgccattcgaagaaagaatgaggctctatcctgataaagaatatccgaatcaggaatcaaaagaagcgcttgccgaacggctgatggccggcgttcaaaaggtcagtgagcggtatccggacaaaaaagtgctgatcgtcgcacacggagccgcgatacacgcgcttctgtcaaaaatctcaaacggcgacatcaacctggaaaacacgaagctcgtcaatgcctgcctaagcaacatcaaatttcatgaaaataaatggcatgtgaaggattacaacctttcacaccatttgtcagattaa

SEQ ID NO: 1237 - DNA, 159 bp, Bacillus licheniformis
atgactggcaccgaacaacatttacatgattttttcaaacaggctgtgccgattctgctgttttttcgatcacgtctgcaatcgttgtcgagcgttgccgtgatggctgtgaatatatatctttgcttgcacggcagacttctcaaagtatggatgtga

SEQ ID NO: 1238 - DNA, 1293 bp, Bacillus licheniformis
gtgttattcaaaaaggatagaaagacagaacgatcattttttgctggggaaagccctgaccaaacaaaaagaatcaggctcaatcagcacgcagaatttaaaaaacagctggcaatggtcgatttgacggatgaggatctttgggtgctgagcaggctgaagcccttagtcactgaacatattgaaaccatcgtcacccgattttatcaaaatcttgagcatgaaagctctctcatggagatcatccatgacaacagctcggtcgaccgtctcaaaaagacattgacgatccacatccaggaaatgttttcaggcgtcatcgacgaagcctttttagaaaaaagaatccggatcgcccacgttcatcttcgcatcggactgttgccaaagtggtatctgggggcatttcaagatctccttctttcaatgctgaagatctttgaaaacgccttatccgatgaggaatacaggcggtctgtcaaagccgtcaccaaaattctcaacatcgaacagcagatcgtcctggaggcctttgaagacgaacacgcgaggctccgcagacttgatgaagaaagcaaaaatgaacttcacaggcaaattaaagatacttccggttctttggccgctatatttgccgaaacgacgggcgccgtacaggaattggtcgacaaatcttccgagatcgccgaaacgtcaagagccggaacgaagacagccgtttctgtcgaacaaaaatcgatcggcggaaaaaaggagcttgaggaacaggaacagcagctgaatcaaatgggaagcagcatgacgcaaatcgagcaggaaattaaaaagctggaagaaatcgcgctgcagatcgaaaagatattcggcatcgtaacaggcattgccgaacagacgaatttgctttcgctcaacgcctcgatcgaatcggcaagggcaggagagcacggcaaaggtttcgcagttgtcgcaaacgaagtcagaaagctgtccgatgatacgaaaaaaaccgtctccaccgtatcagagctcgtcaataacacaaacgctcaaatctcgatcgtcacgaagcatattacagatgtaaatcagcttgtgaacgaaagcaaagacaagatgtcggagatcaatcgcctattcgatgatatcgtctccaatatgaaaacgagcaaagagcaaagcggccgaatcgaaggcgacctgcagtcgtttttaagcggccttcaagatgtcaatgccgccgtatcacaagtcgcagtttcagtcgattctctcgtagagctgacaaaaaaatga

SEQ ID NO: 1239 - DNA, 1530 bp, Bacillus licheniformis
gtgagcaatcaagaacaaaaactgccggactcgcctgaatcgtattggagaaacagtacagaccttccttcgttcgaggaactgtctgaagatgtcaaaacagatgtcgccatcatcggcggcggcatgaccggactgacgacggcttatttgctgacgaaaaaaggctacagcgtcgtcttgatcgaatccggacggatactcgacggaacaaccggctatacgacagccaaaatcaccgcgcagcacgatctgatctatgacgaactgatcgggcatatcggaatgccgaatgcgaggctgtattatgaagcaaatctcaaggcgctgtcctttatcaaaaacctcgtgcttgagcaaaagataccgtgcgattttgaagaacaggacgcgtgcatttacacaactgaagaacaatcggtccaaaaactcagaaaggaatatgaagcataccaaaagctcgggattgacagggaattcatcaaagatctccccgtcccaattgatgtaaaagcaggactcgtcatgaaaaaccaggcccagtttcatccgctgcactatttgaaataccttgcagaggccgtccgggaagccggcggaaaaatatacgaaaacacggcgtctaaggaaatcaaagaaggcgaccggccaaaagtgctgacaagaagcggacatcaaatcttcagcgattatgtcacgtgctgcacgcactttccatttcatgataaaaaaggattctattttgcaaggcttgagccgagccggtcatacgtgctcgccgtcaagccgaaaacgccgtatccaggcggcatgtacttaagtatagaccagccttcacgctcgcttcgctcggtgacgatcgacggagaaaaaatggttcttgtcggcggtgaaagccacaaaaccggccagggagaagatacaatcaagcattatcaggcgcttgaatcatttgcggaaggcgtgctcggcatcgaatcgatcccttaccgctggtcagcgcaagatttaatcacgcttgacaaaattccgtatatcgggccgatctatccgaaagaaaagcgcattctcgtcgccaccggatatcggaaatggggcatgacaacgagcaccctcgccgcgcagctgatgacagatcatatcgcgggtgaagacaatccttatcaagccgtctttcagccggcccgtttccacccggatccaagcatcaaaaaagcgatttcctacaacgcggatgttgcaaaacactttgccgaaggaaaactcgagcagccgatcaggaagccggaagaccttgtcaacggagaaggcgcggtcgtgtcgcatgccgggaaacgggcgggcgcttatcgcgatgaaaaaggcgagcttcatctggttgacacaacatgcacccatatgggctgtgaagtcgagtggaatgatggagaaaagacatgggactgtccgtgccacggctcaaggttttcgatcgacggcgatgtcattgagggccctgccgtagaacctcttaaagatccagaaagctga

SEQ ID NO: 1240 - DNA, 858 bp, Bacillus licheniformis
ttgagcaagcagccgaagaaagtactgcctccccagcaccaaacacagcgtcccggattggagtatttgatggatccccggcccgttttcgaccggccgaaacgagagcgaaaactggctgggaaaaccgcgattattacgggaggagacagcggaatcggccgtgccgtgtccgttttgtttgcgaaggaaggcgcgaacgttgtcatcgtttacttaaatgaacaccgcgatgcagaagaaacaaaggggtatgtggaaaaagaaggcgtcggatgcaagctgattgcaggggacatcggggacgaggctttttgcaacgatgtggtgcgccgggcaaaggaagcattcccaacgatcgatattctcgtcaataatgcggctgaacagcatccgcaaaagggaatcgaaaaaatcacgagccatcagctgatccgaacgtttcagacgaatattttttccatgttttatttgacaaaagctgtgctgccgcatttgaaaaaaggcagctcaatcatcaatacgacctcgattacggcttatgccggcaatgaaaggctgatcgattattcttcgacgaaaggagcgattacatcatttacgcgttcgctcgctttgtcgcttgtcgatcagggcattcgtgtgaacggtgtggcaccggggccgatttggacgccgcttataccgtcgacgtttactgagagagaggtcgaaatattcggttcaacaacgccgatggaacggccgggacagcctgctgaagtggcgccgagctatctgtttctagccagcgacgattcttcctacatgacgggccaggtgctccatgtcaacggcggaacgattattaacggataa

SEQ ID NO: 1241 - DNA, 234 bp, Bacillus licheniformis
atgaaagagaaaaagtcgtacgctgagctcatgaagtcccgcaatacccaaaaggtgaaagaacttgatgtaaccatcacggatatctacattcaaatggtccttgatgaatcgctttttaaacggcgtttgcacacgctgagcaagaagattaatgaagcattagacaaaggagataagcaatctttccttgagctttcaagagaatatacagcgctgaaaaagcacgcataa

SEQ ID NO: 1242 - DNA, 579 bp, Bacillus licheniformis
atgagcacagaggatatgacaaaggatacgtatgaagtaaacagttcgacaatggctgtcctgcctctgggagagggggagaaacccgcctcaaaaatacttgagaccgacaggactttccgcgtcaatatgaagccgtttcaaattatcgaaagaagctgccgctatttcggatcgagctatgcgggaagaaaagcgggcacatatgaagtcattaaagtttcccataaaccgccgatcatggtggatcactcaaacaacatttttcttttccccacattttcctcaactcgtcctcagtgcgggtggctttcccatgcgcatgttcacgagttttgcgcggcaaagtatgacaacacgtttgtcacgtttgtcaacggggaaacgctggagctgcccgtatccatctcatctttcgaaaaccaggtttaccgaacggcatggctgagaacaaaatttatcgacaggattgaaggaaaccccatgcagaagaaacaggaatttatgctctatccgaaagaagaccagaatcagctgatatacgaattcatcctcagggagctgaaaaagcgctattga

SEQ ID NO: 1243 - DNA, 371 bp, Bacillus licheniformis
atgacaagaattcccgccgaagccagggatatgattgaaaaggcgatttacctcccgatgaccgtcagcatattaaaccgggacatgaaaatcatccagcaggggccgtttaagctggaaagacccctatctgcatcctgatcgaacaggcgttaaagcttgcccagcgcgacctgtacgacgtaaaaaatgaactgcgccgccggaaaatcaaggtgcatgaagtgtcgcgggacgaagcctttacgatgtattcctttatatatgagggttacgaagaagagcataactactttaatccccgcatccgcaaccaggtatccgcgcttcttgagcactatttattcaaagccgctccagatcaatagcgc

SEQ ID NO: 1244 - DNA, 156 bp, Bacillus licheniformis
ttgtcatggcttttctcctcatttctttttttgttcaggaacatttgttctgtttttattttacacgaaatacggccttttaatcaagaacgggaaaaaatgactaaaatgatcaggttgtttcagactaatacagaaaacaaccgagacggatga

SEQ ID NO: 1245 - DNA, 612 bp, Bacillus licheniformis
atgttggagcaattattcagctattttacagaagagaatttaacagagttttttcagagctacagggcttttggtccttttgtagccgtactgctgccgtttattgaagcgctgctcccgtttttgcccctgctcgtgtttgttgttgccaatgtaaattcgttcggtttatggcaggggtttttgttgacgtgggtcggggcatctttaggttctatagcggtttttctttttatccgccatttcggccagcaaaaagcactcggttttatccgcaggcatccatccgtaaaaaaactgatgatctgggtggaaaaacggggcttcggtccgctgtttctcctgctttgctttccattcacgccttcggcggcggtaaatgttgtggcaggactttcgcgagtcagcctgctgcctttttcattggcggtgctttgcggcaagttcgtgatgatttttatggtgagctttgtcggccatgatctgaaggcgctttttacccagcctttgcggacagccgccgtgatcatcgtcatgctgatcttatggtacgccggaaaacgggttgaacatcgtctgaacgtgagattcagccagagagagaaagactag

SEQ ID NO: 1246 - DNA, 519 bp, Bacillus licheniformis
ttgaaaaagcgttttttggtcatagccggggtactgcttgtcatcgtcgtcgggattcaggtcaaaaatgccgttttcattgaatataaagtagaaggcgtcagcatgaatccgacctttcaggagggcaacgagcttttgatcaacaggttcgcccaccgctttaaaacgatcagccgatttgacatcgtgctgtttaaaggacctgacaaagatatattcattaaaagggtgatcgggcttccgggcgaaaccctcaggtatgaagatgatcagctgtatatcaacgaagaaaagatcaaagagccttatctggacgacttaaaggccgtcaccgccggaggggacttgacaggggattttacactgcaggaagtgaccggagaggagaaggtgcctgaaaacgagtacttcgtcctcggggacaaccggatccacagctttgacagccgccatttcggctttgtttcagaacgggacatcgtcgggattgtgacggaaagaattgataagaagtga

SEQ ID NO: 1247 - DNA, 1776 bp, Bacillus licheniformis
atgaaaaagttatggaaaatcgcggtttcggctgcaatgttcgtcggttttttcgcaaattcaccccgcattcaagcggaaagcaataagcaggaaaacgaggtcattgttgtatataaaaataccagcggaaaagaaaccgtcatcgaacaggcagacacggtagaacacgtttaccggcacattcccgcagccgctgtcactgcggacgacaaaacagtgcgcgaacttgaacacgatcccgacgtcctgtatgtcgaagacaacctcccggtagctgctgccgacagcaccgctctaaaagctttctccagcagcacagcgcaaaacgcctccgcgttttcacagtggaacatcaagctgattcaagccgcactggcttggaataaaggtttgaccggaaaacaggtgaagatcgcggttattgacagcgggatttccccccatgaggagctgtcgatcgccggcggtgcatcgatggtcggctataccgcttcataccgtgacgataatggccacggaacccatgttgccggaatcatcggagcgaagcataacggacgggggatcgacggcatcgcgcccggcgcgcagctgtatgccgtaaaagcgctggaccggaatggtgcgggggatctgaaaggtatcttacaaggcatcgattggtcgatccagcacggaatcgatatcatcaatatgagcctcgtcgtttcaggcgacagtcaagttctccacgatgcagtagataaagcatacaaacggggaatcattttagtcggagcgagcggaaatgccggaaacggaaaatccgtttattacccggccgcctacagcagcgtcattgccgtctcggcaaccaatgaaaaaaatcagatcgcctcattttccaacaccggcagcgccgtcgagttttccgctcccggcacatcgattatcagtacatcttccgatcgcggctatgcaatcggaagcggcacttcacaggcaacgccgcacgtcaccggcatgtttgcacttttgaaacagctgtacccaaccgcttcaaatgctgagctgcgcaagaaaatgcagttttatacaagcgatttgggcgctcccggccgtgatcatttgttcggctacggattaatccgcttcaaagaggtcacacagccattggaaaaagcgcaaaaagccgtcggacaagcggaaaagacaaagaaaaaagcggacattcaaaccgcacaaaaagcgatcgaaccgctccctgcagacgcagataaaaccgctttgaaaaagagactcaatactgttaaagagcagcttaaaaaaacagccgaaagcaaagtgaaactcgctgagaagcaaaaaaagaaaaccaatgccgactccgcccaaaaagcggtcaacgaactcgacagcggcactttcaaaacgaatttgcaaaaacggatcaacgcggtccgttcaagcctcttgaagaccgcaaagcaggccgttgccaaagctgaaaaagcggcaacagactcaaacctcggcaaagcgcaaaaagcgatcaatgagcttcccgccggaaaagacaaatcaaatctgcaaaaaaggctgaacaccgcgaaaaagcaagcagctgcagcctataataaaaaagtttctgcagcaaaggccaaagtcaaaacggccgaacaaaagagaacgaaaaaaacaaaatcagcagcgcaatcagcagtaggcaagctgaaagcatccgccgaaaaaacgaagctgcaaaaacggatcaatgccattaagctgaagtag

SEQ ID NO: 1248 - DNA, 1241 bp, Bacillus licheniformis
gtggaaaaaacaattaaacatgaccccaattattacaaaaagataattattgcattgtgtttagggtgggtcgctatttggatttatcgtacaatacttacgccaatatatccgcagattcaagaatcattagggaatattagtgaccgcaaatagggttggttgcttctatttatttctttgcatatacgggtatgcaaattccatcaggagcacttgtcgataaatttggacaaaaaaaggtgttaattcctgcatttatcgtttttgcgctggctacatttgtgattggcacaagttcaactatcatgcaagtatacattggttcgttattggctggtatttcgactggttcatattacggtgcagccttttccttatcagctaaacatacgccaaaagataaaaaaagcttttccaatgcgattataaatagcggttcagcattagggatggtaattggactaatcggatcatcggttttagtaggcggttttgaaattcaatggaattatatgctttttataacagctatcgttatcgtagctgtaacatttgtgtttgtgctgtttattaaacaagataaaacatcagataaggaagtggctgaagagaagaaagacactgtacaaagcacagatattcaaaatgaaagcttattttctccaagacaattagttgtatattttgtatattttgcaacatgctatggctattatatgattgtaacttggttgccgtcctttcttgtagcagaaaaaggatttgctcaaggttcagtaggatatgtagctgcactagttgcggtcactgcagtgcctggtgctttgatatttactaaatatatagacaaaaatgcacatttgcgtctgcgtttaattttatttttattaattgcagcagcagtaacaattagtttgacagtgtttgcaccaaatcctgcagtactgtatattgcgttaattttatatggcttattaggtaaacttgcgattgatccagttttaataacctatgtatctgattccgtatcaggagacagagttgccagagcattaactctctttaacttctttggaatgagttcatctgttattgcaccaacacttactggttatattggtgatgtaaccggctcgcgagtattagcattctatattgcaaccattcttcttgcagcagcagcgttgctatttttccttgtggttatgttaagacagaataaaacagcagctaactaa

SEQ ID NO: 1249 - DNA, 474 bp, Bacillus licheniformis
atgccaagagtcagaatacagctattttttaatagctccctttcatttggcattggtaatgaggtttccgagctttcacaattgccactgtcttttttcgaagcgaatgaggcttatgataataaatatgaacaaggcgaaatggaatttatagagccctacaaatccaaaagcgtagaagaattattacaactcattccaacgaataaattaaagccatttatcatttatacactcggtcctttagcctatcctcagacaacgaaggaaaaagaactaagattcacattaagtgtctatatggcaaaccaatgtgatcttacaaaaacctcagaagatatttttattcaccgtaatactgtgaaatatcgtattaaaaaatgcgaagaaatattaggtcaatctgtagaatctcctgatacatccctgagcattcgattggcattatttgcttcagagaaaatatcgttgtaa

SEQ ID NO: 1250 - DNA, 1203 bp, Bacillus licheniformis
ttggataagaaattcacaagttttggcggtttagaacaagggggtattacgcgtctgttatactctcctgaatggattgctgcagttcgcgaactggaagcgacattcaaggaagaaggtttagaagtaagctttgatgatgttggaaacttatctggtcgccttgttggaagtaagtatcctgaagaaactattttaacaggatcacatatcgatacagttgtagaaggcggtcatctggatggacaattcggtatcttatctgcattggttgctgtgaaatatttaaaagaaaaacatggtcaaccattacgaacaatagaagtactatctctcgcagaagaagaaggaagccgattcccatatacattttggggaagtaaaaacttctttaacttagccaaaaaatcggatgttgaaacaatagaagatgctgatggaattaaatttgaagatgcaatgcacgaatcgggttttgattaccgtaaaacagatcatgttcgtgacgatattaaagcatttgttgaagtacatatcgaacaagggaaagtattagaggcggaaaataaagcgataggtgttgtaactgggattgttggccaaaaacgttacacaattaacttgaaaggtgaagcaaatcacgctggcacgacaccgatgtcattacgaagggatacagttgttgcatatagtgaaattgtaacagacttaacgaaacgagctagagaaattggggagcctcttgtattaacgtttggacatgtcactcctgttccaaacacggtaaatgtcgtccctggagaaattactttttcgatagactgtcgtcatattgatcaacaactattaaataattttgcgaaagaaattgaagataaagttaaagcggttgcagaaacaaacaacatgacttatgacattaatttatggatggatgaagcaccgtcattgatggataaagaaatcattcaaataattgaacaagcagctaaggccaatgtgggggacagctataaattgatgccatctggtgcaggtcatgatgcgcaaatttttgcggattttgtcccaacagcaatgctgtttgtaccttctattggcggaattagccacaataccaatgaagaaacgaagatagaagaccttgtgaaggggattgaagtattgaaagatgtattgtttgaactagcttataaggaataa

SEQ ID NO: 1251 - DNA, 789 bp, Bacillus licheniformis
atgagttacttaaatcataatcaaggatacagagaaggtttattagaaacacgttcagtaataaaaaaggataattatgcggtaatcacacctgatggcttggttaataatgttgtacctggctttgaagattgtgatgtaacgattttaggatccccgcgtttaggtgcaaggtttgtagattatttggtaacagttaaaaacaagggcggaaacaaaacaggttttgccggtgatggtatccaatcatttgtgtacgttgaatatggtaaaatcaacgcttttgcggatggtgaaaaatacgaattagcaaaaggcggattcttatatgtgcctccacacttacaattgacatttgaaaataataataatggtgaggacagccgtttgtttttatacaaaaagcgctatcagccgcttgaaggacatacaccagaaatcgttgcaggtaatgtgaataacattaaacaagaagcctatgaaggtatgaaagaagtattaattcaagatttactgccaaaagaaatcgcatatgacatgaacattcatattctttcattcgagccaggtgcttcgcatggttacattgaaacgcacgttcaagaacacggtgcctatatattaagtggacgaggtgtttacaacttggacaacgagtggatgccagttgacaaaggtgactatatttttatgggagcttatacgccgcaagcaacctatgcaattggtttggatgaaccattctcgtatatttattctaaggatgcgaatagagatattaatctataa

SEQ ID NO: 1252 - DNA, 1029 bp, Bacillus licheniformis
atgagtgaaccattagtgtatgtagaacgtaatcgtctccggcagctaatgaaagataaattagtgaaagcaggtttacctgaagaacaagcggataaaacagctgatttactcatttttgcagatgaacgaggtgttcactcacatggtgcagtaagaatgcaatactattccgaacgtgcattaaaaggtggatataacctgaaaccaaacttaagcttcgaaaaaacgggccctgcatcggggatttatcacggagataatgcattagggcattatgtgagttatcaagcaatgaaaaaggcaatcgaattagcaaaaacatcagggatcggtgttgtcggtgttaaagaaatgggacacagcggtgctattggttattatgcacatcaagcagcattagaaggtatggcggcattaacagtatgtcaatctgatcccatggtcgtgccatttggcggcaccgaaccatactttggcaccaacccaattgcttttagtgcgcctagaaaagacggtagtccaatcctttttgatatggcaacaacggtacaagcctgggggaaaatcttagatgcaagaagtaaaaacaaatctatcccagactcatgggcagtggataaaaatggagcgccagcaacagacccgtttaaggtaaatgcattattaccaatggctgggcctaaaggatacgggttagcgatgatggttgatattttatcggggagtttgctcggcttgacatttggcaagcatgtcacttctatgtataaagatttatcggagtaccgtcgattagggcagcttcatctcgtaatcaatcctgaatactttggtgggaaggagcaattcctggaaaaaatatctcaaatggttgaagaattacatgacaacccacctgctgaaggatttaacaaagtgtattatcccggtgaaattcaaatagatgtgatgaaacagtataaaaaaacaggtatcccagttacaaaggaaattttagattatttagagtcagacaaaatttactaa

SEQ ID NO: 1253 - DNA, 1050 bp, Bacillus licheniformis
atgcgcgtatctaagcaggagctgtttcatttaatcaaacagaagctgatcaaagctggattaaacgaaggagccgcacacgatgtttcagatgtattgacattcgccgatcatagagggatccattcccatggtgcagtacgtgtggaatactatgccgaacgaatcgcaaaaggcggtattacagcaaacccaaactacacatttgaacaaacaggacctgcatccgccgtctttagcggagataatggcccaggtcaccaagcagcaaaacaagcgatggaaaaagcaatcgaaatggcaaaaaattcaggtgttgctgttgtaggcatgaagaatatttcgcatagtggtgcattgggttactttgttgaaatggcagcagaacaggacatggttgctttaagcatgtgccaatcagatccaatggtcgtaccgtttggaggaacagaaccatactttggcaccaatccaattgcttttagcgcaccatcggctgatgaacgcatgatcacatttgatatggcgacaactgttcaggcatggggaaaagtattggatgcaagaagtaaaaatgaatcgatcccggaaacatgggcagtagatgcagccggtgcaccaacaacgaatgcaagagatgtccatgcacttgtgccaattgccggtccaaaaggttatggattgatgatgatggtggatgtcttatcaggcagccttcttggagtacctcatggcgtacatgtatcttccatgtatcaagacctgacaaaaggccgagatttagggcaaattcatattgtgatcaaccctgcatacttcacagatttaactgcttttaaacaacagatttcgacgatgcttgatgaattaaaagcacaaccggcagcagaaggctatggggaaatttattatccgggtgagcgcggtaaattaagaagtgcaaaatatgataaagaaggaattgaaattgtagacgatatttataactacctcgtttcaggcgatgttcattacaatcgttatcatggaaagaatagatttgcagaataa

SEQ ID NO: 1254 - DNA, 1758 bp, Bacillus licheniformis
atgttatacacaattataaaagaaaacacctatcaagattctatcgtgttaatgcttttatcaaacaagttatctgcaatagatggtgtaaacaaagtatcgatcatgatgggaacaccagctaacaaagatatttttaaatcttcgggtttgggcacagatgaattggaaaaagcaaaaccaaatgacatcgttatcgttatagatacaaatcaagaagaaaaagtgtcggaagtgaaagaagaagtagaagcagctttaaaaggtgattccgcttcacaagacacatctaaagaccaagaagcacataattggaagcgtgcaatggagcttgcgaacaaccctaatttggcattgatctccattcctggtcagtatgcagcaatggaagcggaaaatgcattgaatgaagggttacatgtatttgtattcagcgacaatgtatctaaagaagatgaggttaagttgaaacaaaaggcgcatgaaaaaggattattagtaatgggaccagactgcggtactggaattattcacggcgtgccactggcatttacaaatatcgtgaataaaggagatattggcgttgtgggtgcatcaggtacagggattcaggaagtgacatgcatcattgaccgtcttggtaaaggtgtaacaaacgcaattggtacaggtggtcgggatttatcaacagaggttggtgctaccacggttttagatagtatcaaagcattaaatcaagatccacaagtaaaagtgattacagtaatttctaaaccacctgcaaaggaagtgcagcaaaaagtattaaatgtgttaagaaatattgaaaaaccggttgttacgttatttttaggagataaaccaacttatcaggaagaaaatatttatcatgcgtatacacttgaagaagcagcggttgtatctgttcaattatccaatggcgacaaaccgaattttaaaccgacagtggctgaaaatgtaaacgtgtcgttaaaagattcacaagttggtattaaaggttattactcgggcggcaccttggcatctgaagcagctgtgttagtgaaagaggcattcaaagaagaagtacctgaagagaagaaaggtgcctatattctaaaaacaaaacatcatgaaattattgacttaggcgatgatatttatacccaggggaagccacacccgatgattgatcctgaaaaacgcatcgaaatgcttgaaacatctggaaacgatcctgaaacagcagtcatcatgattgataacgtcattggctatggcagtcatgatgatatggcaaatgaattagcaccagccattaaacgtattttagccaatgcacatcaggatggccgtgaacttgcagtgcttgtaacagttgtaggtacagataaagatcctcaaggttacgaaaagcaaattgaaaccttaaaagaaagtggtgcaatgatttgtgagacaaacgaccaaatggttcgtacagcgattaaactggcaggaggaaaagtggaacagccagtccttgacatacaaaaatttgaatatacccaagaagacttgacagtagacgaaaaaattatgtccttaatcaatacgaaaccaagtgtcatcaatattgggctgaaaagttttacagcagctgttcagaagagcggatcagagtgtgttcaatttaactggcggccaattgctggcggtgatgaaaagctaatgaaagtgcttcaatatctaaactactatgaaggagagacaatctaa

SEQ ID NO: 1255 - DNA, 1266 bp, Bacillus licheniformis
atggggtacaaaacaataaatgaagcgaacgaagctgttatccggaagatcatagcagctgaaccattcttgaccgatgttgtacctgccaagtctgtgattcctgaattagaagattatgtgttattacatgctgggcctccaattaaatatgaaaatatgacagatcctatgcaaggctcttgtgttggagcgattctttttgaaggatgggcagaagatgaagagggagcgcgtggtctgcttgaaaacaataagattacatttattccatgtcatcatgtgaatgcagttggaccaatgggaggctttacatcacctaatatgccggttcttgttgttatgaacaaagagagcggcaatgaggcgtactgtcaaatgaacgaaggcatcggtgcagtattacgcttcggtgcttatcatgagcaggtaatcaatcgcctgcactggatgaaagatgtgttgggtccagtgttaagtaaggccttaagaaaaattgatggaggcataaacgttaatgttttgatggctaaagctattgcaatgggggatgaatttcaccagcgcaatattgcagcatcattggtgtttttaaaagaagttgctccagtaattgtggcattagatgatgttgaaaacgaacaaagtgcagaagttatccaatttttagctgatacagaccaatttttcttaaacattgccatggcgactggaaaagcaataatggatgcagcgcgtacaatcaaacatggtacagtcgttactgcaatgtgccgaaacggtgaaaactttggcattcgtattgctggtatgggagatgagtggtttacagcacctgttaatacaccacaagggttatattttaccggctactcagcggaagatgcaaacacagatatcggtgattcagcgattacagaaacaatcggtgttggcggcgtagcaatgattgctgcccctgcagtaacacgttttgttggaacaggcggatttaatgatgcgcttgaaacaagcaatcaaatgactgaaatctgtgttggagaaaatccgaactttgttattccgacgtggaacttcaaaggtgcgtgtttaggtattgatgcacgtaaagttgttgaaacaggcataacaccggtaatcaacacaggtattgcacataaaattgcgggctatgggcaaattggtgctggtacagttcatcctccaattgaatgttttgagaaagcaatcacagcatatgctgaaaaactaggttttcaaggatga

SEQ ID NO: 1256 - DNA, 771 bp, Bacillus licheniformis
atgattttacaggcaagtgcgattggttcaatcgcacttcagctattaattgagggaaaaacgtttactgtgcacagcatttttgaaaaaggtttaaatattgttgatcagaatgatgaattgatatttatcggcacaaatgaaaatgggaccttcccatttggaatcttgcttggctcacaaacgaagcaaactttaaaagcaggtcttgaggtgggagattcattacaagttcgaaataaccatctttcccacaactgttttaaactcaattttaatgcgaaaatacttccgttatatacggattttaaacatgcaaacatcaataaattaaaagaaaacgtgaaacaaatttcatttaaatcgtatgaatctactgattttgaatcagctcatgtgtcggacttgataaaaaaattacacgatccaacagaaaatttggaggaagagcttcgttactttatcggtcggggccaaggtttaacgccaacaggtgacgatatactggtcggtatattatatggacacttcatcaactcttttatcgccgaaaaacaccttgaaacattgggaagtctaatcagagaacccttaacaacccttgtcagcacgcgctttttaacttgtgctatagaaggcttgtttagttcaaaaattacaaaattacaacatgattcatctttgaaaagtataaaaagtcttataaaagtaggttcttcttctgggatggatactttatatggaatttatatggctttaacaaaggagtga

SEQ ID NO: 1257 - DNA, 933 bp, Bacillus licheniformis
atggggaaaagtgtagtaatcgcactaggaggtaatgcaattttacagccaaaacaagaagcaacttatgctaatcaattcaaaaatgtaatctctgcaacacgtcatatgattgaaattaaagaagcaggacataaaattgtgattacacacggcaatggtccgcaagttgggaatattattgctcaaaatgaagctgccaaaaatgtcgttgaaccgctgccgatctatgcttgtaacgcagaatcacagggattcattggttatatgctcgaaaaagctttaaaaaaccatattaaaaaacggggcattaccgcgaatgtagctacatttctaacaatggttgaagtggacaagtatgataaagcatttgaaaaaccaacgaaaccaataggagtattttattcagaggaagaagcgaagaaattggagaaaaaagggtttgctatgtcagaagatgcagggcgtggctatagacgagttgtgccttccccagaaccgaaagtgatccatgggatagaagagattcgacgtttaattgatgaaacgattgttatctcctcgggcggcggcggtatacctgtatatcgtgacgacagcggtctattacatggtattgaagcagtaatagacaaagatcgttcaggattaaagctggcacaacaattaaatgctgatgttttcatgatgttgacagacgtaccaaatgtgtttatcaattttggcaaagaaaatgagcaaaaactaagccgaattacagtagaagaagcagaacaatatgtggcagaaggtcaatttcctgctggcagtatgctgccaaagatgcaagcggctatagaatttgcaaagttaggtaaagaggcaattatttgttcattgaaccaagcggcagctgcactagacggaaaagcggggacgcgcctaacaaaataa

SEQ ID NO: 1258 - DNA, 1251 bp, Bacillus licheniformis
atgacaaaagaggcgggatcagttgaaggtaaaggaaaacaaccactggttccctattgggtaaaagttgttatcgtatttttcttcggttgggtggcttatgcaacgcgaacaatattaaaccccattatgggggatattgaatcagcgttttcattaagcaaggcacaacttggcttaattatgagtatatttttcatcggttatgctggtatgaatgttcctgcaggaatattaggagataaaattgggaaaaaacgagtgttggttccaggtgttattctatttggctcgcttgcagcagttacagggatgatgcccacattctttctgtttatctctgcatggcttatggttggtatggctcagggggtatattatgggccacaatatggaatatcatccgaaattatcccgaagaaccgtctaacattaggcagtgctgtgattaatgcagggatggcttttggtacttcaattggctattatatctccagttatgttataggagaatggggattcggatggagaaccccattttttgccatcgcagtgccggttgtacttatcggcatcgcaatggcaattgtaattaaagacaaaccaaaaactgataaagaggttaaaaggagcgctgaaccgtttaagttttcatctttatttaatagaaacttaattttggcatatattattattttctgctctatttacggattctttatgattattacttggttgccatactatttagaaacagcacgcggtttaaccggaggaaatattgcctttgttgcatcacttgttccatgggcagcaattccaggttcattattttttagttggctgtcagataagttaggccggcgcaaaccagtattgctcatgatgttgccatttggtattttatcaacagctgcaattgtttactttgatagcttaccaattctgtatatgacactaattgtgtatggaattgtagggaaaattagcgttaaccccgttttaattgctgttgtagcaaataatgcaccaaagcaatcattaagtacagcatttggattctacaactttgttggaatgttaggttccattttagctccatatattactggctggctgacagacactacaggaagtatgaatataggattttattttgcagcagctctgttagtaatcgcgttgattgcaacatatttaatagacgaaagtaatttgccatctgttgataaagcagctaaacatcattag

SEQ ID NO: 1259 - DNA, 339 bp, Bacillus licheniformis
atgctcagtcagattaagtatgaagagactcattcactgcaattgcgcttcaagcggcacaacaaaggcgacagccagaggctgatagatgcaaataataaacaattcggaatcgtggtgttaaaattcagcagcgtctgcaaaacagcatgggctaaaatgacgctggacaaagcagtgtccttaggcttggaggcgaatgcatatttgaaaagaaacacagacggaaaagaactgagctgcagcccggctggaggaaaaggaaaagtgctcccggggcagacatcctgttatacaccgatggttgatttcgatccgcgttcttcatatgcgatgtag

SEQ ID NO: 1260 - DNA, 1101 bp, Bacillus licheniformis
atgaacaagatcgccgcggaagaagtcgccaacatccttaatacatggtaccgcgccatcagaagaaatgatgctgaacagtcgatccgaatatttgaagaagtcaaaccgatgctggcagagatggaggaagaccaagaggttttaatctactattctctgctggaactgcggcataaaatcatgctgtatgatacgcggggaaaaaagatagaacagcaagaggagttaacgaacggcggcagtgctgcatcacatatgacatcctattactactacctgttttcaggagcttatgaagtgtataaaaagaattatgagcaggcgatcagcttctataaaattgccgagaagaagcttgctcatgtacatgatgaaattgaggtggcgcaatttcacgataaagtcggaaagctctactattacttgggccagaatatcgtctctttaaaccatacccggcaggcgatggaaattttcaaggggcatggcgaccatgatatgaaccttgtttccacttatattacgatggccggaaattatacagagatggggaaatatacagaggcggaagaatatttaacagaagccatccatacggtaagaaaagccggcgactgttttaaagaaatgcagctccttcataattttgccttgctttatgcggcgatggacaattcggaaaaaagcattcagtttttagaaatcgttttggatgatcaagcatatgctgcatcagattattatttcaatgctgtgtttttaatgatcaaagagctgtttaaagtcggagaccataaacgcgctgcagccttttacaaagaagggaaggaaaggtcgaaatccgcggcgaataaaatatttgacgccaaaatcgatattttatatgcggcttatgcaggagatggtgaacaggcggttaaagactgcaaagacaacattgaaatcctgtttcaaacaaagcaatacgacagcgccagagaactttcgctcttaacggccaatgtttacagatcaaagtcactttataaagaagccgcacatttctttttggaagcgattaaagcggaagaaaaaatgaaaaaagtggagggaatgtga

SEQ ID NO: 1261 - DNA, 117 bp, Bacillus licheniformis
atgaaaaaactgttcattgttgctgcgattgctgccgtcgtatgttcgggatggtttgcggcagaaactcactgggcatccggcgacatgcaggttgctgaaaagatggtcggttaa

SEQ ID NO: 1262 - DNA, 120 bp, Bacillus licheniformis
atgggattttcactcaaaagcaaaaccctcaagaaagagatcttgattttgaataaaagagtgattttacataaatatcttgttcttccttctggaagtcaaaaaagtcttaatgtttaa

SEQ ID NO: 1263 - DNA, 120 bp, Bacillus licheniformis
gtgataggtgcatttgttggatatttaaagagcaacggaagtattcaaatgcccctcttaatgattgattataaaagaaagtgggaacacaaaaatgtaagccactttaaaaatcattaa

SEQ ID NO: 1264 - DNA, 528 bp, Bacillus licheniformis
gtgataacacttacggccacaacccttatcatttcaggatttagtgggttcgcatcatctgtctcagccgctgaacaagaacagtcaaccacatcaattaccgaaacgacggatgtcacattgccagcttctcttcaagaatatatggaaacacatcaagagcctactactctagaagattccaaagcattcatccaatttgcatcacaaactccagaatttcaaacttacaatcagttaaatcaggatggacaagtacatactgcaggccttattggtggatctctaaaagccataaaagcatttggatgggtttgcagagttgggggaaaaactcttaaatgggcgattagaccactctctccttctaaagcgagactcgtcgacaaatatgcacgtaaaattgcatatgccacagaaagattaaatagtgcttcaaaaggcgctcttgtaaaagccttagtgaaagccggagttcctaaaaaaacagcagattcccttgcggaaatcatcttatggctcgtataa

SEQ ID NO: 1265 - DNA, 495 bp, Bacillus licheniformis
atgggtgaaaaaaccaaagaaaaaaactactctattggggatcatatttttgcaatattggttgttcttcttatgtgtttatttcttatttcttccccttttctgatattcttcggagtctttaaattggtcgctttggcaccagatgtgtcaatcaatacaaaaggtacttttgattctgtgatcgttttattcaagttttttgttctcactgtggtagtcgtagggattgtagacgtagtgttttctcagattttattgaaaaaacgggggtttctcaattttgttattgaagctttgttgatgttttgtgttttttatctatatgtattgatttattcaatgcattctcaggagattgttatacggaataatggtgtattcttagtatctttatttttgtttattttgtatttgctaataaatgtagcatatatcgtttcacggcggttatataaggcaactatgaaaaacatacagaaaaagaacaactaa

SEQ ID NO: 1266 - DNA, 156 bp, Bacillus licheniformis
ttgaataaaacgatcacagaatcaaaagtaccttttgtattgattgacacatctggtgccaaagcgaccaatttaaagactccgaagaatatcagaaaaggggaagaaataagaaataaacacataagaagaacaaccaatattgcaaaaatatga

SEQ ID NO: 1267 - DNA, 1038 bp, Bacillus licheniformis
atggcgacgattaaagagattgcgcttcaggctaaagtatcaagcacaacggtttcaagggttctgaaccatgaccagtcattatcagtagcgcctgaaacaaggcagcggattttggatatagcagcccggctcggctataaaagcacgcgcaggcgccgcgaggtatatgcctcaggaagcggggaaagcccgcgcatcggcattgttgtctgccaatcacaggaagaagagctgaacgatccgtacttttattccatcaggcagggaattgaaagtgagtgttttgaaagaggagcgtttattacgaaatttattcagctgagcagcatccgctcgaatcagcctgtaggcgatgtcgacggcttaatcgtcatcggaaggatcaactttgccggtttgcagcagtgcatgggcgcgctcaacaacgtcgtgtacatcaaccatacagacaatgaagagctgcgcgactcggttgtcgtagattttgagaaggctacggggagggcgctgaaccatttgaaatcgctcggctatacaaggatcggttatatcggcggaagagaaaaagagcactttcgaatcagcgatcaggagacaagcgccattgaaatcgaagacaaacgtctgactgcgtttctggagatggccggttcggataacgcaaagcacatttatatcagcgagtattcgatgcagcaaggctatgaactgatgaaaaaagcgcttttagagaaaaacgttcccgaagctttttttatcgccagcgattcaatggccatcggcgcgctccgggcgcttcgagaatcgggactcaaggttcccgaagatgttgcaatcgtcagcttcaacggcattgaagcgtccgaatttgctaatccgccattgacaaccataaaggttcatacagaagagatgggccggacgggtgtgaagctgctgctcgacagactgaaaggaagggaactgccgctgaaagtgaccgtaccttcagagctgattattcgggaaagctgcggattcagcaaacggagctaa

SEQ ID NO: 1268 - DNA, 1254 bp, Bacillus licheniformis
atgaaaaaaatcattttctcttttgttctcctgatcattttgtctgcaatacttgcgggctgctccggaaagaatgccggaaagagcggagatgtcacgctcacaatgttttcgacaatgacaaacgacagtgaaaaaaacacgctcagaagcatcgcagatgattttgaaaaagaaaatgaaggcatcaagatcgatatcagctttcccggcccggactatgaaaatatgctgcgcgtcaaaatggcggcaaatgacatgcctgatttgttcgatacgcacggctgggcgaagatccgctacggggaatacactgctgatttaaaagacatggattgggtgaagcatctcgatccaaacctcgatccgattttgaaggatgaaaaaggcaaagtatatgcctaccctttcaatcaggcaaaagacgggatcgtctacaatgccggtttcttgaagaaatacggtctcaagcctccgcagacgttggacgaactgatgcatgcgctggaaacgatcaaagaaaaaagcaacgggagcgtcattcctttttggtttgccggttcagataaaggcgctttagctcagttttatgatcagcttgccaccccgctgctcatcacagatgatcgccgcaatgaaaaaaaagctttggaaaacggcacattcgactggtccgactacacacttctcgcagaaacctttaaagagatgcaggaaaagcaattgatcaataaagatatcctgacggcaaaaccgtcgcaattggtcgaattgatggcgcaggaaaaaatcggttttaccctctcagtcacgtcgatcggccctgatacgagggaagtcaatccagatatccagttaggcgtgatgccgacgcctgccgtttatgaaggcgacaaaccgagctggattggaggagagcgccataccgttgctgtctggaaagactcagaacacctcgaagaagcaaagcggtttatcgaattcgccgcacagcccaaatacgtgaaaaagatcgccgaagccacctcatttcctcaggcattaaccaacacagaagctgaaaactactattctaagttttatgatcaatatgaagaaatcaaaatcgaaccgtactttgaccgcgtctatctcccgagcggaatgtgggacgtcatgggaacgacgggacaggaactattggccggtacgttaacgccgaagcaggtatcggaaaaaatgaaacaggaatacagcagattacaagaacaatag

SEQ ID NO: 1269 - DNA, 918 bp, Bacillus licheniformis
atgagcgaattagctaaagaaaaaagtctgactattgtgaaaaggagatatgtgaggaaaaatggatcgctctggtggatgtatcttcccgccttggcgcttgtatccgtctttatgatttatccgtttgcgagcggcattaaaatcacgttcacgaactggaacggtttctcacagtcgtatgactggatcggctttgcccaatataaacggatgctggccgacccggcgacatggcttgtcgtcaaaaacaccctcctgtacggattgggcagtacggttttccagaatgtcatcggtcttctctatgccctcctgctgtttaaaagcatcaaaatgaaagcgctgacaagaacggttgtctatttgcccgtcatcatcagcccgctgatcatggggtatatctggtacttcttcttctcctatgaaggaggcgccttgaacgatttgctgaaactatttggagcaggtcctgtcaacgccttgagcagcccggaaatcaatccgtggatcatcgtatttgtcaattcctatcagtttgtcggtatagcgatggtcatttatttagcaggtctcggaagcgttccgaaagatttttatgaagcggcgcaaatcgacggagcaagcggttttcagcaattttggaagattacgctgccgctgttgatgccttctgtcacgatcaacatggtcatcaatatcatcggcggactgaagctgtttgatgtcattttagcgctgacaggcggcggtccgggaaatgcttcgcaatcgatgtcgacttttatgtacgatctgtattttaagaggcaggatgccggctatgcagccgctcagggggttttcatgtcggtgttgatactgctaatcagctttacggctctcatctattttaagcgcaaggaggtcgaagcctag

SEQ ID NO: 1270 - DNA, 831 bp, Bacillus licheniformis
atgaatcgccaagagaaaaagaaacgggcgctgtggactttgctggctgcatggattaccgtttttcacctgattccgttttatattttgctgacgacggcgctgaaagcaaagggagatttcagttcaaaatggaagttcccggacgaaatcagcctcggtaattttgcagaagcatgggataaagcaggtctggccggctcgtttttcaatactgctgtgatcacttttgcttcggcggctctgctcattgtgatcggctctctggcggcatatccgctcgccaggcgcagaacaaagctcaatcaagccgtttacttcctgtttatcggcattatgatcattccgccgctgacatccatggttcctttatacaaaatggtggtggagcttggcatgctgaatacgcttgaaatcgcgatattgaataatacggcggcttatatgcccttgacgatttttttgtatgccggatttatccggtcgacgattccgaaagagcttgaagaggctgcgagaatcgacggggcgagcacggcggggattttcttcagaatcgtctttcctttattaaagccggtgactgcgacgatttgcattattgcctgcgtattcatctggaacgactatcagttttcgatctttttccttcaagacaaaagtgtgcagactttgactgtagcgattgccggcttctttgggcaaaatgcgaacaacctgcacttggtggccgcggcttcgctgatggcgatgctgccgatgacgattctatttttattcctgcaaaagtactttataaaaggattatcagcaggagcgctaaaaggctag

SEQ ID NO: 1271 - DNA, 1299 bp, Bacillus licheniformis
atgactaaaattgcttttatcggagctggaagcacaatttttgcgaaaaatgtgctgggggactgtctgatggttccggcggtcaacggatttgaatttgctttgtatgatatcgatccgaagcgcctcaaagaatctaaagatatgcttgagcatttaaaaaaccgctataatgacacggtatcgatccgcgcctatgacgacagaaaggaagctttggcgggagcgaaatacgtgatcaatgccattcaggtcggcggctataaaccgggcacagtcatcgattttgagattccgaaaaaatacggcctcaagcagacgattgccgatacggtcggaatcggcgggatattcagggcgctgcggacgattcccgttttattggatatggcaaaagacatcgaaagcgcggcgcccgacgcctggctcttaaattacacaaacccgatggcttctttaaccggtgcgcttctccgctacacggacgtgaaaacggtcggtctctgccacagcgttcaagtatgcacaaaagatcttttcaaatccctcggcatgaagcatgaacgaatcgaagaaaaaatcgccggcatcaatcatatggcctggcttcttgaagtcaagcaagacggaagagacttgtatccagaaattaaaaagcgggcaaaagaaaaacagaaaacgaaacatggtgacatggtcaggtttgaactgatggataaattcggctactatgtgaccgaatcgtccgaacataacgcggagtaccacccttattttattaaaagccgttatcccgaactgattgaagaactgaatatcccgattgacgaatatttgagaaggtgcgagaagcagattcaaaattgggaaaagatgcgcggcgaaatcgtcggcaatcggcatttaacccacgagcggtcaaacgaatacggctcaagaatcatagaagcgatggaaaccggccagccgtttacattcggcggtaatgtcttgaataaaggattgattacaaatcttccggaaaaagccgtcgtcgaagtgacgtgcgtcgctgagcggaaccggatcactccgtgctacgcgggcgagctgccagaacagctggctgctttaaatcgcaccaatatcaatacacagctgttaacgattgaagcggcaacaacaaaaagaaaagagcacatttaccatgctgcattgcttgatccgcatacggctgcggaattatcgatggatgatatcgtaagcatgtgcgatgaattgatcgaagcacacggcgactggctgccggaatttgaataa

SEQ ID NO: 1272 - DNA, 1155 bp, Bacillus licheniformis
ttgagggaaaaaagagatttccttcgggatatattattgatattgatcagcagttttgggggatttcttctctcattgaccggcatgacaatcggctggatggtcggaacaatgaccgccgccgcttgtctgtcgctgtttcgcccgtcaccgttgaaagcggcggtcagacaaaacggcatccaccatggatggcttcagttcggccaaatgctattgggaattgagcttggccaaaaaatcaacatgtctgtgatttcgatctttaaggaaaattggctgattgtcggcgtcatgcttctcctttccgtcgtgttcgccatgctgtcgggctttgtcttgtggagattcagcaagacagatatgctgacgagctttgtgggaacggctcccggcgggctttccgcgatgccgggcatcgctcaggaagtcggagcgaacacggcaatcgtcagtctcgtgcagatgatacgtgttcttctcgtcgtcatgaccattccctttttcgtttttttcataaatgcgaagcatcccgacgcccatgctgccggcagccaagtgatggccgcgggaacatcggcatttgaagcgcctcatatcgcatggactgcgttgatcgtgctgggcggattcggggtatgcaaagctatgaaagcactgcggtttcctgcgccatggctgctcggaagcatgaccggcgcggccgttctgcaaatcgcgggcgcctcaatgaccggactcagcacaaccgcctggtggccccacggcttttcagtgctgtcgcaaatttgtctcggcgcaacgatcggttcaaagatcagcaaagatatgtttatcggcgtcagaaaaacgctgatcgtcgcacttgccagctccgtcggactgatcattgcaatgattttaagcgccgccgtcaccgccaaagcggcaggcatttcgctgacaacggccatattggcgtttgctccgggaggaatcgcagaaatggcgacaacgtctgtcacgcttcacgccgactctacgttcgtcgtcgctgtccaagtgttgagggtggtgctcgtgatcgcaatgcttcctccattcttccgattgcttcatcaaaaatcggaaaaatatacacaccctcgcgtgaaaaaagccagagttgaaggctga

SEQ ID NO: 1273 - DNA, 234 bp, Bacillus licheniformis
atgaaacatcccaaggaatcattcaccaaagtcaaatcgtatcgaccgtttcacagcgcctttgatccgtgtccgccgatcggcaaaagatactacagaacccctccaaatctatatctaggttttcagccccgcggccttccgcagttttccccgatggaggcgctgcaaaaagggacgctttggcccgtattttacgatcattatgaaaatccgtatgaagatgggaggtaa

SEQ ID NO: 1274 - DNA, 264 bp, Bacillus licheniformis
gtgacgaactctttaccgcaagactattataaaaggcttcatgaaattcaggctgttgattttgtcatcgttgagctgatgctataccttgacacacatcccgatgataccgatgccatcaaacaatacaaccagtatgccggattttccagaaaactgaaagcgaagtttgaatcaaaatacggccctttgattcaaggaagcccggatcagacggaatcctattggagctggaaaagaagtccttggccatggcaagtttaa

SEQ ID NO: 1275 - DNA, 570 bp, Bacillus licheniformis
atgtggctttatgagaaaaaactgcagtatcctgttagggtgagagaatgcaatccgagacttgccaaatttttgattgagcaatacggcggagcggacggcgaattggctgcggcgcttcgctatttgaaccagcgctacagcatacccgataaagtcgtcggactgctgacggacatcggtacggaagagtttgctcaccttgaaatgattgccacgatggtatataaattaacaaaagacgcgacgcccgagcagatgaaggaagccgggctcggcgatcattacgcagaccatgacaaagccctgttttatcataacgctgccggcgttccgttcaccgctacatacatccaggcaaaaggcgatccgattgccgatttatatgaagatatagcggctgaagaaaaagcgagggctacgtatcaatggctgattgacatgtcggatgatccggatttaaatgacgggctggcgtttttacgggaaagggaaatcgttcattcacagcgcttccgcgaagctgtcgaaattttgaaggaagagcgcgaccgtaaaaaagtgttttaa

SEQ ID NO: 1276 - DNA, 1620 bp, Bacillus licheniformis
atggttacattaaaaaaacaaacgatcggcgggcttttaaaatcaaccgccggccggtttccgaatcatgaagcggttgtatattctgagctcgatttaagatactcgtatcaggagcttgttgaagaaacttctaaaattgcaaaagggctgctcgcgctcggcattcaaaaaggggagcatgtcgccatctgggcatccaatattccggaatggattctgctccagtttgctacggcaagaatcggcgctgtgctcgtcaccgtcaatacgagctatcaggcgagagaactcgagtacttattggaacattccgattccaccaccctctttctgatggacggctacaaaggaacatcctatatcaatatgatcgatgagatcatgaaaaatcctgaaaagctgccgaagctgaaaaatctcgtctaccttggcaagaacgagacccctgaacatatgacggcttttgccgagatcgctaaaatgggcgaaacggtctctgatgccgacctttttgaacgagagcagtcactcacacacgatgatgtgattaatatgcagtatacgtcgggaacgaccggctttccaaaaggtgttatgctgactcactacaatatcgtcaacaatgcggcgatcgttgccgacagaatggggctgacgagcgaagacaggctgtgcatcccggttcctctttttcattgcttcggctgtgtgttaagcacgcttgcctgcgtcgcgtcaggcgcggccatgctgccaatcatcgaattcaagccggacatcgtcctgcaaacggtcgaaaaagaaagatgtacagggctgcagggtgtaccgacaatgtttatcgccgagctcacccaccccgatttcgcaaactatgacctctcttctctgcggaccgggatcatggcaggctccccgtgccctagagaagtcatgaaaaaagtgatgaagcaaatgaatatgacggatatcacaatcgcatacggacagacggagtcttcacccgtgattacgcagacaaccgtcaccgacacgatcgaacgccgcgtcgagaccgtcggaaaagtgcatccgcatgtagaaatgaaaatcgtcgatcctgacaccggggaaacgctcggcccggatgagcagggcgaactgtgcacaagaggatacctcgtcatgaaaggctactataaaatggatgaagccacaaaaaaggccatcgatgaagacggctggctccataccggagatttggcagaaatggaccgggacggatacgtgaggattaccgggcgcttaaaagatatgatcgtccgcggcggggaaaacatttacccgcgtgaaatagaggaattcctttatgaacatgaggatattgtcgatgtacaggttgtcggcgttccggatgaaaagtacggggaaaaaacggctgcctttattaaatgcaggccgggcaaaaagctgacgctcgaagacgtcagagatttttgcaaaggacagctttcgtattataaaattccggagtacgtatttctgatcgacgaatacccgctgaccgcatccggaaaagttcaaaaatatgtgctgcgcgaccgcgcagcagaactgcttgcgagcccggtgcagtaa

SEQ ID NO: 1277 - DNA, 1212 bp, Bacillus licheniformis
atgaaccgtttaaaacaaaggtacggttctcccgtgctgatttgcttcttcggagagttcctgaccggaataacgggagccatgctggcccctttcctccttttttatctgtatgatgtgcttggaactggcatattgccggtgatgctcgtcatcggagcaagaccgctgaccgaggtcgcggtgacgcttgtcgcaggaggactgacggatcggatcggaagacggaaggtgatcctgacggcgctcgcctttcagactgtttctgccgccggttttatgatggcagatcacatttggctgttcgctcttttttatgtgctgaacggcatcgggggagctttgtacatccctgcgcagcgggcccaaataacggacagcaccgaaagcgggcgtcgctctgaagcgttcgctgtccttcatgccattgaagggttgggcgcagcggtcggtccggccgccggacttgcagtctattcctatcagccaagcctgatgttcggctttcaggcatgtgcgttttttctctattggcttgttgtttattttaaaatgcccgaggtatggcggtcaaaaaggcaaaaggagattttggagagggaaaaacttctttccgcaaaaaaggtattttttcagcaccgtccggttctgtccttgatgttcttgtcggtccccgtcagcctgttctatgctcaactggagtcaaactaccgcctttatctcgaaactctttttgaagatttcctattcatcttgactgtttatacagtgtgccgcgcccttcttagcattacgatgcaaattccgcttgtcaaatggacggaaggactgaacatccaaacggtcgtttccatatcatatgtatgctacgctgtggcagcaattggtttcgctttttcatcatcgatcttttggctgctctcgactgccgttttatttacggcggcagaaagcatgctgctgaatcacatgcaaacctttgtctcgcgccttgctcccgatcatatgcggggcagatattttgcatttttcggcctgcattgggatatttcccggacaatcggtccttttttaggcgggatgatgttcatcaagttcggcggggcagcgctttttcttgccattgcagggatcatggctctcggggggattgcacaatatcgagcagtgtcccggttaaaaaaactagtcctttatagtacctggtactag

SEQ ID NO: 1278 - DNA, 1764 bp, Bacillus licheniformis
atgaaatcgatcgaacattacatggaacttaccgcgggaattaaatgcgaaagcgaaggggaggcagaagagatttcagtcagtgaaatcgcggatattctgtattgcacaccgaggaacgcaaaactgattttagcgaaacttgaaggtttgcagtggattgcttggaaaaggggaagggggagaggaaacaaatcagaaatccgctttttaaaagaaccttgtgaactgctgcttgaaacggcgaaaaatgatacgaaagaaggtaaaatcgaccgggcgagacaccttctcgaagcatatcagcattcgtgtccggacgcattgccgtcatataaagagtggcttgagcgcgttttcggctttcagaccgaatcggagggcagcaagcaaaaagatgtgctgaggctcatgaccgcgatggagccagagcattttaagcgtcttgatccgtgccgtatttatctgcgttcagagagccatgtcgttaagcaggtatgtgatacattgatccgttttaatgaaaaggaaggaggttttatgccgcatcttgcccaccactgggaatgtgacgccgaccaaaaaacgtggacgttctatttgaggaaagggatctatttccatgatggcacaacattgacagctgaggatgttaaatactcgtttgagcgttttatgctggatgatgaaaataaatgcaaatggctcgtagaggatatcggaaatgttgcggtcagggataaatatagttttgatatttgtttaaaggcaaaaaactcgctgtttttgcatcatctttgcgatgaaaggctgtctattttaaaccgccatcagaatgacggactgttgatcgggacgggtcctttcagacttgtccgccgggatgaccggattctcgggcttgaagcgcatgagcgatattttcaaggacgggcttttttagaccggatcgaactatggtatatggatggcaatttttctcttgtcgactacggtttttatatggaaaaagaagaacaaagtcaggttttcgatgaatggcacgaggaaaggaatgttcagtacatctcggtgaatgcaaacaaatcggggcctctcaagcataaggcgttcaggaaggctttgcggcaaagcatttccccttcacatatggtcagtgaattagccggacaacggacggctccggcgggaggctttctaaaccgggatcttccgcctgaatccggggacgacgacatcggcaagctgcttatggaaggccattacaaaggcgatccgcttcggctttatacgttttccgaaccggatcaccgggaggatgcgtcatggatccaaaagaggtgcaggcggtacggcatcgcactagaggtttgttatatgaaagcggatgagctcatgaaggaagaagtgatcgcaaaagccgatttgattcacgacagtgcgacattcggacgttcggaagaaatgagctggctgcacctccttttaacggaaaacagctttttacacgtccatatgccgggggaatggcagaggaagtccgccttgatgagggatcagcttcgtttcattgatgagcattccaagcggatcagccttctgtgtgaggcggaccgcgccttggcagaagaggtgtacacgattccgctatatcaaaacaatattcgcgttaaagcgggggaagccattcaaggcattgtgcttaacgaagaaggatggattgatttttacggcatctggtacaaaaaagaggctcttctgtaa

SEQ ID NO: 1279 - DNA, 1242 bp, Bacillus licheniformis
atgaaattgagattcggtttactttttgtcatgcttgttttcgcgcttccgcttgcggcatgccaaaattccggctcgggaaacactggcggacatgaggagcatcatacaaaggatcattcggagatgaaagaaaaagacgctgattctcttccgagtgatttcaataagcgggccgaagaggggctcctggtgaaaaacacaaagaactcgacaaggcttgacgcgaatacaccagaagacatgagcatcaaaacctctcaaacgatatggccggccactcataaacaaaacaggccgggcgcagtgattctagtttcgggcggatcatggcagacagctcttgcatcagcagatttgatccatcatccaaataacgggcctgttttaatcgcggaaaaagggaaaatctccgggcaaattcagaatgaaatcaaacgcttgaacccgacgggcacttcagacgggacgcaaatcatggctgtcggagaatttgattcaaaagcgcttcaagctttgaacacttttaaaataaaagagctcaaagggaagaacgcggctgatctggcaaaagagattgacaaagaatacgcggaggcagccggtgaatatccgaaaagcgtcatcatcggatcatccgaggatgatgcagaactttattcgctcccggctgtaaactggatcgcccacatgcctgagccgatcctgtacgtgaacaaaaaaggcattcccgaagagacggctgaagcattaaagaaaagggacgccaaagcaaacatctatattctcggccctaaaaaagcggtttcggaaaaaacggagaatgcattaaaggaatacggaacagtcaaaagaatttccggagacactcctgtcgcaaattcgattgcatttgcgaaattcagggataagaacaccggctttggctggggcatcacagatccgggacacggactatcctttgcatcaaccgctgcgcccgagcttgcgcttgccggagcgccattttcccatttgggaaaacacgctcccctgcttttactcaaaaatggacaggcagacagcacactatacagctatctgtccgagatcgagccttcatttcatgacaggccgcaagacggcccatacaaccatgcattcattctcgggtcagaaaatgagatttcatttcggacacaaggcattcttgatggcatattggaaattaagtcagcggatggaggacattccggtcattaa

SEQ ID NO: 1280 - DNA, 1368 bp, Bacillus licheniformis
atgaaaaagatttcatttgagctcgcaggttcatttttcgttttaatccttttcatcgaagccgtcctttttgccgcgctgtatacaacgattgtcaacacgagaataaacgaagaaataagcgcgcttcaactaagaggcaacagccacagagacgtcctcgaaaagcattttgacaaaaggacgatagaccacgtcaccctgatggagactgaagcccggacaaacgtgatcatcacggaccaaaacagacgcgtattggcgcagtctgccccgggagacatgacggaacaccttcatttcgaagaacagaacatcccgaggaacgggaccgctttatcttcccattggaatacatcaaagtacatttgtacgatcagtccgatcatgaacggacgggaaacggccggctacgtcttcatgtatttggagacctcctcgataaaagccttggtggcaagcattacgaagcggtttttcctcagcttcggcttaaccggcgtcttaacggtcgcagctattctttggttcagccgtgttttagcgaagccgattattaaactgaaggaggcaaccgaaagcatcaaaaacggtcaagcttcgattccgcttgatatcaaaaggaatgatgaactcggagagctcgccgcatcaatcgaaagcctttcctcaaatctcagcaggcttcaaaaagagcgaaacgattttctgtcaagcgtcgcccatgagctgcggactccgatcacatatataaaaggctacacagatgtcgcgatgagagataagctcgaaccgcaagccagaaatcagtacttgtcgatcatcaaagaggaagcggacaatttaaacacccttgttgacgatttatttttgctgacaaaactgaaacagcccggatttcaaatcaataagaaacaggttcacctttacacattcgtgaaaaaagaaattcagaaagcggcggtcgctttttcggaaaagcgaatcagcgtttcgttcgacatcccgacggatctttatgtcacagtcgacgaggtccgcttttcacaagtgatctcaaatttgctgaacaacgcccgccaatactccgatcctgaatcaacagcggccgtcaccgcatcaaaattggaggaccaggtcaagattacggtagcggatgaaggctgcggcattccggaagaagaacgggattatatatttgagcgcttttaccggatcgataaatcgaggtccagacaaaccggcggtaccgggctgggtctggccatcgtgaaagaaatcgtcgagcttcatggcggtcagattgcagcgaaaaacagaaccccgaaaggaagcgaatttatcatcacgctgccttccgatgtgtaa

SEQ ID NO: 1281 - DNA, 675 bp, Bacillus licheniformis
ttgaacgtgctgcttgtcgatgatgaaaaccggatgctcgatctgctggagctttatttagagcattattcgtgcacaaaagccgccaccggaaaagaagccctggacttaataaaaatgcgcaatttcgatcttgtcatcctcgatatcatgatgcctgaaatggacggatggacggtttgcaaagagatccgaagattgacaagcattccggttatcatgctgacggcaaaaaacgggcaggatgatattgtacgaggcctgaactgcggtgcagacgattatttaacaaagccgttcagcgaaaaagtgctgcttgccaaaatagaagccgtcctgcgcagaacccgccgatttcatgaaatcaggttccgcggtttaatctggaataaacagcatcataccctgcatgtcaatcaccgtgaaatcagcattacgccaagtgaattcgatctgcttggaacactcttagaccatatggatcaagtgctttcgagagaccaattgattgagaacatctggggattcaactctgatatcgagccccgcaccatcgattcgcacatgagaaatttgcggcaccgattgaaaaaagcgggctttccggttgaagaccatctccggaccgtctacggcgtcggctacaaatggacaagcaaaggaaccggagcatga

SEQ ID NO: 1282 - DNA, 439 bp, Bacillus licheniformis
atgtggtatgttcagccgtatcatcccgcctatcccgccaggcaaaacaacaggctgatcaaagatctagaaaaagcggtaaacggagagcacagtgcggtcgtctgctaccaaaaaatcgcacaaaaggccccggatgctgaggcaaaacagcaaattttagaaatcagacaggacgaaatccgccactttaatgcgttcctggcattttatacgtctcttgccggccgaaagcctgacatttccattacggagccttgtccggaacagtattggaacgcgctggagtccgcattaaaagacgagcaggaaacggttgatttttatttggacatcgcagactgtcaaagaccgggcgatacgggatgcgttcaagcgggcggcagctgacgaacaaaaccatgcagtctggtttttatacttcttgtcaaagaggtga

SEQ ID NO: 1283 - DNA, 795 bp, Bacillus licheniformis
ttgaaaaaggcaatattgacggtcatagctgtattgacgtcggttgttttgttcgccggctgccaagcggaaaaagggggatcagccaaggggcagtctgaaaaagttcaaattacggtttccgcggctgcgagtctcaaggatgttttaacagaactttcctccgtctatgagaaagaccatccgaatgtctctataaagtttaattttggttcatcgggtgcattgcagcagcagatcgaacagggcgctccggctgatttgtttttttctgccgctgaagacaaatttaatagagtagttgatcaagggttaattgacaaaaaagactctgtcaagctggtcgaaaacagtctggtgctgatcgtgccgaaaggaaaaagtcagcatgtcaacagcttcaaggatttggcggatgacaaagtcgaaaaaattgcgatcggcaaacctgaatcagtgccagccggaaaatacgcaaaagaaacgttgacgaaccttgacgtatggtctaaagtgcaatctaaagtcgtctacagcaaagatgtaaggcaggtcctttcttatatcgaaacaggcaacgcggatgccggaatcgtttaccggacggacgccctttcatcagatcaggtcgagaccgtagagacggcgaaaagcgatctgcatacaccgattgtctatccgctcggaattgtgaaaaatacaaagcacagggaacagtctgaggaattttatcaattcctgcaaagcgaccaagccgtcaaggcgatggaaaagtacggatttaagaagggctga

SEQ ID NO: 1284 - DNA, 657 bp, Bacillus licheniformis
atgcttgaggagttcttatccccaattgaaatttccatccaagtatcagccgcagcgggcatcatcgccgttttgcttggaactgctgcagcgaggctcctggcgaacagaaactttaaaggcaagtccattatcgagacggtgatgatgctgccgctcgttctgccgccgaccgttgtcggattttttttaattgtgatcttcggaaggcagagtgtgatcggacgcttgattgaaaacgtgtttcaagcgccggttatttttacctggtgggcagctgtgatcgccgcggcggttgtcgcgttcccgttaatgtatcagtctgcaaaatccggatttctggctgtcgaccgcgacatcgaggatgcagcgagggttgacggagcaaacgaatggagggtgttcctctttgtcaccgttccccttgcatccaatggaatcatgacggggattgtgctcagctttgcgagggcgcttggcgagtttggcgcaacgctgatgtttgcgggcattatcccgggggtgacgcagacggtgccgacggcgatatacttggcgatcgattcgggcaatatgacgctggcatggatgtgggtcgcctctatcgcgatcatctcgtttttgatgctgttttttgtgcagttcaagcaaaaatag

SEQ ID NO: 1285 - DNA, 3501 bp, Bacillus licheniformis
gtgggagcagtatttttatcaggcagatccgggagtgggaaaacgacctttatcctgaatgaaatcagagaaaaacttcgcgatgaaccgctcggaaaaccgatcatttttctagtcccggatcaaatgacgtttttaatggaatacgagcttagcaaaacaccagatttgggcggcaccatccgcgcccaagtgtacagtttttcacggcttgcctggcgagtgctccaacacaccggaggcatgaaccggccgttcttgacgggaacgggcattcagatgctgctgcggagactgattgaagagcataagggcgagtttaaagtctatcaaaacgcaagcgataaaagcggatttacggagcaggtggaacggatgctgaccgaatttaaacggcactgtctgccgcctcaaagcatccgggatatgatggaagggacaggcaagtcggaatacgaagatgaacggattctttccgataaattgcacgacttatatattttgtacagcaagcttgaggaaaatctggagaatcaatatgttcaatctgaagattatttgacccttttagccgaacagattccgtatgcggaagagattagaaacgctgccgtttacgttgacggatttcaccaattcacgcctcaggagatgagcgtactagaacagctgatggtacatgccgaagagatcacgttttcgctgacggcggataagccgtttacggcaaacagcccgaatgatctccatctgttcaggatgaccgggaaggcgtactatgacctttaccaaaaggcgaaggaactcggccttgatccgtctgaagtgcggctggaagaaacgaaacggcaccggcatcatccggagcttcagcatcttgaacgctattttgatgaacgtcctgcaaaaccgtatcccggacagacggaatcgctccgcatcatgcaggcgtcgaacagaagaaccgagattgaaggaattgcgcgcgagattcattctttaatccgccagggccggttccggcttagggatattgctgtcatcgcccgcaatgttgaagattataaagatacgataaaagaagtttttaaagactgcgaacttccttttttcatagacggcaaggaatcgatgcaaaatcatccgcttattgagctgatccgttcgacgcttgatatcattaaaggaaattggcggtatgaagccgtgttccgctgtgtcaaaacggagcttttattcccggaaggacagccgaaggaacggctgcgcgaacagattgaccagcttgaaaactactgtattgcttatggcattaaaggagacagatggacaagcaaagatccgtttgtttacagaagatacgcttcactggatgaggattttgccaagacagacaaagagattgaaacggaaaatatgctcaatgaactaaagggctggatcgttccgccgattcacaggctgcagaagcgattgaaaaaagctgaaacagtaagggaaatggccgaagccgtctacctttatcttgaagaagccgatgttccgatgaagcttgaacaggaaaggcggctagccgaagaaggcggaaggattgccgagtcgcgccagcatgagcaagtatgggatgccgttattcaactgttggacgagtttgttgaaatgatgggcacagagcggatttcgtttgcgttatttcagcaaatgatcgaaaccggattggagtctttgaaattcgcgctgattccgcccgcacttgatcaagtgtttatcggcaatatggacctttcaaggatgtacggcacgaaatgtacatttctcatcggtgtaaacgacggcatacttccggcgaggcctgcggatgacggcgtgctttcagacgaggacagggagtggctgaaacgaaacggcgcacagctggcggcaacagggcgagagcagctattggacgagaattttctgatctatatgacgctttcaagcccgtctgaaaagctttatgtctcctatccgatcgctgattcggaagggaagacgctgcttccttcaacagtggtgaaacggctgaatgaactgttcccggacagcgaagaaaagatgctgattcatgaacccgagcagctggacgatgaagcccagcttgaatttctcgtgaataaaggcatcgccttgagccatttggcagggcagctcggcatctggacgaggcagtatgcgatcagcgatgtatggtggagtacatacaactttttaatgaatgagcctgaccgcatcttttctcaaaacatcctgtccagcctgtttttcagaaacaaggtcgaaaacctaaaccggcatgtgagccgcgatttatacggggagcacattcagggaagcgtgtcgcggatggagacgttcaaggcctgtccgttttcccattttgcttcgcacggcttaaagctgaaggaacgccaatttttcaagcttgaagctccggatatcggtcagctgttccactctgcgctgaagctgatttcagaccggcttcacgagcttaaactggattggcgcgacttaacgaaagcccagtgcgagactttgtcaagcgatgcagttgaacggcttgcgcctaaactgcaaaaggagattctgctcagttcgaaccgtcatcattatgtgaagcagaagctgcaaaaaatcattgccagggtatcgggcattttaagtgagcatgcaaaagcaagcggctttgcccccgtcggcatagagctcggattcggagggaaaggtccgcttcctccaatgcgtttcaccttgaagaacggttgcacgatggagcttgtcggccggatcgacagagtggataaagcggagagctcaaaagggttgctgcttaggattgttgattataaatcaagcgataaaggcctcgatttggccgaggtgtattacgggcttgccctgcaaatgctgacatatctcgatttgtcgatcacgcattcaaccgattggctcggcatgaaagcatccccggcaggcgtgctctattttcatgtgcacgatccaatgatccaggcttcagtgccgctcggccttgatgaaatagaaaaagagattttcaaaaagttcaagatgaaagggctactcctgggagaccaggaagcggtcaagctgatggacaccaccctggaacaaggcaggtcgaatattatcagcgccggtttgaaaaaagacggctcgctccgttcggattctgacgttgttgcagaagaggattttcatgtattgaggcgtcatatccgccggacatttcagcaggccggcgaggagatcacagacggcaaagtgtcgatcgagccttacaagctaaaagaccggacaccgtgcacatattgttcataccggtcattctgccagtttgacgaatcgcttgaggaaaacgaataccgaatattaaaacctgaaaaagacagcgtgatattggagcggctgaaaaaggaggatgaggcagatggagatttctaa

SEQ ID NO: 1286 - DNA, 3693 bp, Bacillus licheniformis
atggagatttctaaaccgaagggcagcacctggactgatgaccaatggaaggcgattgtctcatccggccgggacattttagttgcggcagcggccggttccggaaaaacggccgtgctggttgaacggatcattcggaaaataacggatcaggaacgaccggtagatgtcgacaggctgctcgtcgtcacctttacaaatgcatctgcggctgaaatgaagcacaggatcggcgaagcgctcgaaaaagagcttgccgaaaatccgggatcgcttcatttgcgccgacagcttgctttattaaacaaagcgagcatatcaacattgcattcattctgtcttcaagtcatccgcaaatattactatttgatcgatgtcgatccggctttccggatcgccgatcagacggaaggcgagctgctcggcgatgaggtgctggatgaactgtttgaagaagaatacaaaaaaggcaatcctgccttttttgaacttgtagacagatatacgacagaccgtcatgacctcgacctgcagcatcttgtcaagcgggtctacgaattttcccgttcgcatcccgatccggagggctggcttcactcattggctgaactgtatgacgcggcttcggatacgaaggttgaggctctgccgttttattcttacattaaagaagacatcgcactcgttctggaaggtatgcggcaaaagctgacgcgcgcgcttgatttgacaaagcagcccggggggcctgctccgcgcgccgaaaattttctcgatgatttagcgcagatcgacaggctgattcagcagcaggatgatttttcggccctgcatgagcttgtaccgaccgtttcgtttcaacgattgaagccatgcaaaggtgatgagtacgatcccagattggttgatgaggcggcagacctccgcaacagtgcgaaaaagcagcttgaaaagctgaaaagcgattatttttcgcgaactccggagcagcaccttgagagcctgagggaaatgaagcctgtcattcagacgcttgtccagctcgtgctggagtatggcaggcggtttgcggaagcgaaaaaggaaaaggcgatcgtcgatttttcagaccttgaacacgactgccttgcgattttatccgtgaaaaatccggcgggcgaggccgtgccgagcgaagcggcgaagttttaccgccatcagttccacgaagtgcttgttgatgaataccaggatacgaacctggtccaggaagcgattttaaagctcgtcgccaaagaggagcatgaggggaacctgtttatggtgggcgatgtcaagcagtcgatttaccggttccgcctggctgagccgcttttgttcctctcgaaatataaacgctttacagacgatggctcgggttccggccagaaaatcgatttaaataaaaacttcagaagccgttcagatattttggacagcacgaactttttattcaaacagctcatgggagaaaaagtcggggaagtcgagtatgacgaacaagccgaattgaagctcggcgcctcttatccgccgaacgaagcgacaaaaacggagcttctgctcatcgaaaccccgagcggcgcgccgggtgaagaggctgaagagcttgaggcggtccagcttgaagcaagagcgatggccgggcagatccgcaggctgattacagaaaaatttcaagtatatgatgccaaagcgaaagcgtcgcgaaacatccagtaccgtgatatcgtggtgcttttgcggtcgatgccttgggcgcctcaaattatggacgagtttaaacagcagggaatacccgtatacgcgaacctctcaactggttattttgaggcgacagaagtatcggtcacactgtctttattaaaaatcatcgataatgcctatcaggacatcccgcttgcgtccgttctcagatcgcctgttgtgggtcttgatgagaatgagctttccttgatcagaatcaaagataaaaaagcgccgttttacgaagccatgaaagcgtaccttgctgcagcagacggcgatgagaggctcagcgaaaagcttcgccgctttgacggtctgctcaagaagtggagagcttatgcgaaaaaccactctgtagcagagctgatctgggaaatctaccgggatacgaagtatttggattatgtcggcggaatgccgggcggaaaacagcggcaggccaatttgcgcgcgctttacgacagggcgagatcctatgaagcgacatcattccgcggcttgttccgctttttaagatttattgagcggatgcaggagcggggcgatgacctcggaacggcaagggctctaagcgaacaggaagacgttgttcggctgatgacgatccactcaagcaaagggcttgaatttcctgtcgtatttaccgccggtctcggacggaattttaatatgatggacttgaacaaatcttatctgctggataaagagctcggttttggaacgaagtttatccatccgaagtggcggatcagctatccgacgctgccgcttatcgcgatgaagaaaaaactccgccgcgagcttttatcagaggagctgcgcgtcttgtatgtcgcccttacccgggccaaggaaaagctgtacctggtcgggacggcgaaggataaagaaaagctgcttgccgactggcggacacaagcggccgggtccgagtggctgctcccggattatgaacggtttcaggcaaaatcatatctggatttcatcggacctgctttgatgaggcacagagatatggatgaatccggggcgccgcctgtgattgatgagatccgcgaacatccggcgcgctttcaggtcagctggctgtccgccgcggatctacaagctgaggctgtcgatcaggccggtgaagaaagacacgaccggctcgtccaaattcaaatgggccatgcgattgaaggcgcctttgaatatgagcagcaagtcagagaacgactggcatggtcatatccatacaaggacgccgccaaagtcagaacaaaacaatctgtctcagaaatgaaacggcagaaggaatacgaggatgaatacggcgaccgctcgcttattcgtccatcacaggaggctctcctgtttaaacggccgtcctttatgatggcaaaaggcctgaccgcagccgaacgggggacggcgatgcacaccgtcatgcagcatattccgctgacccgtacgcctgaaaagaatgagctcagccgccttctagacaggcttgttgagaaagagctgttaacagaagaccagcgggcagcgattgaagaagacgacattcttgcattctttgatacggaaatcggacaaaagcttttcggcgcccgccgcgtcgaacgggaggttccctttaacatgacgctgtccgctaaagaggtttatccggatcttgagtcagccgatgaacctgttttgatacagggaattatcgactgcctattcgagacggaggacggtttttaccttctagattacaaaaccgaccggatacacggaaagtaccggaacggcttcgaaggggccgagccgattttaagaaaacgttacgaaacacaaattcagctttacgcacgagccgttgaaacgatgattaaaatgccgctcaaagggcgcgcgctgtacttttttgacggaggacacgtgctcttattttaa

SEQ ID NO: 1287 - DNA, 1182 bp, Bacillus licheniformis
atgcgaattttacatacagcggactggcatttgggaaaaacgcttgaagggagaagccgactgaaagaacaggaggattttcttgaagagctcgcaaggatcgtaaaagatgaaaagatcgacgctgttatcatggccggagacgcttttgacacagtgaacccgcctgcactggctgaacagcttttttatgaaagcctctcagccttgtctgacaaaggaaaccgtccggtcgtcgtgattgccggcaatcatgacaatccggaccgcctttccgcggcctctccgttaacgacagaccacggcatccacttgatcgggtacccgaggactgcgccggttgacatagaagtcgcttctagtggggagatcttgtcagtcgcggcgctcgcctatccttccgagtccagactgaatgaagtgctgtcggagacatttgatgaaaagctgctgcgcgaccagtatgatgagaaaatcaagcagacctttcagcgtatgtgcagcaaggcgagaaaggacgcggtgcagattgcggcaagccatatctatgtggccggtggcagccagacggattccgagcggccgatcgaagtcggaggcgcatatacggtcgctgcggaaagcctgccggaaaacgccgcatatgtggcgctcgggcatcttcatcgcccgcagacgatcaaaagggctcgcacgcttgccagatattcaggctcaccgcttgcctacagcttttccgaagcgggatacgcaaaatcagtcaccattgtcgaagccgcacccggtcaaacggcatcatgggaagaggtccatttgacgagtggaaaaccgctcgtcaaatggaaggcggaaaaagggatgtcccaagtgtacagctggctggaggaagagcgggataaaaacgcgtggatcgatcttgaaatccatctgacagaccagctgtcgattgaagagattcaccgattgagaaaagcgcgtcaaggcatcatccatatacgtccggtttttgaggaagccgcatcggctgaagagaagacccggtccagaaacgttccgattgaagaacggtttaaagcgttttatgaaagacaaaccggcggagcggttcccgatgaggaaaccgtcaagctgtttctggaactcgcctcaggatcggaacaggaagagggggatgaaacatga

SEQ ID NO: 1288 - DNA, 3393 bp, Bacillus licheniformis
atgaagccgatttctctgtctattaagggcctgcacagtttcaggcaggagcaggtgatcgattttgagcgcctgtgcgatgccggtgtattcggcatcttcgggccgaccggaagcggcaagtcgtcgattcttgatgcgatgactcttgctttgtacgggaaagtggagcgggccgccaataatacgcacggcattttgaaccatgccgaagatgagcttgccgtatcgtttacgtttaagctgcagacaggccatgagacggcttataaagtggaacgggtctttaagcggacagacgccgtcaaggtcaaaacgtcgatatgccgctttattgaaatgaaagaggaacaaatcgtcctggccgataaagcgaatgaagtaaaccgaaaaatcgaagagctgctgggcttgacgatcgacgattttacaagggcagtcgtcctgccgcaaggaaaattcgccgaatttctttccttgaaaggagcggagcgaaggcagatgcttcagcgcctgttcaaccttgaacaatacggggacaggctcgtcaaaaaactaaagaaacaggcgcaaacagctcagtccagaaaaaacgagatgcttgccgagcaggctggattgggcgatgcgggggaagaggcgctgaagctggcggaacagcatctcgaagaagccgaaacccttttgcaaagcaagaggcgcgaacgagatgcggaagcgcagcgctttgcggagtaccaggaaatttggaatctgcagcaagaaaaagaaagctatctaaaaaaagaggcggagcttttaaagaaaaaggaacagatccgggaaaaagaaagccgcctgcatctcgctgaaacggcaaatacgctcaagccttatgcagacgcctttctggcagcgcgggaagatgccgagcgcgcacttcgggaagaaaaacaagcgcgggaacaattagaacaatacgaagagcttcataaaaaaacagagtgcgagtacgagaatttcaggcgtcataaaaatgaaaaagaaccggagcttctcaagcaagaagaacagctcaccgctttgaaggaaattgaaaacaagcggcttgccgcacaggcagaagctgagaaaaagcagcgggaacagcgcttgaaagaagaggaaatcaagcatgcggcagacgaactggccaaggtgaaaagcctgcttgaacgcgggacagccaagcaaaatcagctgaaagcggagctgaaatctgtccaggtatccagcgaagagcgcaaaaactgccggaaggccaatcagcttgcttttcacattcagcagcttaacagcgatgccgctttagaaaaaaaacggctcgatcagcaggaggcgctgatcaaagagctccggcaagaacagcaagcggtggatcagaaggtgaaggatgaaaccgaacgcatccaggcattgtttgccgctgtcgaacgagcgtatgcgctcgtttgcgaaacggacagatcgctctctgagaccgtccgtctcgcgactcaaaagaaagaagagattgtcgcaaaacggaaacaggcaaaccgtgatcagctggcaatcgaactggcaaagcagctcaaagagggtgagccttgtccggtctgcgggtctgtacatcatgaaatgcccgcgggtgacggtacggaaagcccgtcctttaaagagacggaatccgaactggagaaaacggaagccatcatcgcagaagccggcgcgctggctcaggagtttctctcagccaaagtggcgctcgaacagcagtccggccacctgatgagcgaatgcccgtttttagtcaaaagcaaacacgaactgcctgaaactgctgcatcgctagaagaaggcaccattcccgaacggttcagccgcatcagctttgaatggaaaggaatcagacaggatctcgccgagacaaaaagccggatgtccaagctccttcacacatataaagagctctgcaaaaaacgcgaccaaatcagcgaacgcctcagccatgaagaaaaagagcaaaacaggcttcaaaaccgcgtccgcgaattgaatgacgagttaaatgaacgccaaaaaagtttcggcgaacaattcggcggcctctcttatgaacaggctgaaaaatggcaaaaaacgattgaagaaaaagatctggccgcagaggaattcgaaaagcgaatcgaaacgagcgtcgaatttctcacggaacatgaacagcaaaaagagaagctcaccgagcgcttgtttgcgcttgataaagaaaagcttgaccttcattatgcggtcgaaagcctcaaaaaagacataaacgattatcaaaaagagctgacgggctatcccgatacagctgcgatcgacgaaaagcttcaagacgtgaaaacgcagttggccaagctgcatgagcaggaacagacgctttacggacggctcaaggagaccgaatccgaagtcagccgtttaagaggacagacaaaagggtgtgagctcgctttgcgtgaagcggaagcaaggcttgcgaaagcggcggacatctggcaggaaaaagccggaggcacaccgttcgaaaaggcctctgaagtgaaagcgagcattttggaccgcgatgagctttcccggctgaaagaagacattcaactgtattgggatcacacaaagcagtgcgagtccaatatcaagcgaattacggaaaagcttgacggcagatctgtttctgaagagaattgggaaaaagccgcagtcacgaaggaccaggcggaggaggcattcagcaaagctctagaggaaaggggagcggccggcaaagctctcgccgtcatccgcgagaaccataaaaggtttaaggaacttgaagcatcattggctgaatggcagacatacatcgaccgtcttgataaactccaagccgtctttaaaggaaacagctttgttgaatacttggcagaagagcagcttgaaagcgtcacaagagacgcatctgcaagactcggcgaactgacaagacagaggtatgcgattgaagtcgactcagaaggcggctttgtgatgagggacgatgccaacggcggagtcaagcgccctgttacgagtctgtcaggcggggagacgtttctgacttcactggcgcttgcgcttgcactttcggcacagatccagcttcgcggagagtatccgctccaattcttctttttggacgaagggtttggcacgcttgatcaggatttgctggatacggtcgtgaccgcattggagaagcttcagtctgacaatctgtcggtcggtgtgatcagccacgttcaggaacttcgggccaggctgccgaagaagctgattgtccatccggctgaaccgagcggcaaaggcacagctgtatcgcttgaaatgatttaa

SEQ ID NO: 1289 - DNA, 219 bp, Bacillus licheniformis
atgccagccattgtcggacccattaaaatcaatgaaatctcaggaggagtagtgaatttcggcgattctttttatctatctccaaaaagctcttcaaagtctgcactcggttctggtgctggtaatactggagatttctttatcgtcaacaatggtataaacgcgacaaattatatagacccggatgtaagcgaccagaatgttgtcggaaatgcataa

SEQ ID NO: 1290 - DNA, 387 bp, Bacillus licheniformis
atgattctcagaacgtccaaagtgaagtttttaaaagtacactctgtcggaataagcagcacgctgcaaatcggagacacggaagagcagtttctcaagtcaaaagttctcgccgttcaaagatacctttctcttttttacggaaatgaagggtcatttaaacaggatgattttcagcttttcaggcagccgatcccgcaacttctcccagaaaccggcgtatgctcggcttttttccatgagatccccttcatccgtgtaagggcgattaaaatcaacggtgtatcatcatcctccgttgctcaggtcggctcaacgcgccgcatcaatgccgactcgagagtcaaacatatcagaaagcttcctcctgcaaggaactcacaataa

SEQ ID NO: 1291 - DNA, 177 bp, Bacillus licheniformis
atgaattttaccgttgtgaaccgctgttttgatgtaggcaatattgtgatcaccggtgtgtccacttcttctgtttttctggtcggtgatacggattgcatttctctgtcatcgatttttgatacaccgcctgaatctctcattgtcgggccgtttgtcccgctggcgccggaatca

SEQ ID NO: 1292 - DNA, 93 bp, Bacillus licheniformis
gtgatcacaatattgcctacatcaaaacagcggttcacaacggtaaaattcattcgttttcatttcctttcatttcgtcaggtattgatttga

SEQ ID NO: 1293 - DNA, 597 bp, Bacillus licheniformis
atgaaacaaagcaatccacagaactggtatgtgtatttgcagcagcaggctgcgcaaatccagaggctcgaaagtcagattgccgtattgcattcggagttgaaccagctgaaagaaaatcccggcacccggatcgaatacaaatttgatcaactaaaaattgaacgcttggacggaacgctaaatatcggactcaatcctgcggacccggataatgtcgaaaactttgaaatcagccaacagccgccgggtatcggaatgcttcagcaggagcttgacagccagctgatgcagcaaacgagacagcttgtcgatgcctatttaaacgaagagacccctcgtttgctggaacagcttgaagaccggtatgacagcaaactggacgatacaaaccgccaccacattatcgaagacatcagaaagcaaatcgacagccgtatccgctactacgtcaaacatgtaaagcctgacggaaacatccagccccgcgagcatgcagaacggctggccgactatgtcaaacgagatatcgcacgggcaatcgagcactttctcaaatcaatacctgacgaaatgaaaggaaatgaaaacgaatga

SEQ ID NO: 1294 - DNA, 243 bp, Bacillus licheniformis
atgaacttttatatcaatcaaacaatacaaatcaattatttaagagttgaaggaatcagcaactcttccgtattgcagattggaagcgccggttcaatcaaaacacttgcccacctgtacaataccggaagctacacagaacccgcacctccggtaaccggcgaagtctttgacgacgcttttggagatgggactcaaccgactctcgttcctcttcacgctccttctgttacagtaccatag

SEQ ID NO: 1295 - DNA, 222 bp, Bacillus licheniformis
atgccagctattgtcggagcttttaaagtaaatgccgtcggtacgagcggcgttgttcatgtcggagactgcatcacgatttctccttatgcagaagttaaaacatttgcgggtgccggcagcttcaataccggagacggactcagagtatacaaccagaacagcatcaccaacacatatgacaacgatgtaatcgatcagccggtcgcaggcaacctgtag

SEQ ID NO: 1296 - DNA, 294 bp, Bacillus licheniformis
atgtattttcaattgaatccgatatcaatcgctgcagccctgctgttctttgcggccgcatatgcagtcggaataaaaaagcaaacctggatattgcgggggtttcgccgggaaagggtaagggatcaggataagctggcgaaaatcgctgggtatttctttttgaacagcggatttttgttatttttaaatggggttgtttacatcccgtatcaagagtcttttacaccttcagccattcttgcctacggtatttgcacgatgatttatgttcaaaaaacaatggccgaatag

SEQ ID NO: 1297 - DNA, 180 bp, Bacillus licheniformis
atgaacaataaaattgaagcaaaaagactggccttatttgaagctgccgaaaagttcggcatcaactccaaagaggccattcgatgcagtcaggaattggacaacttgctgaatcaaagaatgcaaaaggatgataactgcgtgcatgcggaagaaagaaaaggccgccacacgtcatga

SEQ ID NO: 1298 - DNA, 1074 bp, Bacillus licheniformis
atgagtgccactgccttgccggcctttaggctgcacattcatccgaagcatctgcttgagttgaaaaaagacgtctggagtgatgaagccgttcccggcatgctcttgaccggttcagcaaagacgcctgtcgcagtgtcatacagaggggcccacacccgcaaactgacgaaaaaatcctatttcattcaatatccggacaataaagaaaaggctgcgtttcatttgaacgcggaatatcatgatccgtctttcatcagaaacaggctttcctttcatttttttgaacaaatcggcgtccttgcgccagcagcatcacacgttttcctttatatcaatgaaaaaaaagaaggcatctatttaaaaatcgaatctgttgacgatcatttcttaaagaggagaaatttagaaaggggggccatttattatgccgttgatgacgatgctaatttttctctgctgagttccttcaataaaaaggctaagcaaaatctcatgcagggatacgaaagaaaaacgggttcaagccgccacgatgactacctccaggagtttatctactttatcaataccgccaaagacgacatatttgaaaaagaaatcaaacgctatctcgatgtcaaacaatatttgctgtggctcatcggcgccgtctacacccaaaatatcgacggctttgtccataattacgcgctttatttaaacggtcgcacaaaaacgtttcaaatcattccatgggattatgacgcgacatggggacggaatattcacggggaagaaatggagcacaaccggattccggcgaaaggctataatacgctgtctgcaaggctgctcgacatcccggcttttcaatcccaatactttaatttaatgaaaaatgtcttgcaccgccaatttacaatcagccggctttcgcggtatgcggtaaactggcacgagacaatcgcgccttttcttgaacatgatccttatacaaccgtcacatacagccggctcgaagatgagcaaaaacaaatttttcattttatcgatcagaggaagcggttcctgcttttcgagctttcccgataa

SEQ ID NO: 1299 - DNA, 507 bp, Bacillus licheniformis
atgagtggtgtccatgatcatgacattaaaaaggcagtagaccagctgaagagcgaaggcagagaccattatttagaccgggaacccgaagaatacgccggctcgggaaaagagcggcgtccgcataacatttgggatctttggtggggaataaagccggacagaagcaaaaaacatcataaaagcaagaagcatgacgactatgaaaagccggataaaagcaaaaagcctgacaaaagcaagaaacccgatgactgcaaaaagcctgacaaaagcaagaaacccgatgactgcaaaaagcctgacaaaagcaagaaaccagacgactgtaagaagcctgacaaaagcaaaaaacatcacgactgcaaaaaacgcgacaaatgcggccgcaaacgccccgaccatcatcgctgcaagaagactcaccatcataaaagaggcggctatgaaaccattacaaaatggtctgacggaaatctgaccgaggtcatctaccggaaaaaataa

SEQ ID NO: 1300 - DNA, 906 bp, Bacillus licheniformis
atgaagtttgcgacagcaaagctgcacagccgtacatttgtagggcttgtcatggatgagaagataatggatttgcaaaaggcggaaaaaaagctgtttgagcttgaaacgatacctgaaacgcttatcgaatgcgtaagcgagggagagaagtttgtccgccatgtcgaacagctagtggaatggtcaaagaagaaaaacagcgaagagagcggttcgtatatttatccgctgtcagacgtcgatttgcttgcaccgattcccgaaccgcggaaaaatgtgatctgcatcggaaaaaattatcgggatcatgcgattgaaatgggaagtgaagcagatattcccgaacatatcatggtgtttacaaaagcgccgacttcggtcatcggccacatggaagggattgatgcccacgaaggcgtgacagaggcgctcgattatgaaggcgagctcgcggttgtcatcggcaaaacgggaaaaaacatcccaaaagctgaagcgctcgactatgtgttcggctatacgatcattaacgatgtgacggcgcgcgatctgcaaaagaggcacaagcagttttttatcggcaaaagccttgatgcgacctgcccgatggggccgtttcttgtacataaatcaatgattgaagaccccggtgacctgaaggtggagacgagagtgaacggcgaactccgccagtcggggagcacaaaggacatgatttttccgattgcggaaatgatcgaaacgctgtccaaaggaatgacgcttgaagcgggggatattatcgcaaccggtacgccgtcaggagtcggcaaaggctttaatccgccgaagttcctccgaaaaggcgatcaggtcgacattacgatcgaaccgatcggaacgctttccaatccagttaaataa

SEQ ID NO: 1301 - DNA, 1053 bp, Bacillus licheniformis
ttgaatttatcagcattaggcatcaaatatatcatggaagctttaaaggatgaggaaggtctggttttgggaaggatcgcccttgagcataaaaggttgtaccgggtatggacggaagaaggtgagtggcttgccgaaatctccggcaggctgcggtttgaagtggaaagccgcggagactaccccgctgtcggcgattgggtgtatatgcgcccacgcggcggcgaaaagaagggaatcatcacggaggtcgttccccggttcagcaaattttcgcgcaaagcggcgggtgagccggcggaggaacagatcaccgcagcaaacgtcaatacgatctttctcgtcaatgcgctcggtctggattttaatgtgagaagaatcgaacgctacttgctgctggcatgggaaagcggagccaatcccgtcatcgtcttaagcaaagcggacattgctgaccggattgaagaaaaggtgcgccaggcggagtccgtggcattcggggtgccgattcacgtcatcagcgctcatgaaggcagtgggatggatgagctgaaagcgtatgtgaaacaaggggaaaccgtcgcccttttagggtcgtcaggcgtcggaaaatcaacgatcatcaacttttttctgaaggaagacaggcaagccgtccaatccgttcgtgaagatgatgacaaagggcggcatacgacgacgcacagggagatgtttatgctgcctgaaggcgggcttttaatcgatacgccggggatgcgggccttagagctttgggaatcggaagaaggattcaagcagagtttcagcgatattgaccagcttgcacaaaactgccgattttcagactgcctgcatcaaacagaacccgtctgctccgtgcgggaggcgctggctgacgggaggctggatgccggccggttccaaagctacctgaaattaaaaaaagagctcgaatacctcgaaagaaaaacggataaacgggcgatgcagcaggaaaaaaagcggtggaaacagataacgaaaagcatgaaaaagaacaaaaacaaataa

SEQ ID NO: 1302 - DNA, 144 bp, Bacillus licheniformis
gtggaaacagataacgaaaagcatgaaaaagaacaaaaacaaataaatgaaaaaggcgctgataaatggcttcagcgtctttttgctgcggaaatgacagcgttcacattgttttgtttaatggaccggttcatgataagataa

SEQ ID NO: 1303 - DNA, 354 bp, Bacillus licheniformis
atgacgcatatgcatatcacgtcttgggtgatcgcgctcattttagtgttcgttgcttacgggctttactcatctggaaacagcaaaggcgcaaaaattacacatatgattctccgcttattctatattatcgttatcattaccggggcgcagcttttaaagttcacggcatggaacggagaatacatagcgaaggccttgctcggcctcatcaccatcggattcatggaaatgctattaatccgcaggaaaaacggaaaagcggccactgggatctggatcggctttattgtcgttctgctcttgacggttgtgcttggactccggcttccgctgggctttaaagtgttttaa

SEQ ID NO: 1304 - DNA, 567 bp, Bacillus licheniformis
atggacaccgaacgccagaaacgactttatgccgaaaagcgcaaatggatttacggcaaaattttaatggaagacgggatctgcctgattgaaaatgaagaaggagatttgcttttggttgaaagcctgaacagccccggagttttcatcagcatagacggagaatggcaaaaagccgaactgtttgatcaattcgccgtaacggaaaaaccggagaccgtgaagctgacaggaggagaaccgatccgttatctgaaaacggtaaaacaggcattcctcgaatttttgaacgatctggaagacggacagttctattcttttttggatcagctgaacagcctcggcttttccgtctttgactgcgtcttcgcctataacggcctgagcttttggcccgagaaaaaggatgtcaagggcgtttcgttttatcagttttctcatgatatgaaacaatgcgccctgcagcatcattacgaaagaaaagaggagtggaaggacagatttgaatggaccgcttcagatggggaacgaatcgttatgatttcaacattcaagccgccgacataa

SEQ ID NO: 1305 - DNA, 1842 bp, Bacillus licheniformis
atgtgtggaataacggggtgggtcgattttaagaagccgcttgtccgagagcagtcaatcatggagaagatgactgatacgctttcgaaaagaggacctgatgatacgaatatttggggaaagcgccatgttttattcggacataaacgcttggcagttgtggatctggaaggcggcagacagccgatgacccgcacacatcaaggatatgattatacgatttgctataatggcgagctctataatacggaggatttgcgaaaagagcttaggcggcgggggcatcaattcaagagccactcagatacagaggttttgcttcattcatacatggaatggaaagaggaatgcatcgacaggctgaacggaatttttgcatttgcggtatgggatgaaaagcgggatcttctttttgcggcacgcgaccggcttggtgttaaaccgttcttttacaccgaacagggctcatcatttttgttcggatctgaaatcaaagccatcctcgctcatcctgaagtgaaagcaaaggtagaccgttcagggctggcagaaattttcggcctcggcccgtcacgatcgccggggagcggtgtttttaaaggagtaaaggagatccgcccggggcatgcgatgattttctcaaaagacggtttaacggtttggcgctactggaatgtgaaaagcgagaagcatacggacagctttgacgaaacggtggaaaatgtgcggtcgctgtttcaggacgccgttacaaggcagcttgtgtctgatgtgccggtatgtacgtttttatctggaggggtcgattcgagcgccattaccgcaacggccgccaagcatttcgagagggaagggaaggcgccccttcatacgttttcgatcgattatgaagacaatgagcaatattttacgtcaagctcatttcagccaaacgccgacggcccgtggattaaaaaaatgtccgatgcattcggaacggttcatcacaattgcgtgatatcccaggaggagctggctgcctatttggaagaagccgtactggttcgggatttgccggggatggctgatgtcgattcttccctgctatggttctgccgcgagattaaaaaagactttgtcgtgagcctttcaggggaatgcgcggacgaaattttcggcggctatccttggttccattcggcagaagatgtgaaaggtttcccatggatgagatcaatggaagaacggatcggacttctgcaggacggctggcagaaaaagctgaacctcagcgaatatgtgaaggcaaaatatgaggaaacagttaaagaaacaccgctgctggaaggagaaacgggtgcggagaaacgaaggagagagctgttttacttaaatatgctctggtttatgacaacgctcttggatcgaaaagacagaatgagcatgggtgcgagcctcgaggtcagggttccgtttgcagatcacaggcttgtcgagtatgtctggaatattccatgggatgtcaaaatgcatggcagccgtgaaaaaggcatcttccgcaaggcgctggaaggcattttgcctgatgaagtgctgtaccgcaaaaaaagcccatatccgaaaacgcaccacccggcctatacgaaagccgtgatacgctggctggagtcattgctggagcaaaaagactcggcgctctatgctttcttagaaaagaaaaaactggagcggctgattgagacggaaggtgcatcatttcaagttccgtggtacggacaattgatgaagggaccgcagctgatcgcccaccttgcccaaatccatacttggtttgaaagttatcgaattgatatcgaggaataa

SEQ ID NO: 1306 - DNA, 1380 bp, Bacillus licheniformis
atgaaaaccaaggtatctgccgtcctgctcctcagttttttcttcaccgcatcagctctggccgccgaaccgacggtgcaatcggtcaatgactcggtcaacatgacatgggtagccatcggcactctgctcgtcttttttatgcacgccggttttgcgatggttgaatcaggctttacaagagctaaaaacacgttaaacattttaatgaaaaacttcctgacgatctctatcggctccatcctttatttcttcgccggatacgcgttcatgttcggggacagcgccggcgggttcatcggcacaagcggttttgctctagcgggtgatcaggatgtcggatttttcgtctttcaggccgtgtttgccgctacgtgcgccaccattatttccggcgctgtcgctgaacggatgaagcttggcagctacatgatcttgacgctgtttatgaccggtctcatctatccggttgtcggccattggacttggggggaaggctggctgtacgacctcggatttgtcgattttgccggatcttcaatcgttcacttgacaggcgctgcgggcgcagttgcggctgtcatgtttctcgggccgcggatcggaaaatatacaaacggcaaggtcaacgccattccagggcacagcattccgctgggcgctctcggcgtctttatcctgtggttcggctggtttgggttcaacggcggaagcacgcttgcggctgatcccgccgccgtcccgcacgtcatcaccacaacccttttagcggcatcgggcggagtcgtcagctcggcgctgttcacttatttccgctacggcaggatcgatccttccctgacgctgaacggcgcgctaggcggccttgtcggaattaccgcgggcgcggacggcgtttcatttacaggctcgatattgatcggattcatcgccggtgtcattttagttgtcggcgttcagtttatcgaccaggtgctgaagcttgacgatcccgtcggcgccattgccgttcacggtatttgcggtgtttgggggacgcttgcagtcgggcttttcaatacatcgagcggtctcttttacggaggaggagccgcacagcttggcattcaagccgtcggcattttgtcgatcgcggcctggaccctcgctgccacatcagctgtcgccgcggcaatgaaagccctcgctccgatcagggtatcaaaagaggaggaaatttccggactagattatgccgaacacggttcttccgcgtacgagtataaagaaagctacatcgatcaggacgatgttgacgtaagctccgctttcggaacggatcttgtctcacggctcaacaatttaaagcctggaccttcttccaaaactgaacaggtgtga

SEQ ID NO: 1307 - DNA, 342 bp, Bacillus licheniformis
gtgaaaaaaatcgaaacgattatacgccccgaacagttccctcgcctccgcaaaaagcttgaagaggttggcataaacggattaaccgtctcagaggttgccggctgcggccagcagcgggggaagcaggctctgtttcgcggcacctcctacgaaatcaagctgctgcctaaagtgaaagtcgaaatggtgattgaatcggagagcgttgatgaaattatcaaaatcatcgaaagcacatgttcgacaaatacggtcggcgacggaaaaatctttgtccttccaattgaaaacgcgatccgaatccggacaggggaatcaggaaaggaagcgattgtctaa

SEQ ID NO: 1308 - DNA, 1341 bp, Bacillus licheniformis
atgaaaaaaacagcacctcaaaacctctctttattcgcattgacttggcctatctttatcgaggtttcattatatatgttaatgggcaacgcagataccctgatgctcagccaatattccgacgacagcgtggcagccgtcggcgtcagcaaccaaatgctgaacttgatcattgtgatgttcggttttatcgcaacaggaacaaccgtgattatttctcaatttttagggtcgcggcaaaaagccgaagcaatggaagtcggctatgtttccatcagcgccaattttatcatcagtctattcatcagtgcggcgatttatatatttgccaaaccgcttttattgatgatgggcctttccgccaacctgcttgctgaagccggcatctttctccagatcgtcggcggactgtcctttgtccaagcgctcattatgacgttcagcgccattttgaaaagctacgggtatacaaaggacacaatggttgtaaccatcggcatgaatatcctgaacatcgccggcaactatcttgtcatattcggaccgttcggctttccggttttaggcgtggccggcgtggcaatgtccacttcaatcgcgcgcatcatcggccttttggcgatcgctctgctcgtcaaaaagcgcgtcggcatgccgctgttgtccaaacggctgtttgtcttaaagaaaagtcacctgaaaaaactgctgaaaatcgggattccttcagcaggggagcagctgtcatataacgcgtcacagatgattgtcacctattttatcacgctgatgggcgcgcaggcgctgacaacaaaagtctatacccaaaatttgatgatgtttatcatgcttttcggcacagcgatcagccagggaacgcaaatcttaatcggacgccatatcggcgcgaagcaatttgatgaagcatacagccgctgcctgaaaagcctgtggtgggctctggccattacaacatttacttccgttctcttcgctgtgttttcaaaacagctgatcggcattttcagcagcaatcccgatattatcgcaacggccagtatactgatccttttgacgattatcttggagcccggccgctcgtttaacgtggtcatcattaattctctcagagctgcgggagacgcgaaatatccggtttatatggcgattgtctcgatgtggggaatcggacttccgatcgcttacattttcggcattcagctcggattcggcctggcgggaatttggttttccttcatcgccgacgaatgggtcaggggaattttaatgtacagaagatggagatctaaaatgtggcttcaaaaaggatttgcagcataa

SEQ ID NO: 1309 - DNA, 864 bp, Bacillus licheniformis
atggaacatatcatctttacaattccgccgctccctgtgttgattaccggcggagaagggctgttcaaaagaggggaaaagcatgtgaggcgtgaatattccgtgtttgatctcttatatgtgatacagggggaactatttttgactgaggacggcgagccccatcagatccgggaaggggaatacatcatccttattccggggctcgagcattatggccaccgcggctgtcaagacgatacccgctatttttggctgcactttcaggagccgtcctatggcttcgcgcagcagggaggtgagaactggactgaactcaagctgaggaaggggacatttgaaacgccgacattgtatcatttaaagattccgagaaagggaaagatcgaccaaaaagcgtttatcgaacagcagtttaggcgtttgattgacgattcctcccaaaattccgacctgtcgcttcgcaggcagctcttgttcgaagagctgctgattcacttgcagaaggaggcgttccatattccttcggcgagtgagcgtgtagcatccgaagcacagcattacatcgaccgccattataaggagaagctcagcatggagcagctctcggctgcccttcattatcaccaggactacattacccgctgcatgcaaaaggtgtttggcatcacaccgggccaatatgccaataaggcgaaagtttttgaagcgaagcggctcctctcttctacaaacgacaaaatgtcatcgattgccgaacaagtcggaatcgatgatccgacctatttctcaaagctgtttaaacaaatagaagggatttcgcccgttgaatacagaaagatgatgaagcgaaatattgagtga

SEQ ID NO: 1310 - DNA, 558 bp, Bacillus licheniformis
ttggcatccatcaatggtgaaaaagtgaaattgcgtacgatcacaatggatgacctgcccggattatggagaatgatttacggaactaaaaaccctgaatggaaaaaatgggatgccccttattttccgcttcagcccgaaccgtttcaatattttatcgattcttttgtgccggctttaaaagaaaaaccgccgcgctatttggcgatagagatcggcggagagctgaaaggaaccgtttcttactattgggaatcccggccgacacgctggctggaatgcgggatcggcatctatgatccgcggttttggaacgggggatacggtacggaagccgtagaattatggatcggcttcctgtttgaaaacgtcgatgtgccgagaatctgaatgacgacgtggtcaggcaacaggcggatgatgaggtgcgccgaaaaagccggatttaagatggaaggccggattcgcaaagtcagatattatgacggagtctattacgattcaatcagatacggaatcctgcgggaggagtgggagctgatttgccgcggaagctga

SEQ ID NO: 1311 - DNA, 1044 bp, Bacillus licheniformis
atgaaaaaaaccatttatgatgtagcggaagcggccggcgtttcgatttccacggtttcccgggtgatcaacaataccgggaggatcagcaggtcgacaaggcaaagagtgcatgccgtcatgaaagagctcgattaccagccgaatgttcacgcttctgcgcttaccggaaagcgcacgaacattatcggcctgttgacgcccgatattgcaaacccgtttttcggcgagcttgccaaaagtgttgaagagcgggcgggcgagctcggcttcagcattatgatgtgcagtaccgaccgcgatccgaaaaaggagacaacgtatttctcggtcttcaagcaaaaaagcgtcgacggcatcatttttgcgacaggcatcgaaaatcaggagacgatggatgcgctcgaggatattgccaaagagggcataccgctcgtgatgatttcccaggatcgcgcccttgttccgatggatgtcgtggtcatcgatgattttatgggcggatatttagcgacgcggcatttaatttcgctcggtcataagacaatcgcctgcatcgccggcgacggatcgacaaccggagaaaaagacaggctgaaaggcttcaaaaaagcgatggatgaagcaggcatcaaagcggatgaaacgctcatcgccggatccggtttttccctggaatgcggcaaaaaagcggccgctcagattttcaaaagcaatattccgaccgccgtttttgccatgaatgatgtgctcgcgtgcggagtcattcagactgcaagggaatgggggctccatgttccaacggatttatcggtcatcggctttgataatacgtttttagccgaaatgaccgatccgccgcttacgacagtgtctcagccgattgaagaaatgggccgccgcgcggccgagctgcttgccgaagaaatcagcggcaagaaaagctcgaaaagcaaaatcattctcacgcctgaacttgtcgtcagacagtcgacggcccctccatttaaaaaagaagcacatgccgaaaagagcgggttttga

SEQ ID NO: 1312 - DNA, 1029 bp, Bacillus licheniformis
atgacagaagttgtgagatgcgccgtattggggcttggaaggctcggctattaccatgcgaaaaacctcaaaaccgaggtgcccggagtcctgctcgccgctgtagccgatccggcagagggaagtgcgagggaggttgcagctgaactgggtgttgaaaagtggttgaagacccgtttgagtgcctccgcgaatccggaaattgatgccgttgtcatcgttacaccgacatccactcatgccgaaatgatcaaacaggcagccgaattcggcaaacagatttttgtggagaagccgctgacattaaatcttgaagagtcaatagaagtcatttccaaggtcaaagaaatgggcgtgatttgccaggtggggtttatgaggcggtttgatcctgcttatgcggatgccaaaagaaggatcgatgccggagagatcggcaaaccgatctattataaagggtttacgcgcgattttggctctcctccggccgaattcatcaaaaaaagcggcggtattttcgtcgattgttcgattcatgactatgacatcgctcgttatttaatgggggctgaaatcactgcggtttccggccacggaagggttttgaagcacgcattcatgccgggatgccatgacgtcgatcaggcgctcacctatatggagtttgattcgggagcggcgggtgatgcggaagcaagccgcaattcgtcttacggccacgatatccgcgccgaaatcatcggaacggacggcagcatcttcatcgggatgctgcggaacccggcggttacagtgcggaccggaaaggggagcagctataatatcattcccgatttccaggcgaggttccatgaagcgtactgtttggagctgcagcattttgctgattgtgttcgcatcaaaacgaaaccgcttgtgtctgaagtggatgcggcggtcaatcttgaaatcgcgcttgcggccacacaatcctggtcaacaggcaggcccgtcaagattcagtatcagacgaaaaagcttacggtatga

SEQ ID NO: 1313 - DNA, 1089 bp, Bacillus licheniformis
atgatcagcggaaaacgcatcaaattaaagtgctgtctcgtactcgggattttcacagcggttgcgggctgctctccatttgtcgaaaacaatgagattgaagaaatctcaccggttaccttttggtacatgaaagaaggaaaaaaaggaaagatctcgatgagcactgtcgtccctccgatgggtcttgaaaaaaagaggctgttcagcaccgaagtcgatatgattaaacaagctggaaagcgctttaacttaaattattacaacgagctgaaaaacgggcagctgagaatggtgatgatcgaagaaaatctcgccgacaaaggcatacttccgattatcaacacgctcctgtcagacccgaaaatcggcccccgcctttatctgatcgtcgtcaaaggcgattttgacaaatatataatgagcgaattgaagcaaagcgagaattttgacttttatctttatcagacgttaaggcattttgaaagagcaaaccagggtgaaatgagcatcgtcaacctgcatcaattcaaaaaccagctgtacacccacttttcagatccatacgtgcctgttttcagaaccgatggaaaccagttcacatatgaaggaacaggacttttccgaaacgacaaattcgtgaaggtcctgaccggcatagacgatcaaatttttcagctgatcaacaataacaggttcctgaagttcctcacgatccccaacttgtcaatcgtgatcggccaggcacgctcaaccgtcacgttcgacttgaatcaaaacaatacggctttatcaatgaaggtcagcctaaacgcgggaattgaagaatatacaggcgataaaaacctgcaggatcaaagcgaattcaacgcactcgtccatgatgtagaatctgaattggaaaagaaaacagcggacatgatcaaggacatgcaaaacattcgggttgatccgcttgaagtcggcggcgaagcgctgtttccgtttacaaagccgatgagcgacaaagcgtggctgaagcgttgggagaacatggatgttaaggtggactaccagctgaatctgagaccggttgtgaatacgcagtag

SEQ ID NO: 1314 - DNA, 648 bp, Bacillus licheniformis
atggtgttcctttttatcagattttatatacccccgatcgcttccttgactgatttatacccgctgattccttttgaatggactgaacattcttggaaggcactgctcgtcatgtggtcttctttttccagtcccgagtatttgatttgtctggctccgtggttcagcaaggaagcaaatgtgctgaaatgtttatcggtcggtaatgcgatttcactcttcgaatacttgtttttgtttatcggtgcactgtttttctacggctcctcttatttgcgggaaaccgtttttccggtgatgaacatgctccgctatttgcagtcgccgattttggagcggatcgatacgtttcttctgtctgcccatatgtttcattttgcgtttgtgatcgcaatttttttgctctgcttttacggcggcctccgcattttatttaaaagggtgtccaaaccggtgacgcgaagaggatttctgttcagcttccttctgatcatgggatgttcgctcattatgagcacctggttttggcaatccggaaaggagcagaatatgtggtttttgatcgaagtatccatcggagccgccacctatgcattgattccggctcttcttgttttcgccggaaaacgaaaggggcgcatagaatga

SEQ ID NO: 1315 - DNA, 147 bp, Bacillus licheniformis
ttgctgaaccacggagccagacaaatcaaatactcgggactggaaaaagaagaccacatgacgagcagtgccttccaagaatgttcagtccattcaaaaggaatcagcgggtataaatcagtcaaggaagcgatcgggggtatataa

SEQ ID NO: 1316 - DNA, 528 bp, Bacillus licheniformis
ttgagttcttttcaattatttcacaagacacgtcctctcggcggcatttacatcgcccttatcgccaaccgtatgcaagtcctttttttcatattggttctaccgatgtatttggttcacccttacatgatgttcgttatgctcggtgtcggaatgctgtcccagctcaacctgtacctgttgtccaaatggctgtcttctccagctgctgctaaaggctacgaaggcttcgccgccctcttcggcgaacgcaagctgcgattttttattctgatcggcttaattcagctcgcgctaaagatcgcgatcatgatcacaagctacgccgaaacagtgagacatttcatctttcccgcgatcaatatcaactggctcgtgatctttattctggttatcagcgggtatgctgcctcccgaggcatggaaaatacgatgcgctttgtcattattgcctttatgtcatcattttggatggatggtgttcctttttatcagattttatatacccccgatcgcttccttgactga

SEQ ID NO: 1317 - DNA, 1470 bp, Bacillus licheniformis
atgtttcgaaaatataaaagaaagggagctggattgcggagcgctcccattacgagagatgcccttctcgatgccaccgccggtatggctgatgcggtgatcgaagagcatgaaacaaaaggcggacaaaaagcagtaatttactatttacatacgatcattgaccgggtgctgctgcagcagtcgatcatcaggcctctgatcacgagcggcgaagaagagtcaatatatcgctgtttaaaaacctttgttttgcacgttgaaccgatcgtatctttggaaagcgcaaaagagtggctgatgtccggttcgatcatcatccatgatccggctcagcagcagtggtttgccattcctgctgaaaatcgggtcggccggcagatcgaaccgtctcaaaccgaaacggtaatgtacggtccgaaagacagttttaccgaacagcttgacgtcaatctttctttgctgcggcgcaggctgcctttatccaatttaaaagcggaaaggctgacggtcgggtcgctcagcaaaacatccgttgtcatcgtttatattgccggattaaccaatccagagttgattgaggaagccagaaaaaaaatcgcggaaaccgattttgacatgatcttcgattccgcacagctcactgaattgattgaagatcatcatcattcgattttcccgcagttccaacagaccgagcgtcccgacatttccgcatacaacttaagcattggcaaaatcgccattttggtcgaccagacgccgtttgtattacatgcgccgatcacgttttttcacctttttcactccgccgaagattatacgacgcgctggccggttgccagcttttttagaatgctgcgctacgccagtttttttctgtctattttgttaatacctttgtatgtcgccttgtcgactcatcattatcatatgtttccgctccagattctttacgtgctgatcgaatcaaggagcaaagtgccgttcagcccgttttgggaagcggtccttatgctgctcgtcatcgaaattatcaaggaagccagcgtgcggatgccgacaaaatcaagttcaacattgggtgtcatctcggggattgtcattggggaagcagcggtgcaggccggctttgtcagcaaagtgctgatcgttttggtcggcatctcaacggtcgcgtcatttttggtgcccaactacatcgtcgctaaaggacacactatgattcattttacgatgcttgtattctccgcctgcctcggttttttcggattgaccttcggaatgatcggactgtttgttcatttgaacgggctcacttctctgaagcagccctattttgcaccgattactcctttatattggcgcgattggcttgatctttttatacgaagtcctttgatttggctgaaaaagcgtcccgaatatctgcatcctctgcaaaaatggcggtacgtaaaaaggagatga

SEQ ID NO: 1318 - DNA, 606 bp, Bacillus licheniformis
atgaacgcagctattcacggaataattctcgcttttggactgatcttgccgctcggcgcgcaaaatgtcctgatttttcagcaaggggctgcatcatcgagcatttggcgggttatgccgcttgtcatctccgcatcgttgtgcgattccctcctgattatacttgcagtcacaggtatttccgcggctgtcgccggccttcccgaagttaaatttgtcctattggccggaggagttctgtttctcatttatatgggatggatcacctggagaagcaagccagcagtgggaaatgcgtccgaagccatgccggccaaaaagcaaatcgcctttgctgcggccgtgtcgctctgaaatccgcacgccttgctcgatatcgtcggcgtgatcggcacgaactctttagcatatgaaggtgctgatctttggctgttcacctgtgcatgtatgatggtttcgtggctatggttcctgggactcgccgcagcgggaagtcttctcaaacagctcgattcgcaagggttcatcctgaccttgttcaataaaggatctgcggctgtcatgtgggggcttgccgcctacctcggcgcctcgctgtttacttga

SEQ ID NO: 1319 - DNA, 1473 bp, Bacillus licheniformis
atgctatcctttaaaaaaggagctgaacatgaagtgcacagacagctgaacagacattcagacattccgctatacaagcaaatcgaacaaatcataaaagagaagattttgcagggggaatggcccgccgggacgaaaatcccttcccaacgcaagctggcctccatgtttcaagtgaatagaagcacggtgactgcggctcttgacgagctgacagcccaagggcttcttgaagggaaccggggcggaggcacaaaggtggccaatcaaatatggtcagaattgacagcggggccgccgctggattggacgagttatgtacgctcggggattcaccgccccaattcaatgacggttcaggaaatcaacaggcaggagtttaaagaaggggtcatcagacttggcacaggtgaattggcgcctgaactgctgccctatcaacaaatggaaaagattcttcgcggagccgcatctgaaaggctgatgctcgggtatgaagaaccgaaaggaaaccgctttacaagagaagtgctggcggcgcatctgagccggaagggtgtgcgtgcatcggccgattccattctgatcgtctccggagcactccaggcgctgcagctcatatcgatcggccttttgaagcggagagccgtcgtgctgacggaaaagccgtcatacctatactcgctgcacgtttttcaatcgatggacatgcggctttgcgggcttcccatggatgccggaggattagacccgtccgtcattccggcggtaaaaaaacggcatggcgccgatttgttgtacacgattccgtcatttcacaatccgacgggcaaactgatgtccgaagaccggaagcgcgagctgattcaaatcagcaagcagctgtcgctcccggttattgaagatgacgcatacggcgatttgcagcttgacggcccgccgtcgtcgccgctgaaggccatggacagagaaggcagcattctttatgtcggcacattatcgaaaaccgtcagccccggcctccgcatcggctgggtcgcaggtccggagcccgtcatcgagaggctggccgatattaaaatgcagactgactacggatcaagttcattgtcgcaatgggcggctgcaaagtggctttcaagcgggctctatgatgaaaatctcagcccgattaaagtcgaactgagacaaaggcgggatgaagcgctccggtgtcttgagacctattgcagaggaatcgcccgctgggaaaagccctcaggcggattttacatttgggtcacattcctaaaaccgctctcgctcagcgctttgttcgaacaagcattacagaaaaacatcctcatcaatcccggcaccctctacgataaggaagccaaatacagcatcagattgtcctattcgtacgcctctttgacagagcttcgctacggcattcaaacaatcgcagaactcgccggtaagctcatgtga

SEQ ID NO: 1320 - DNA, 135 bp, Bacillus licheniformis
atggaattttatggactgtttttaaataacctgaggcctgaaataaaaagcggagcggctgctgaacgtcgctttttcagcagccggtacagcggggttcacatgagcttaccggcgagttctgcgattgtttga

SEQ ID NO: 1321 - DNA, 1347 bp, Bacillus licheniformis
atgcctgtacaaacgagttctaaaaatcaagtgtttttggagcagcaaaatagaagagaatctaatgcgcgttcatatccgagaagatttccgctcgccatgcagacagcggaaggcgtcttggtgactgatgcggatggaaagcaatattatgactgtctggcaggagcggggacgcttgcgcttggtcataatcatccagttgtgattgaagcgattcaaaaaatgattgaggaaaaacgcccgctgcacacccttgatattacttcggaaatcaaagaggagtttgtcaacgaagtatttgcaagccttcctgaggcgtttgccaaacgggcgaagatacagttttgcggtccgaccggcggcgatgcgatcgaagccgctctcaagcttgtcaaaacggcgactgggaaaagaaccatcctatcgtttcacggcgcctaccatggagcaactcacggaacgatggcgctgagcgggaatttatctcctaaggaaaacgtccagggtctcatgcctgatgtgcatttcctgccatatccgtatgaataccgctgcccgtttggaaaaggaggagaggcgagccacaagctgtcgagcgcatatatcgaaaatatgctggatgatccggaaagcggagttttacagcctgcagggatgatctttgaagccgtacaaggagaaggaggctcagttccggcccgggctgaatggataagagaaatgagaaggattacaaaagaacgcggaatccctctgatcattgacgaggtgcagaccggcatcggcagaaccggcaaaatgtttgcgttcgagcacgccggcattataccggatgtcatcgtcctttcaaaagcgatcggcggaagccttcctctgtctgtcgtcatctatgatcaagaccttgatcagtggggacccggggcgcacatcggcacattcagagggaatcagatggcgatggcggccggaagtgcaactttaaaatatataaaagagcacgatgtgctatcacatgtagaaaaggtcggagcgaagctcatgcgggaattgcaagacattcaggagcacgttcccgaaatcggcgatgtccggggacgagggctgatgatcggcgccgaaattgtcgcaccgcataaaaagcaaaacgcaaacggcagctatccggctgatgcggagcttgcaagcacgattcaaagaaaatgctttgaaaaaggactgatcgttgaaacgggaggccgccacggaagcgtgatccgcttcttgccgccgcttatcgtaacagaggcgcaaatcgacgatatcatcacgatcttcagagaggccgtctatgaagcagtcaagtaa

SEQ ID NO: 1322 - DNA, 1512 bp, Bacillus licheniformis
atgaagcagtcaagtaaacaaaaaaactttgattccctgtttatgcacaacggggaacaggggatcaaagcataccgtgacgcggtagagaccgctgtagagacgctttgggccgattggaagaataaatcgaagccctacagcgggaagatgccgaaagaattggatctcgaaatcaaaagcttgttttcgtttcaggaagcgggagaatcgcttgcggatgttcttgagcatctgaaagaagcctatttgccgcaccggattcatgttgaagatccaaaatgcgccgcacacctgcactgtccgccgctgatcccggcgcttgctgcagagatgctgatcagcgtgctgaatcagtcgatggattcgtttgatcaaagcggagcggcttcattgatcgaggaagaaatggtgcagtggctttgccgaaagtttgaatacggaaaagatgctgacggaacatttacgagcggagggacacagtctaattacatggggcttcttttggcccgcgatgccttctgcgaaaagcagtggaactggaatgtacagaaggacggactgccgccggaagcgaacaggctgcggatcctctgttcaaaggatgctcattttaccgtgaaaaagtcggcttcccagctcggcctcggagagcgcgccgtcgtgcttgtcgataccgatgctgaaaagcggatgagcctttacgatttaaagcaaaaaaccgctatgctgaaggaatcgggcttacatccatttgcgattgtcgcaacatgcggaacgacggacttcggaagcatcgatccgctttccgagcttgcggatgccgcgcatgctggcgggctttggttccacgttgatgccgcatatggcggagcgttgattttgagcaggacccgccgctataaattggctgggatcgacagggccgattcaatcagcgtcgacttccacaagcagttttatcagccggtcagctgcggcgcttttcttgtaaaagacagaagacatttccgcttgattgattatcatgccgattatttaaatcctgaggaggatgaagcggagggaatcgttcatctcgtcaataaatcgattcagacgacgcggcgctttgacgccttaaagctgtttgtctcgctgcgtgtgcttggagaagatacattcgccgagatgatcgactggacattcgcattggctgaagcggcagcggaaaaaatctcagcaagcgatcggttcgaactgctgaatccgcaccctgaactgaacgctgtcgtcttccgctgcctcgcctcagaagacgacgcggagaacgaccgtttgaataaatgtatccacagagaattgttcagaacgggacaggcggtgatcgcaaagacggcagcagctgggaaaacatatttaaaattcacgctgctgaatccgcggacgacgctttcggatcttgatgacattctcgggaggattcaagagcttgcaagtctttatacgaatagcaggagggtaacaggatga

SEQ ID NO: 1323 - DNA, 1767 bp, Bacillus licheniformis
atgagttcatttaaagaaatagcagaaaacgccacgattcaaagctttttaaattgctatttgcgtgaaaccggcatcgaaacccgtgagatcgcggacggctctcaaaaaacgctgattgtcccgctagagcgccagcagatcgagctgatcgttccgatcaagtactggtcgaagacgggaaggcaccttttctcatttccgctttattatcaaacagcccaaaacggaaagccgcttccgctcgactatgtgacgctcgtctccctcgcttcaaaggaattgcttcttcagcaaagccgcgggggtgccgaggatgaattcatgctcagagtcattttgagctgccgaaatatcagccgttatgttgaggaacgagccgatgatcaaagtgagcttagccgtgctgattttacgtttatcgaagcggagcagtcgctcttgctcggccatctgatgcatccgacgccaaaaagcaggcaggggatgaagcctgaagaggaaagcatctattcgcctgaacttaaaggggagtttcagcttcattactttaaggcacacgcctccctcgttctgcacgactcaagtacaggaacaaaagcgccgctagtcattcaagaggaattgagaaacgacccgatgattgacaatgcgtggctggatgagcaaacggccgatccggattttgcgcttcttcccgcacatccgctccaggcgagagccttgttggaggagccgtatgtgcaaaaattgatcgctcaaggtctccttacatatctcggcgcaaaaggccggaagtatacggcgacatcctccgtccgcacggtctacagcaagcactcgcgctatatgtacaaattttcggtaccgatcaaaatcacgaattcgctgcgtgtgaacaagcagaaagaattggacagaggtgttgaaatggcccggctgcttcagacagagctcggccaaaggttgaaacaggagtttccgggctttcgcgtcatcacagatcctgcttacatttccattcgaggagagaacggggagtccggctttgaagtcgtgatcagggagaatccgttttatgaagacgaccgttcggcatgtctgatcgccgggctttgccaagatcacgcctacgggaaagagtcgcggctgtgctctgtcatccgcgggctggctttagaagaagggcggacgacggaagaagtgagcatcgattggtttgacaaatacttatcgatttcgcttgagccagttttatggctgtttgaaacatacgggctggcgattgaagcgcaccagcaaaacgccgtcatccgcttaaaaaacggctatccggagacattttactacagggacaaccaaggctattattacagcgaatcaaaagccgggattctttccaagctgatcgaaggcttgagcgaaaggagcgagacgatctgctcggacagcgtggctgtagagagactgcgctattatttcttcttcaaccatttgtttgggcttgtaaacgggtttggctgcgaagggctgatcggggaagaaacgcccctgtccatgatcagagagcggcttgaaaaagcggagcaaatttacggtatcacagagctgacggacagcctccttcgttttgcggagcttccgtgcaaggccaatctgctgacgagattttacgacatggatgagctgacaggctcgcttgaaacccagtctcgctatacgtctgtcaacaatccgcttttaaaggaggcggcggctgtccaatga

SEQ ID NO: 1324 - DNA, 555 bp, Bacillus licheniformis
atgaatgaacggatcacatttcaaaaagcggactatgaaagagacatatcgctcgtctaccgctggatgcaggaggagcatgtcattccgttttggcatttaaacatgccgtttgcaaaatttgaagcccattttcacaaggccatcacagaccctcaccaaacgctgtacatcggctttatcgacggtgtgccgatgagctactgggagtcgtactgggtcaagggagacatcattgaacaccactatgacaatgaaccttttgaccagggcatccacctgttgatcggtgaaaaagcgcatttgggtaaaggtcttgcccttccgctattaaaagcgatggtcaacatgcaatttgccgtgcctgaaacaaaaaaggtgatcgcagagccggatatccgcaacaaaaaaatgattcatgtttttgaaaaatgcgggtttcgccctattaaacctgtgaatctccctgataaaaccggattattgatcttttgcgaacgagaacgtttttttgaaaaggagaaaaaagatgaactctacaaagagacccaatga

SEQ ID NO: 1325 - DNA, 1344 bp, Bacillus licheniformis
atgaactctacaaagagacccaatgatgtatacgatgtcatcggcgtcggcatcgggccgtttaatctcggccttgccgcattggctgactccgtgcctgagatcaatgcgctgttttttgaacggaacgaaagctttaactggcatcccggcatgctgattgaaggaacgacactgcaggtgccgtttttggccgacttggtgagcatggccgatgtgacaagcaaatacagctttttaaactatcttcagcagcataaccgtctttattctttttattttctggaagactttcatattccgagacaggaatacaaccactactgccgctgggtggcagaacagctcgactcgtgccgcttcgggatgaatgtcgaaagcatatcactcgttgaatcgaacccggaggcgctttttaaggtgcgggtcgcgaatcgggagaacggaggggaagcggtttattacacgaggcatattgcgcttggcattgggacgggcccgcacgttcccgatgcgctctcagacgctttggggggctcggtgttccattcagccgagtatttaaagagaaagcccggcggatttaaagggaaaagggtggccgtcgtcggctccgggcaaagcgcagccgaagtgttttatgacctggtcggtgaagatgaagcggagcatgtcagctggctcacccgctcaaaaggcttcttcccaatggaatattcgaacctcggactcgaatatttttcgcctgactatatcgattttttctatcagcttccgcagtggaaaaaagatgaattgctaacgcagcaggatcttctttataaaggaatcagcgcgaagacgatcagcgatatttatcatcttctgtatgagcggacctgcggggggcggaaagcggcttttgatcttcagtccatgacagaagtcgagcagatcgaacagcgtggggaaacgctggttctatactgcacaaaccgggtgaatgaagaccggtttgagcggcaggcagatgtggtcgttctggcgacgggctataaagagaggctgccggaatgtctggcgcctgttgacagtttgattgaaaaggacgcgagcggccgctacgtgattacacgcgactacagactagtgacagctgcaaaatcaaaaaaccatatttttattcaaaacggagagctgcacacgcacggtgtcggtgcacctgacctgggactcggcgcttaccggaactcggtgatcatcaatcagctggccgggagagaagtatacaccgtcagccataaaacggtttttcagacattcggaacaggaatcgcggaaaaaacagctgtaccaaacggctaa

SEQ ID NO: 1326 - DNA, 1815 bp, Bacillus licheniformis
atgttgtttcaagatgaattaaagagggtcctcgatcctgacaggtggagagaagtcaatcggcgattgctggcgaagatgctttctgaatatatgtatgaggatatcattaagcccgatttcattgaaactgaagacggcatcaaccgctatgagctgagaacggccgaggataaggtgtaccggtttgccgccaaaccacgcatgttcgacagttttgacgcggtgccggagacgattgaagtcttcaagggcggacaatggacaaaacatgtgagcgcgattgaatttctcctggatattcagccgcatatcccgatgagtccggagacagcgggtcatttgatcaaggagttcaaccatacgatgctggctgatgcccaccttttggcaaaggatgcgcttacggctgacgagctgaccgaagccgattatgccgtaattgaaggcgagatgaccggccatccgtggatcgtctacaacaaaggaagaatcggttttggctatgatgactacctccggtttgccccggaaaatcagagagccaaacggctgctgtggatcgctgtacacaaagataccgcgtcatttcactcggttgaagggctcgattatgagacgctgattcataaagagcttgatgagctgactttaaggcaattcgctaaagtcatagaaaagcagggcgcagccagtgaagactattattatatgcccgtccacgaatggcagtggacaaatacgatcattcagcagtttcctgaagaaattgcttcaaaagcgatcattcctttaggggaaggcggagacgagtacctgccgcagcaatcgattaggacctttacaaacatcacaaacaaacacaagcatcatattaaactgccgatgagcattttaaatacgcttgtatacagaggcctgccgtcggaacgtacggtgatcgcgccgaaaatcactgagcatatcaaagggatcgccgaaaacgacgcatttctaaaagacgaatgccgggtgatcctgccaggcgaaaatgccagtctgaacgttgaccaccaatactatcactctcttgaaaaagccccgtatcaatatttggaaatgctcggcgctattttcagagaaagcatttatacgtatttggaagaaggagaacggcctgttacgctcgcttctttaacatacattgatcaaggcggcgtgccgtttatcaggcgcctgatcgaaaagtcggggctgtcagcggaggagtggatcggaaagctgtttgacaccgtgatgccgccgcttctgcatttcatgtaccgctacggaaccgtattttcaccgcacggacaaaatacgattctcgtcttaaaagatcatcagccgcacaggctggcgattaaagattttgttgatgacgtcaatatcagcgaccagccgcttcctgaactgagcggtttgacaggggatttaaaagccgttctcagaagcgagccgccggaagggcttgtgcagtttatctttaccgggcttttcatttgccatttgcgctatgtagccaacattttagaaaatgacggtctgcttcctgaaaagcgtctgtggaaagctctggctgatgcgattcttgattatcagcaaaaattccctgaactgcgtgagcgcttcgaattgttcgacttattcaagccggaattgacgaagctctgcctcaacagaaaccggatggtcgactacggctacaaggacggcgatgaccgcccgcacgcctccgaattcggaaaagtgacaaatgcgcttgcgaaatttaaaaaagaggccgcaaagctgtaa

SEQ ID NO: 1327 - DNA, 441 bp, Bacillus licheniformis
atgattgaagtcaaaccaataaacgcggaagatacgtatgagatcaggcaccgcattctccggccgaatcagccgcttgaagcatgtatgtatgaaaccgatttgctcgggggtgcgtttcacctcggtggatattaccggggcaagctgatcagcatcgcttcctttcataaagccgaacattcagagcttgaaggcgaagaacagtatcagctgagagggatggcgacgcttgaaggataccgtgagcaaaaagcgggaagcacgctcatccgccatgccgaagagcttcttcggaaaaagggggcagaccttttatggtgcaatgccaggacatctgtgagcggctactatgaaaagctcggcttcagcgaacagggcgaagtctacgacataccgccgatcggacctcatattttgatgtataagaaattgacgtaa

SEQ ID NO: 1328 - DNA, 834 bp, Bacillus licheniformis
atgaagccgctgaaaggaaaaatcgccctcgtaacaggcggaagcagaggcgcgggccgcgccatcgctgcagaacttggaaaagccggtgcaaccgtgtatattacaggccgcagcatcagaggggcttccacgaatcaatggcccggtacaattgatgacaccgtgtcacaaattgaagcttccggcggaaaggctattgctgtaagatgtgatcatacgaacgatgcagaaacagaggctgtcatcgctaaaattcgcgaagagcaaggaaaactggatattttgatcaacaatgtgtggggggcgcacgatctgggtgtcgaggcaaagcctttttgggaattgtcattgaaaaattgggatacgatgttcgccgccggggtgcgtgcccagctggcgacaaaccacttcgccgtgccgctccttcgcgaaaataaacaagctcttatcattcacacgaccttctgggatgagaacaagtacaccggacagttttattacgatttggccaagaacgcaatcgtccgcatggcgtacggtctttcattggaattaaaacgggacaacattgccgttattgccgtttcgccgggatttatgagaaccgaacttgtgctgaaataccatgaatcagatgaggcgcattggcgggagtcggaagatttaaggagaaccgaaacgccttattatgtcggacgcggaatcacagcattggctaaggatccggatgtgatggagaaaagcggacgtgcgttaagagttggtgatttagccaaagaatatcagtttaccgatgtggatggacgatatattccgccatttacgatatag

SEQ ID NO: 1329 - DNA, 963 bp, Bacillus licheniformis
atgagaggggatcgactgatatctattcttttaatgcttcaggcacaagggcaaatgacggcgaaagaattagcggaaaggctggaagtctccgagcgcacgatttacagggatatggaagctttaagcggagcggggattcctgttgtggccgaacgcggcataaacggaggctggtcattgcttgatgattaccaaaccactctaaccggcttaaaagaatctgaaatacgcgcactatttgttccgctttctgaacaattgcttgacgatctcggattaacccgcatatccgaagaagcccgaaataaactgattgcctcgctgccttcggaatatcgccaaaacgcaaaggatgtatggaaccgcatatatattgatacctgttcatggcgccataagaaagaaaaagcagaatcctttgaagtgctgaaagatgccatatggaaagatcaaaaattaaaaattgtctatcagcgggcagatggacaaacggctgatcgtgttgttgcaccgcttgggctggtggctaaaggggcgaactggtatctgattgcatctaaagaaaatggggagattcggaattacagggcttcacggattcaatctgccgtttttgtccgcgaaacgtttgataggcccgaaaattttgatattgctcacgtgtggcggtcttcaacaaaggaatttattgaaaggctgccgacgtatgaagtgcgggtgaaggcggcgcaggccatcttgccgaggctgtcgtttaccaatcattttgtgcggatcatcgaaacaaatgagatcgatcaggagggctggatccccgttacgctatcctttgatacggaagaagaagcaaaaaggtatatactcggattcgcagagcacatgaggatcattgaacctaaagaactgcacggaaagatacttaaaatggctgaatccatagttgcgcattataaaacctga

SEQ ID NO: 1330 - DNA, 3417 bp, Bacillus licheniformis
atgtctaacatcaatgaccagctgaagaaaaaaatcctcgtccttgacggtgcgatgggaacgatgatccaagacgccggtttgtccgccgcagacttcggaggcgaggcatatgaagggtgcaatgaatttctaagcattacggcgccccatgtcattcagggcatccacgaagcctatctcgaggctaaagccgatatcatcgagaccaatacgttcggagccacccggctcgttctggacgagtacgacctcgggcatcgagcctatgaagtcaacctcgcttcagtcaaactcgccaaagcggccgccgaaaagttttcaactcctgaatggcctagatttgtcgccggtgcgatgggtccgacgacaaaaaccctttccgtcaccggcggcaccacctttgacgaactgatcgataactacgaggaacaggcaagagcgctgatcacggggggagccgacctcttgctcctcgaaacgagccaggatatgctgaacgttaaagccggctttatcggcattagacaagccttcgaaaaaaccggcaaaacccttccgctcatggtgtcaggcacaatcgaaccgatgggcacgacgcttgccggccaggatatcgaatcgttctatatctccctcgagcatatgaaaccggtcagcgtcggtttaaattgcgcgacaggcccggaatttatgacagatcacatcaggaccctttcttccctagcgaggacggccgtcagctgctatccgaatgccggcctccccgatgaggaggggcaataccatgaatcaccgcaatcgctggcgaaaaaaatcaaggcgtttgctgaagaaggctggctgaacattgtcggcggctgctgcggaacgacgcccgcccatattgaagcgctggccgatgaagtagcccttctgcctccgcggacggttccttcgggagcaaagccgcacaccgtctcaggaatcgacggattaatttacgaagaaacaatgcgtcccctttttgtcggtgagcggaccaatgtcatcggctcgagaaaattcaagcggctcatcgccgagcataaatttgaggaagcatccgaaatcgcgagagcccaagtgaaaaacggcgcccatgtcatcgacatctgtctcgcagacccggaccgcgatgaagcggaagatatggaaggctttttaaaaaaagcgatgaaaaaagtaaaagccccgtttgtcatcgactcgacggacaaaacggtaattgaaaaggcgctgaaatactcgcagggaaaagcgatcatcaattcgatcaatcttgaagacggcgaagaacggttcgctgacatccttccgctcgtcaaacagttcggaggcgcactcgtcgtcggcacaatcgatgaagaggggatggcagtcaccgcggcaaaaaagctggccgtcgccgtccggtcgcatcagctgctcaccgaaaaatacggaataccggccagcgatatcatattcgatccgctcgtcttcccggtcggaacgggcgatgaacaatacatcggctcagctaaagaaacgatcgaagggatccgcctcatcaaagagcagctccctgaatgcttaacgattctcggcgtcagcaacgtctcattcggtcttccgcccgtcggccgggaaatcttaaatgctgtattcttgtaccacgcaacacaggctgggctcgattacgcgatcgtcaatacagaaaagcttgagcggtttgcttccattcctaaagaagaagtcgagatggctgaaaaacttctgtttcataccgacgataaaacgctcgcatccttcactgacttctatcgtggaaagaaaaaagcggacaaacagccgaaaacgtccctttccctcgaagagcgcctggccgaatacgtaatcgaaggtacaaaagaaggcttgattcccgatctcgaacaagcgttgaaaaaattcgccaccccgctcgacgtgatcaacggtccgctcatggacggcatggcagaggtcggacggctgtttaacaacaatgaactgatcgtcgctgaagttctgcagtcggcagaggttatgaaagctgccgtttcctttctcgaacaatatatggaaaagaaagacgacagcggcaaaggaaagatcattttggcaaccgttaaaggcgatgtccatgatatcggcaaaaacttagtcgacatcattttaagcaacaacggctacaaggtagtcgatcttgggattaaagtgacaccgcaggagttaattgaggcgatccgcaaagagaaccccgacatcatcggtctgtccggcctgctcgtcaaatcggcgcagcagatggtcgttacggcgaaggatctcgataaagcggatatttccatcccgatcatggtcggcggagccgcgctttcaagaaaattcacgaacatgaaaatttcgcctgaatataaagggccggttttatacgcgaaggacgccatggacggcctatcgctcgccaatcagctgcggacggacccgtcgcagtttctcgagaaaaaagaagccgctgcacccgccgccgtcgcggaaaaaaagcagacgaaagccgtaattgaaatgcttgaaaaacgggcgcacgttccgaaggcgccggtctttcagccggaagacttgaaacggcactatttgaaaaacatcgacctttcctatattgtgccgtatgtcaatgaacaaatgctgctcggccatcatctcggcttgaaagggaaagtcaaaaaactactggctgaacagcatccaaaagcactggagctgaaagaactgatcgacgagctgctgagagacggaaaagaacacggctggttcgatcccgcggtcgtctaccaatttttccctgcgtacagcgacggggattcgcttcatattttagatccagtgaacaaagacagcatccttgaaacgtttgtttttccaaggcaggaaaagcttccgtaccgctgtatttccgattacgtccgaccgaagggagagcttgattatgtctcgttctttgccgtaacggcgggcaggcatgtaagagctgccgccaaccgctttaaggaggaaggcgactacttgaaaagccatgcggtacaagcgcttgctcttgagctggccgaagggctcgccgaacggacgcaccaggttatccgcgaccgctggggcttccctgatgcacccgacttcacgatggaacagcgttttcaggcgaaataccaagggcagcgctattccttcggatacccggcctgtccgaatcttgaagatcaggaaaagcttttcaggctcatccagcccgaaggcatcggcgttcacttaacagacggcttcatgatggagcccgaagcttccgtatcagcgatcgttgtctcccacccggaagccacatatttcaatgttcattaa

SEQ ID NO: 1331 - DNA, 1830 bp, Bacillus licheniformis
atgggttttttggaggatataaaaaacaaaacgttaatcgctgacggcgcaatgggcacgcttctgtattcctatgggatcgacaggtgttttgaggaactgaacatctccaagcccgaagaaataagacgcgtccacgaagcgtatgtacaggccggcgccgacattattcaaacgaacacgtacggcgcaaacttcatcaagctgtccagatacggactcgaagacgaaacaaaacaaatcaacgaaaaagccgtccgcctcgcccgcgccgccgccggctccgcttatgttctcggtacgctcggcggaatccggacgttcaacaaaaactcgtattctctcgaggacattaaaagaagcttccgcgaacagctctaccttctgttaaatgagcagccggacggacttctgctcgaaacctattacgacttagaagaagcgcgcgaagttttaaagattgccagaaaggaaacggagctgccgatcattttgaatgtctcgatgcacgaagagggcgttcttcaggacggcaccccgcttgcggacggtctgaagcagctggcatcactcggcgcagatgtcgtcggcatcaactgccgtctcggcccttatcatatgatcagagcgcttgaagaagtcccgcttttagaagatgcctatctttccgtctatccgaacagcagcctcccgtcccttgtcgaaggcaggcttgtttatgagacggatgatgaatatttcagggaaagcgcggaggaattccgcaatcaaggcgcacggatcatcggcggctgctgcggaacgacgccgaaccacatcagagcgatggctgaggccgtcaaaggacttcctccagtcaccgaaaaacgagtgaaaatcagaaagaaagcggcgcttgccgttcaaaacgaaaggacagagcctgctcttgacgatctggcaaagcagaaacggtccattatcgtcgagctcgatcctccaaaacaattaaactttgagaaatttttgcacgccgcagaggagctaaaatcagccggaatcgatgcactgacattggcggacaactcccttgccacaccgaggatcagcaatgtcgcctgcggggcgctcttaaaacagcgcctcgatatgaggtcgctgattcatatcacatgcagagaccgcaacctgatcggcctgcagtcccatttaatgggactcgatacgctggggctgtcagacgtgctggcgattaccggcgatccgtcgaaaatcggcgactttccgggagcgacttccgtctatgacctgacatcgttcgatttgatcagcctgatcaagcagtttaacgaaggcttgtcctattcgggtaaaccgctcggcaagaaaacgaatttctcagtggcggccgccttcaatccgaatgtcagacacattgacaaagcggtgaaacggcttgagaaaaaaatcgcctgcggcgcagactatttcatttcccagcctgtctattccgaggagcagctcattaaaatccacaaggaaacgcggcatcttgaaacaccgatctatatcggcgtcatgccgctcaccagcagccgcaacgcggaattcatccacaacgaaatccccggcatcaagctgtctgattcaatccgcgaaaagatggcgctggcaggaaacgacaaacaaaaacaggccgaggaagggctcgcgatcgctcgctctctgcttgatgcggcgtgcgacctgttcaacggcatttatctgatcacaccgtttttgcggtccgatctaaccgccgagctgacggcatatatccatcagaaagaaaaggagaagacaaatgtctaa

SEQ ID NO: 1332 - DNA, 492 bp, Bacillus licheniformis
atggtgaaagaaagctcatttgatatcgtctcaaaggttgaactgcctgaagttcaaaacgcaatccagaccgctctcaaggaaatcggcacacgctatgatttcaaagggtcaaaaagcagcatcacactcgaaggagacgaactcgttctcgtatcagacgacgaatttaaaatgaaccagttgaaagacgtacttgtcggcaaactgatcaagcggaacgtcccgacgaaaaacatcgaatactcaaagcttgagaacgcttcaggcggcacggtcagacagcgcggaaaattagttcaaggcatcgacaaagaaaacgcaaaaaaaatcaataaccttataaaaaaatcgggtctgaaagttaaatcgcaagtgcaggacgatcaagtccgcgtaaccggaaaaaataaagacgaccttcagcaaatcatcgcgatggtgagggaagccgacctgccgattgatgttcaatttataaattttcgataa

SEQ ID NO: 1333 - DNA, 849 bp, Bacillus licheniformis
atgaaacctggacagcagctaacattgaaaatagatcataaagcagattacggttactttttgacggacggcgaaacggcggtccttctgcatcagagcgagatcaccgaggatattgacgggagagaagaggtcgatgtttttttatatgtcgatcacgaagatcgccttgcggctacgatgagaaagccgatcatcagcgctgaacaatacggctgggtggaagtcgttgatgccgtcagcggcatgggcgttttcgtcgatgtcgggctctcgaaggacgccctcgttgcgacagagcatctcccgccgtatgaatcagtatggccgcaaaaaggagacaggctgtactgtatgctgaaaatcacggggcacggaaggatgtttgccaagccggcgccggaggacaagatcagcgaactgtttactgaagcttcacccggcctgatgaataaagagctcaccgggacgatctaccgcttgatcgcatcaggctcttttatgatttccgaagccggcatcagaggcttcatccattcttctgagcgaaaggaagagccgaggctcggcgaaaagctgactgcaagggtgatcaaagtaaaagaagacggttctgtaaatctgtcgcttctgccgagaaagcaggatgccttgtcggttgatgcggaacaaattctgacttatatgagatcgagaaacggcgcgatgccattctgggataaaagcgatccagaggatatcagagagcgcttcaacatgagcaaagcagcatttaaaagggcgctcggccatctgatgaaacaggataaaatctatcaggaagagggttggacgtacgagaaaaaataa

SEQ ID NO: 1334 - DNA, 123 bp, Bacillus licheniformis
atgaaagatgatgataaaaagccggttgacaataacgccgtcaaccagcagaaaaaccggctcgccgaaaagaacagacaagccggtaaacaccaggaatcaaagaagcctcatcacctgtaa

SEQ ID NO: 1335 - DNA, 207 bp, Bacillus licheniformis
atgaaacattgctgctcagtttacattcatcgcgtttcggcaggaggggtcgtcaacttcggcggtgcgtacaaaatttgtccgatcacaatggaaaaagtggtcgagggatctggaggcccggatgtcgcgacagctgctgccggctttcttgatggagcgcttgcgccggccgttgaggaagggacagtcaccgaagacagctga

SEQ ID NO: 1336 - DNA, 861 bp, Bacillus licheniformis
atgaacgttcaccttttagcagacagcgcggcagatttgccgaaatctttttatgatgaacatcgcatctcatttattccgttaagggtgctgcttgatgaaaaagaatacgatgatcttctgacgattcagcctctggacgtttatgaagcgatgcgcgaaggcaaagcgccgaaaacgtcccagccgtctctgatgctgttcaagaacgcattcagcgagctggccaacgaaaataaacccgctctctatatcgccttttcctcagagctgtccggaacataccagacggctgtgatggcggcaaacgaagtcaaggaggagttccctgatttcgacctgcggatcatcgactcaaaatgcgcttcattaggctatgggcttgctgtcaagcacgccctcaaactcgcaactaacggcaatacaatacaagaaatcgagtcgtctgtaaaggacttttgcgaacatcttgaacatatttttaccgttgatgacttgacttatttggcaagaggcggaagaatcagcaaagcatcggcatttgtcggcgggctgttgaatattaaaccgcttttgcatgttgatgacggcaagcttgtcccccttgaaaaaatccggggcaaaaagaagctgctcagacggatgatcgaattaatgaaggaaagaagcgtcgatttgagcggacagacggtcggcatcagccacggagatgacgaagagacggccgaagaagtcaaacggatgatcgaagccgaattccagccggaggagatcgtcgtcaacatgatcggttcagcggtcggcgcccacgccggacccggaacattggcggtcttttttccggggaaagacaaaagataa

SEQ ID NO: 1337 - DNA, 843 bp, Bacillus licheniformis
atggtcatagcggaagcaaaaaaattgttcattgtcatcatcggcgccttgttaaatgccatcggattgaatctgtttctgattcccgccgatgtttacgccagcggctttacgggggtggcgcagcttttatcgagcgcgcttgaccagtacagcccgatttatttttcaacggggacgctattgtttattttaaacattcccgtcgggattctagggtggctcaaggtcgggcgctcatttacggtctacagcattttgagcgtggccttgacgacggtctttttggggatgctccctgaggcgagcctgtcaaacgacattttgctgaatgccgtgttcggcggggtgatcgccgcggtcgggatcggcctgacccttaaatacggggcttcaacgggcggtttggatattattgcgatgatcctggcaaagtggaaagacaaaccggtcggcacctatttctttattttaaacggtgcgattattttaacagcaggattattgaacggatgggagaaagcattatatacgctcgttacactatatgtgacaaccagggtgattgatgccatccacacccgccacgccaagctcaccgttatgattgtcacaaagaaagcggaggagatcaaagaagccatttacgggaggatggtccgcggaattacaaccgttccggcgaaaggcgcctttacgaatgaacagaaagaaatgatgatcattgtcatcacaaggtatgaattgtacgacttggaaaaaatcattaatgaagttgatccaaaagctttcacaaacgtcgtacagacaacacaggttttagggtttttccgcaaagattaa

SEQ ID NO: 1338 - DNA, 453 bp, Bacillus licheniformis
atgcggctgatttccatgattgtgatgctgctgtttgtcagtggatgcgggcaaaacggggatcaagtccccgataaggaggtatcaggggaagtggataacgggagtgtgacattgacggttgaacccgtccagaagcagggagaaatcgaatttcggatgtcggttgtaaaccatacggatgatgcggcagagtttgaattcagcagcggacagaaatttgagctgatcgtcagcgacaaagaagggaatgaaagataccgctactcgaaaggaaaaatgtttacacaggctttccagacgatgacgctcaatccgaaagagtcctacgattttactgatgtatggaaagaggtgcctgaacccggcacatacgaagtaaacgtgacatttttggggagatcggaacagtttgcaactttgagggccggcaaaacgtttgaagtgaaataa

SEQ ID NO: 1339 - DNA, 981 bp, Bacillus licheniformis
ttggaaaatgtatttgattacgaagatattcaactaattcctgcaaagtgcatcgtcaagagccgttctgaatgtgatacatccgtgcagtttggcggaaggacatttaaactgcctgtcgtgccggccaatatgcagaccattatagatgaaaagctggctgtttcattagcggaaaacggttacttttatgtgatgcaccgctttgagccggaaacacggatcgattttattaaagacatgaaggcacgcggtttgttttcttcaatcagcgtcggagtcaaagatgaagaatacgcgtttatcgaagagctgacgagagagaatctcacacccgagtacatcacgatcgatatcgcccacggtcactcaaacgccgtcatcaatatgattcagcacattaaaaaacatcttccggacagctttgtgatcgcaggaaatgtcggaacgcctgaagctgttagagagcttgaaaacgccggagccgacgctacaaaagtcggcatcggtcccggaaaagtctgcattacaaaaatcaaaaccggttttggaacgggcggatggcagctggctgcgctgcgctggtgcgcaaaagcggcaagcaagccgatcattgctgacggcggcatccgcacccacggagacatcgccaaatcggtcagattcggggcgacaatggtcatgatcggttcgctgtttgccggacacgaagaatcgcctggagcaacgatcgaaaaagacggcaagctctacaaagaatattttggttcagcttctgagtaccaaaaaggcgaaaagaaaaatgtcgaaggcaaaaaaatgtacgtggagcataaaggcgcgatcatggatacgctgacagaaatggaacaggatctgcagtcgtccatttcttatgcgggaggaaacaagctcgatgcgatccgcaacgtagactatgtcatcgttaaaaattctattttcaatggggatcaatattaa

SEQ ID NO: 1340 - DNA, 189 bp, Bacillus licheniformis
atgagaaacgaactgtttcaaatggccaaagcagccgtacatgcagctgaagcttcggcggattcaggcgaaaaggcgaaagccgttgcaagagctaaaaacgccctttcctcggcgtatgccaattcaactgatgccgaacggcgacagcttcacaatcttcaggagcagctagatcaactatcataa

SEQ ID NO: 1341 - DNA, 141 bp, Bacillus licheniformis
atgggtaaacgcagcaaatcaaaacggtttattcagcaaggcaaagactcgcttaaacagcatgccgccaggttcccttaccgctccacattagaagaggctgaacagaagagcggcccgacggaatgcggagggctgtaa

SEQ ID NO: 1342 - DNA, 813 bp, Bacillus licheniformis
atggagacaaaaccatatttaattgcattggacttagacggtacattattaaaagacgacaagaccatctcggaaagctccagcgaagtcatccgcaagctgcgggaagatggacattacgtgtgcatttctacgggaagaccgttcagagcaagctccatgtattatgatcagctccagctcgatacgccgatcgtcaatttcaacggcgcgtttgtccatcaccctaaagatgaaagctggggacgcttccatacatctcttgatctcgaggtggtcaaacagatcattgaagtcagcgaaacgtacaacgtacataatatccttgctgaaattgtcgatgatgtttattttcattatcatgacgaaaagctgattgatgtctttacgatgggcagcccgaatattacagtcggagatttaagaacaaacctcggccaggatgtgacaagcgtattgattcacgcaaaagaagaggatgttccggcgatccgctcctatctgtcagacgtacacgcagagatggtcgaccatagaagatgggcggccccgtggcatgtaatcgaactgattaaaagcggcatcaataaagcggtcggcttagagaaaatcacggactactacggaatcccgcctgagcgggtcattgccttcggcgatgaagacaacgaccttgaaatgcttgagttcgcaggctgcggagtagcgatgggcaacggcatcgaaggggtaaaaagcgttgcaaacaaggtcacgaaatcgaatgaggaagacggaatcgcagtctttttaaaggattacttcgctttataa

SEQ ID NO: 1343 - DNA, 768 bp, Bacillus licheniformis
gtgatcataatcgaaaagcagcatatttcaaacattcctcttttgcatattgtaaaagaggagaaaaaagagaaagctcttcctcttgttttcttcatacatggttttacaagcgcaaaagagcataaccttcacttcgcatacctgcttgccgaaaaaggaatgcgcgtgattctgcccgaggctctctatcacggggaaaggaatgaacagctcacccaggaagagctcgccccgagattttgggagatcgtcacgaatgaaatcaaagagctggaagtgctgaaaaaccactttgaacgggaaaacatgattgaaaagggccgcatcggcgccgccggaacatcgatgggcggcattgtcacgctcggcgctttgactcaatacgaatggattacaactgccgtcagtttaatgggcagtcccgcctatgtagaattttttgatcagcagctcgcatttatgcgtgaaaagaaaattgaacttcctatcacagaagaacaaatcgatcagcagcgcgaagaactgaagcgttttgacttgagtctgcagccggacaaattgaacatgaggccgcttttattttggcacggcaaacaggacggcaccgttccatttgctttaacgcgccgcttctatgaatcgattattccactgtatgaagctcggcctgatttgctgcattttatcgaagatgagcgggccggacataaagtatcgagggaaggccttttgaaaacagtcgaatggtttgacgcgcacttgtaa

SEQ ID NO: 1344 - DNA, 309 bp, Bacillus licheniformis
gtggatgaagcattaaaagaaaacatcatgggcgcccttgaacaggtcgttgaccctgaattgggcgtcgatatcgtcaatctcggccttgtatacgacgtagatatggatgagaacggcaaaacagacgtgaccatgactttgacttcaatgggctgtccgctggcgccgatcatcgtagatgaagtcaaaaaagcgctcgcagatattccggaagtcaaggaagttgacgttcatatcgtctggaatccgccttggacaagggacaaaatgtcgcgatatgcgaaaatcgcacttggtatacaataa

SEQ ID NO: 1345 - DNA, 186 bp, Bacillus licheniformis
atggcctctcccgttattaatgaaaaagaacgcttttacaagcgttctttttttattgcaataactgctgccggcacattctccggtttgaaaagcggggaacccgggaaggtaagaacggagcacgaccgagccgaagaaaaggaccgccggcgggaggaaagaaccaatatgaaaggtgattga

SEQ ID NO: 1346 - DNA, 1038 bp, Bacillus licheniformis
ttgaaaataggtattataggtgctactggctatggaggggcagaaatcatgaggattatgaggactcacccttatgcagatgaatgcatattgtattcatcgagtgatgagggagcccgctatgacgccgcatacccgcaccttgtgaaactgatagatcaacacctgcaaccgatcgaggttaagaggattgcgaatgaaatcgattttttatttatggcagcgcctccggggatatccagccggctgacgccacagtttgatgcatatgacatacccatcattgatctgtccggcgatctcaggatacagaacccaagcgtctatgaaaagtggtataaaagggaagccgcgcctgaacacgtgcttcaaaaagcggtatacggactgtctgagctgaatcgggaagacattaaaacggcgcagtatatagccaatccaggatgttttccgacagcggttcttctcggcttggcgccgctcgtcaaaagcggcagcatcaacgaatcttttgtcatcatcgatgcaaaaacaggggtatcgggggcaggcagaaagccgtcgatgggcactcatttttcagaggtcaatgacaattttaaaatatacaaggtaaacgaacaccagcacacgcctgaaatcgagcagactgtcaaacagtggaactccgcatttaaaccgatcacattcagcacgcatttagttccaatgacaagaggcattatggcgaccatctacacagagctgaaagacagcatggatgccgaacagctgcagcttattttttctaaattttataaagattcatactttgtcagagtgagagaaacgggttcgttccctgccacaaaagaggtgtacggcagcaatttttgcgatatcggcgttaccgtcgatgaacggacgaacagagtgacaatcgtgtcagtgatcgataacttgatgaagggagccgcgggtcaagcggttcaaaacttcaacattatgaacggcttgagcgaaaccgccgggcttgaatttacgccaatttatccataa

SEQ ID NO: 1347 - DNA, 1221 bp, Bacillus licheniformis
atgattcaggtgagtcaagacagcataaaaaaaacagacggaagcgtcgcttcgcctaagggctatcttgcaaaaggggtccactgcggcctccgctattcaaaaaaggatcttgggatcatcatcagctcaagaccggcggtgagcgccgccgtttatacccaaagccactttcaggctgcgccgatcaaggtgacgcaggaaagcctcaaaaaaagcgcgcatctccaagccgtcatcgtcaacagcgccaatgccaacgcatgcacgggagagcagggcttaaaagatgcttatgaaatgcgccgtcaaagcgctgatatgctcgggatcgagccggatctggtggccgtgtcctcaaccggcgtcatcggcgaatacctcaatatggaaaacatcacaaaaggcatcagccttctcgccgagacagagcctgccgaaggcgatttcgaagaagcgatcttaacgacggacaccgtgatcaaacaaacgtgctatgaactgatgatcggcggccaaaaagtgacgatcggcggagcggccaaggggtcgggaatgatccacccgaatatggcgacgatgctcggctttgtcacaacagatgcatgcatcgaagaaagcgcgctgcaaagggctttaagggaaatcacggacgtttcgttcaaccagataacggtcgacggcgatacatcgacgaacgatatggtgctcgtcatggcgaacggatgcgccggaaatgagcgcctccatgaagaacacgaagattggccggttttcaaaaaaggcctgcagcttgtctgcacagacctcgccaaacaaatcgcaagagacggggaaggggcgacaaagctgatcgaggttgaagtgaacggcgcgaaaagcaatcttgaagcgcaaatcatcgccaaaaaaatcgtcggctcaaaccttgtaaaaaccgcggtttacggaacggatgcgaactggggcagaatcgttgtcgcaatcggggacagcatggctgctgtgacaccggagaaggtggaaatccgcctgggcggccaatgcctatttaaaaacaacgaaccccagccgttttcggaagagctggccaaaacatatttagaaaacagcgaagtgaaaatcgaggttttcatgcaggaaggtgaaggaaagggtacggcttggggctgcgatttaacttatgaatacgtcaaaatcaatgcgagctatcgtacgtaa

SEQ ID NO: 1348 - DNA, 777 bp, Bacillus licheniformis
atgggtaaaacaatcgtttttaaatgcggcggaagcgtcatccgcgaactctcggacgaattttttcaaaacctgaaagatctgactgaaagcggctggaaaatcgcgctcgtgcacgggggcggacccgatattacaaagatgctgaagaagctcaatattcgaaccgaattcgtcaacggacagcgcaagacgacaaaagcggttcttgaagtcgctgaaatggtcctgtccggttcgatcaacaaatttttcgttgctgagctgacaaagcacgggcttccggctgtcggcgtatcgggaaaagacgggggactgctccttgcagactatttaaatgaaaaggaatacggtcaagtcgggcgcattaaaaaagtaaacggccaaatggccgaagcgctcatggaaaaaggatttattccggttatcgcacccctctcgatgacggatggctgtgagaccttgaatgtgaacgccgatttggcggcgtcggctgttgcggcagccttgcgcgctgacaaattgatgtttgtgacagatgtcaaaggaattatgaaaaacgaagaattgctgaaagagctgacgcccgaagacatcgaaagcctgattgctgaaggcgtgatctcgggaggcatgataccaaaagtgcattccgcaaaagaggctcttacagatgaagtggaagaagtaatgatcgtaagcgggaaaggatctttcctgacgaaagacgatttcatcggcacgaaaatcatcaaacaaaaggaggccgtatcgtga

SEQ ID NO: 1349 - DNA, 1158 bp, Bacillus licheniformis
gtgagtcacttatttcagacgtacagccgctggaatatcaatattaaaaaagcgaaaggcacgatcgtccaggatgagaaggggaacgcctatctcgatttcgtccagggaatcgcggtctgcaatctcgggcattgccccgattcagtaacggctgctctcaaaaaacagcttgacgatgtctggcatgtttccaatttgtttcaaaatgagcttcaagaaaaggttgcacagctccttgccaaaaacagtgcaggcgatctcgtcttcttttgcaacagcggggcggaagcgaatgaaggggcggtgaagcttgcgcgaaaacatacgaaaaaaacaaaaatcgtaacctttcagcaatcgttccacgggcgcacgtatgcgggaatggctgcaaccggacaggaaaagatcaagcacggattcggaccgatgcttgaaggattccattacctcccttacaacgagccgaaagcatttgccgaattgcaggacgaaaaagatatcgcggcggtcatgctggagccgattcaaggcgaaggcggcgtcatcccggcgagcagagaatttctgcagagcgttcaagacttttgccgagataagcaggctctccttatcattgatgaagttcaaaccggaatcggccgcaccggtaaagcattcggatatgaacacgaagggctgtcacccgatatcgtcaccgttgcgaaagggctgggcagcggttttccggtcggagcggtcatcggcaaaaaagagctctcagaagcgttttcgccgggctcccacggcacgacattcggagggaacatgcttgcgatggctgcggcaaatgccacgttggagaccatttttgacagaagctttcttgaagaagtgagcgccaaaggagcatttttgcatcaacagctgaaagataagctccaatttccgcttgtgaaagatatccgcgggaaagggctgatcgccggaatcgagtgcaaagaacccgtgcagccgctgatcgaagcgcttcaaaaagaaggcctgctcgttcttcctgcgggtccgaacgtcatcaggcttctgccgccgttgacggttgcgaaaagcgaaatcaaagcggccgtggagaagctgaaagatgtcatggcaaatcattcggctgtaaagcagtaa

SEQ ID NO: 1350 - DNA, 1065 bp, Bacillus licheniformis
atggaaggatatttagttcttgaagatggtacatccttcagcggagaactggacggtcttgacggctgcaccggtgaagtcgtcttttttacgggcatgaccggttatcaggaggttttgacagatccttcatataaaggccagattattgtctttacgtatccgctgattggcaactacggaattaatggaagcgatgctgaaagcaaacagcctcaggtgagaggggtcgtcgtctatgaagcgtgcgacagattttcccaccatcaggcgacagaaagccttcgggaatacttggcgaagtgggatgttccgcttttgtcccacgtggacacaagagcggttgttcagcatatcagggcaaaagggacgctgaatgcgaggctgacgaaacaaaaggacgacatcccggctccgcgccagctggaaaactatgcggcacaggtttccggacaaaacgaaaacggcgctttaggggaaggcaatacgcatattgcgctgatcgatttcggctataaaaagtcgatcgcttcatcgctagcaaaccggggctgcaaagtgacggtcgttccctatcaagagatggacggcattgcgaagctgaatccggacggaatcgtcctttcaaacgggccgggcgatccgaaagcgatccttccatatatggatgcactccggggtatcatttcttcctatccgacgctcggcatctgcctcgggcaccagctgatcgcgctcgcattcggaagcgacacgtataagcttccgttcggccacaggggagccaatcatccggtcatggacaaagagaccggacgcgtgttcatgacaagccaaaatcacagctatgtcgtcgatcgagacaccatcagcgaaaatgaattttccgtcaggtttcatcatgtcaacgacggttcagtagaagggctgatgcataaaacactgcctgtcctatccgttcagtttcatccggaagcccatccgggaccggctgaaagcgaatggatattcggagaatatttgcagaaattgaacgaagcaaggagagagatcgcccatgcctaa

SEQ ID NO: 1351 - DNA, 3090 bp, Bacillus licheniformis
atgcctaaagaccaaaccatcaaaagcattctcgttatcggatcggggccgattatcatcgggcaggccgctgaattcgactactcaggaacacagggctgcatggcgctgaaaagcgaaggctaccgggtgattctcgtcaacagcaacccggcgacaatcatgaccgatgaatcttttgcagatgaaatctattttgagccgttgacagtggaaagcctcatacaaatcatcaagcgcgaaaaaccggatggactgctcgccaatctgggcggacagacagcgctgaatttggctgtcgagcttgaaaaggccggcattctgaaagcgtacggggtgaagctgcttggaacatctgtcgatacgatcgaaaagggtgaagacagagaaaagttccgcgccttgatgaaagagctgaatgaacctgtgccggattcagaaatcgttgacaatcaggatgatgcgcttcgttttgcgctctcaatcggttttccgattatcgtgcggccggcctatacactgggcggaaaaggaggcggcatcgcggcgacaaaagaggagtttctgcctttaatcgaaagcgccctcctcgcaagtccgatccatcaatgccttgtcgaaaaaagcattgccggttttaaagaaatcgaatacgaagtcatgcgggacagtaacaatacatgcatcaccgtctgcaatatggaaaacatcgatcctgtcggcgtccatacgggagattcgatcgttgtcgccccgtcgcagacattaacggatgcggattatcaaatgctgcgttctgccagcttaaaaatcatttccgcgctcgatgtcgtcggcggctgcaacattcaattcgccttggacccggagagcaaaaactattatgtcatcgaggtcaatccgagagtaagccgttcatcagccctcgcctcaaaagcaaccggctatccgatcgcaaaaatggcggcaaaactggctgtcggctacacgcttgccgagctgaaaaatccgctcacagattcgacgtatgcaagcttcgagcctgcgcttgactatgtcgtcgtcaaatttccgcgctggccgttcgacaaattcaaacaagccgaccgcaagctcggcacgaaaatgaaagcgacaggggaagtcatggcgattgaccgcaatcttgaagcggccctgcaaaaagcggtcgcctcccttgagctgaaaacatcaggaacacatttgcccgaacttggcggcgtatcttctgaagtgctgtggaagctgcttgagacccctgatgaccgccgtttctttgcggttatggaactgctgagcagggggacttccatcagcgaaatacacgagaaaacgaaaatcgatgattatttccttcatgtgttttctaacatcattcagctggaaaacacgctgatggagcagggagactcgttgtccgtcagccttttgaaaaaggtgaaagaaaagggatttaccgactttacgatcgcttccctcaccggaaagacggaagaagaagtgcgcgcgctccgcaagaaaatgggcattgccgcatcctttaaaatcgtcgatacatgcgcggctgaatttgatgcgaagacaaactatttttactcaacgtacttcgggaaaagcgacggagacatctctcaaaaaacgaaaaagcgggccttgatcatcggttccggcccgattcggatcggccagggggtcgagtttgactacagcgccgtgcacggcgtcatgacgctgaaaagcctcggatttgaaacgatcatgctgaacaacaatccggaaaccgtcagcacggattatgaaatggcggaccgcctgtactttgaaccgattacacccgagcatattctcaatgtcgctgaagcggaagacatcgactttgcgattgtgcaattcggcggccaatccgccatcaatgtagcgcaagcgattgaaaaagcgggcatcaccctgcttgggacatcatcggaaacccttgacatacttgaagaccgcgatcaattttatcagctgcttgacgagctcggcatctcccatgccaaaggagaaacggcttcatcaaaagcggaagcggtgaaaaaagcgaacgaaatcggctatcctgtgctgatcaggccgtcatacgtgatcggcggaatgggcatgatgatcgttcactcagaagcggagctcagagagctgctgggcggggcatcgcaaatgccttacccgattctgatcgatcaatacgtatcaggaaaagagtttgaaatcgaccttgtcagcgatggcggcgatctttatatcccgacttatatcgagcatattgaaaaagcaggcgtccattcaggtgacagctacgcgattttgccggggccttcggttactccggagatgaaaagcgccgctcgggatgctgccgcaaaaatcgtccgcaagctcggatttaaaggcattatgaacattcaatttatagcggattcggatgagctgctcatccttgaagtcaatccgagggcgagccggacggttccggttgtcagcaaggtgatgggagttccgatgatcccgcttgcggcgaaactgttagccggttcgtcactcaaagaactgaagcccgccgccaaaaattcacgcggtgttgccgtgaagtttccggtcttttcatcgcacgccattcaagatgtcgatttgaagcttgggccggaaatgaaatcgaccggtgaaggcatgtatgtcggcttcaatccggaaagcgccctgaagaaaatctttgcaggaatctggcaaacgaaaggctgcatttacatggaaggagccggcgagctccgttctctcgcagaacaggcgggcttcaccgtacagtcggacgattttccgggctggatcaaacggaaggacaaagcgctgcacatccatttagccgagtcaaaagaggcgagaaagcagaggatagaagccgtcactcacggcgtggcggtgatgacggaagaagagacggtgcgggcatttttgacgagcgggcatggaacgactaaagccgtgtcgcttaaagatttatataaaaaggaagtggagacatgtctactgtaa

SEQ ID NO: 1352 - DNA, 951 bp, Bacillus licheniformis
atgtctactgtaaacatcggggcgacccgggagatcaatctgtcaggcaaggatttcttaagcctgaaagacttttcaaaagaggagatcgtctatttgctgaaagaggcagcggcaatgaagcgaaataaaattcaagacatctttaaaggaaaaacattggcgatgatctttgaaaaatcgtcgacgagaacgcgcgtatcgtttgaagccggaatggcgcagctcggcggaaacgccctgtttttaagcagtaaagacatgcagctgggcagaggggaaacgatcgcagataccgcgaaagtgctttcgcgatatgtggacgcgattatgatccgcacattcgaacacgaaaaagtcgaagagcttgccaagcacgccgagattcccgtgatcaacggattgaccgatctttttcatccgtgtcaagcgcttagtgacctattaacgattcaagagatgaaaggaacattaaaagggctgaaagccgtttatgttggcgacggaaacaatgtcgcgcattcgctgttaatcggctgcgcgaaagtgggatgcgacattacggtggcttcacccaaagggtatgagccgaatcaggacgtggtgaaactggccgagacattcgccgaagaatccggtgcggccgtcacgatcacaaatgatcccgtgtcagccgttcaacaagcggatgtcatctattctgatgtttttacaagcatgggacaggaggaggaagccgaagaacggatgaagatttttgctccttaccaagtcaacggaacgcttgtctcccatgccaagcctgattacatctttctgcactgccttcctgcccaccgggaggaagaggtcaccgcagagatcattgacggtccgaattcagcggtatttcagcaggctgaaaaccgcctgcacgtccaaaaagctttattaaaagcactgttatcttaa

SEQ ID NO: 1353 - DNA, 813 bp, Bacillus licheniformis
atggattttttagtgttgatcaagtatatccttttagggttgcttcagggattcacagagccgatccctgtttcgtcaagcggccatttggtgctggcacagcactttttgggcttgaatattgaaggcttcagttttgagcttttgatgaatgccggttctttaattgccgtactgctcgtttataaaaacgatattttcaggctggcggtaaacgggctgtcttatgtcacatcaaaaaatgaaaaaggaaaagcggacttcaggtttatcatctatctgatcatcgccacgattcctgccggtgtcatcggcgttttatttgatgatgagatttcggctttctttaaagacggcgtccggatcaccgcagttactttgcttattacgggtctggcattgtttcttattcgaaatttgcgcggccggaaaagcgacggcgaaatcaggctgagagacgccgtgatcatcggcttttcgcaaatggttgcacttgttcccggcatcagccgttcgggagcgacgatcgttcctgcgatggcgctcggcctcaaatctgaaactgcgctcaggttttcatttttgctttacataccggtcagccttggcggaaccattttaagcattaccgatatttttcatgatccgcgtttaggagagctttttcttccttatttattcgcgttcatcgcatctgttatagctacatacttctcattgcgctggttcatgaatattatggcgaaaggaaacttggtttatttctcgatttactgctttgtcatcggcatcgccgttttgatattcgcctaa

SEQ ID NO: 1354 - DNA, 471 bp, Bacillus licheniformis
atgggacagcagcgtcaattccggccgggccaaaaagcgcccaataatggagtgtatgtggaaatcggcgaaacgggaagcatggttcagaaccctcagcaaatcaaattgagcgccggcgagttcttccctgaaacctccaatcataaccggctctggacatataaaagaaagaccttaaaaaaacagccgtcggtttttctgccggctgtctgtctaaagcaaaaaaccccgcttttagaagccggggttttaatgttgacttgcatcctgtttaacaggcataatttctccaagaacaataacggctgcggtgatgataaagcccataatgacactggtttgaaggtcatacccagcaccgttcatggcgccgacaatgtagcaggccatctgcgtcaaaagaaatgtccagaaaaaagcgaccacaaatcgcacgtttcccacctcgtccttctcattcaattctaa

SEQ ID NO: 1355 - DNA, 135 bp, Bacillus licheniformis
atgatgaaaaatgaacttttatcaaatgccctttttgatatttctgaaatcggagttgaaagccctgtcttgttcactaaaatgtcttttccagccggctatgtatatggtatgataagttttagaattgaatga

SEQ ID NO: 1356 - DNA, 735 bp, Bacillus licheniformis
atgaaaataaccgaccgtttttttcaagtggatacagaatggaatgtggttcatcttccgtataggccgaacggttttctggtgttcattttcggcgaccgaacacatttcgtcggggaagatacgagcttctggcttcagcattacggaagaagtcagcttcttacgagcctgaaaaacaaaggctacaccctggtaaacagcaatttgttcggcaggcactggggctccgaaaaagcggttgcatacgccaaacagctgattcattacgtgttcaaacaggaaatcttaaatgaaaaaattcatctattggcggaaggcacaggcgcgctcattgcagatgaactccttcgctcgatcccgaaccaaatacgttctgcagcgatggttaatccttgcctcgatcttcaggctcatcataaaagagaaaaagaaaacaagtttttctacaaacaatttattaaagaaattgccgaaagctacggaatttcggagcgggaggctgccgattatccgttcaaaggcatctccccttatcacaatctcgtgcccgttcatatatggcaaaggctgaacggttcgccgtatccgtatatgatccatgccaaaacgtttgaggagcgccagcttaaaggccgtcacagcgtggggcttaccttgcacctgtctgaacatcctcagcgcattcattcagcaatcgcgaactttttcaaaacgcatgaaaaagtcttatag

SEQ ID NO: 1357 - DNA, 576 bp, Bacillus licheniformis
atgaagccggcacttgtatatggagcagatgagtttttcggcctttcattttgtgaacatcttcttgaagagggtgtaaacatagatgtcaaactggagcagacaagcgacgaaaaaaagctgatgtaccttgaagaacggctgatgtggctgggcagaaaccggcatttccgcctcattgaaaaagagcttgaagccccatacgaacaagtcttcatccaatacacaggctccgtgccggaagaggcgcttgctgccgggattgaaaacaagcctgttattctgtttgtctatcaagaccaattcgaagaggatttgcgggccggcatcgaggaaaagggcgttgaactcgtcgtgcttccggaactgttcggcccgtgggacatcaaggcagacgataaacaaaacagagacggggcgatttttgtaaacgacgcggccgcacaagctgctgcctgtgctgtccaaaaagacttttcagcattgcggtttgtacagaagacgccatacgaaaaagccgatgagatcattgaagaatggagtagacaaatgtctacatttttcgacaaaaaataa

SEQ ID NO: 1358 - DNA, 954 bp, Bacillus licheniformis
atggtgtacaggcttgtcgcgatttttttcattctcctggcgctaagcggctgcggacaatcgccgctgaaagggaaaattgaaaaagtcggtttgcttgtccctgatacgataagtgatcaagtatggggaaccaaaggatataaaggattattaagaatacaatccgtctacaatgtcgatgtctattataaagaaggaatcgataatgacgcggctattaaaatggctgtagaagattttcacaaaaaaggcgtcaatctgatctatgggcacggaagcgaatacgaaaaagcctttaatgagatatgcaaagattatcccgatattcattttgttttaatgaactctaaagccgaacaccaaaatgtgacaagcatatcgcttgagggagaagcgatggggtttttcggcggaatgacggcggcccatcagtcaaaaacaaagaaaatcggcgtgctcgcaacgtataaatggcagcctgaagtggaagggtttgccgaaggggcaaaatacctcgatccggacattgaggtaatgacagaatacgtcggccagtgggacgacagcgaaaatgccgtcaaactgtatgaaaaaatgaagaaggcaggcgcggatgttgtgtatccggccggagacgggtataatgtccctgtcattgaacaaatcaaaaaggacgggctgtacgcgatcggctatgtaagcgaccagtcggaattgggtgagaatgtcgttttgacaagcactatacagcatgtagacgacgcttatgaactcaccgccgacgagtttaataaaggaacgcttaaaggcggcaagcggtcctttgacattcaagaaggcgtcatcgagatggggaaattcagccctgttgtcgatccgtcatttcaagaagagatgaaacggctgattgacgaatacaaaaaaacaaacaaactgccaaacgaacattga

SEQ ID NO: 1359 - DNA, 186 bp, Bacillus licheniformis
gtgcacgaaaaatcgatggaatttttgcaaattgccatgaaatacgttccggaagcgaaagaagagatggagaaagcgggaatcgaactttcgccggaaatgcttgagccgttcatgaacctgtttacaaaagtgatggcggaagcttacgagctcggtaaagcggacgccggttctgacgcctga

SEQ ID NO: 1360 - DNA, 240 bp, Bacillus licheniformis
gtggcgaacgacgattttttcacaaaaatgatgtttggctcaaatgcacccgccaggcatgaagaagagccggatgcggaatctgaaaccgtcgaagacgctgaagtttcccaggaagccgattacatgcatgtgttgcatcaggttggagaaatcatggattcaatcgatgaactgaagcctgtgtttaaagaaatcggctcaatggtcagcgctttgaaaaataagatgtccatataa

SEQ ID NO: 1361 - DNA, 939 bp, Bacillus licheniformis
atgaaagctggaattattggaatcggccggtacatccctgaaaaggtgctgaccaatttcgacttggaaaaaatggttgaaacttctgacgagtggattcgtacaagaacaggcatagaagaaagaagaatcgcagccgaagatgagaaaacgtccgatatggctgtggccgccgcaagaagagcgatggaagatgcaaacatcgagccggaagatcttgatatgattctcgtcgccaccgttactcctgatcaggcattcccgacagtgtcctgcatgattcaagaaaagctcggtgcattcaatgcctgtgcaatggatatcagcgcagcgtgcgccggttttatgtacggcttagtcactggaaaacagtttatcgaagccggcacatataagcatgtgcttgtcatcggagttgaaaagctttcaggcattacggactgggatgaccgcaataccgccgttctgttcggagacggtgcgggcgccgcggttgtcggccctgtcagcgacgataaagggattctgtcctttgaactaggtgcagacggcagaggcggaaaacacttgtacttggatgaaaaagatcatacaatcatgaatggcagagaagtgttcaagtttgccgtccgccaaatgggtgaatccagtgtaaatgttattgaaaaagcgggattatccaaagaggatgtcgactttttggtgccacaccaagccaacatccggatcatggaagcggcgcgcgaacgtttggagcttccggtcgaaaaaatgtcgaaaacggttcataaatacggaaacacatcagctgcttctattccgatttctcttgtggaagagcttgaagctggtaaaataaaagacggtgacgtcattgtgatggtcggcttcggcggaggtttgacatggggagccatcgccatgcgctggggccgctaa

SEQ ID NO: 1362 - DNA, 1239 bp, Bacillus licheniformis
atgaatagtaaaagagtagtcattaccggattaggagctttatcacctcttggtaatgacgtcaaaacaagctggaacaacgcgatcaacggggtttccggagtcggcccgataacaagggtgaacgcggacgagtatcctgctaaagtagccgcagaactgaaagattttaagatagaagattatatggataaaaaagaagcgagaaaaatggaccgcttcacacaatatgccgttgtgtcggcgaaaatggccgtggaagacgcgggcctcgacattaacgagagcaacgcagaccggatcggcgtctgggtcggttccggaatcggcggccttgaaacgcttgaacagcagttcgaaacatttttaacaaaaggaccgcggcgcgtcagcccgttctttgtaccgatgatgattcctgatatggcgaccggccagatttcgatctctctcggtgcaaaaggggtcaactcttgtacggtgacagcttgcgcaacggggacaaactcaatcggcgacgctttcaaggtcattcagcgcggcgatgccgatgtcatgatctccggaggaacggaagccccgcttacaagaatgtcatttgccggcttttcggccaataaagcgctctccactaatccggatccgaaaacggcaagccgtccatttgacaaaaaccgcgacggcttcgtcatgggagaaggagctggaatcgtcgttcttgaggagcttgagcacgcattaaaccgcggagcgacaatctacgcggaagtggtcggctacggatcaacgggagacgcctatcatatcacggctcctgcgccaaatggggaaggcggcgtcagagccatgaaagaagcgatcaaagatgcgggtctgtcccctgtggacattgattatatcaatgcgcacggaacaagcacaccgtacaatgataaatttgaaacgatcgcgattaaagaagtgttcggagagcatgcctacaagcttgccgtcagctcgacaaaatcgatgacagggcacttgctcggggctgccggaggcatcgaagcgattttctccgtccttgccattaaggaaggcatcattcctccgacaatcaatatcgaaacacctgatgaagattgcgatctggactatgtaccggacaaagcccgccgccaggacgtgaatgttgtgctcagcaactcgcttggtttcggcggacacaacgcaacgctgattttcaaaaaatatgaataa

SEQ ID NO: 1363 - DNA, 729 bp, Bacillus licheniformis
atgagtatagcaagcacgtatgaatggcttgaacaggcttcatccgtgcaggaattgtcaaactttctcatcccgtactttaaaggcgcttcaaaagcggatgcggcggcgattgtcagccacctgcagacccacggcatgttccgttcgtggacggacggcgaacgtacgatgaagcagcttaagaaaaacggcgtatttcagcatgtcagacgggaagaacagctgctctgcaaaagatggaacgggccggatgttccgattttcatcctgccggtcgatgaaagaaaccgcaaaatccgcgtcgaattcggctctaaatcaggccttgcgttcagcgacaaattatttttgtttttatcggccgatcttccccggtcatcgatttctgcgatcatgacgcacgaatataatcacgtttgccggttagaaaatatgacgaaagaagaaaataagatgacgctgcttgatacaattattctcgaaggcatcgcagaatatgccgtttttgaacggttgggggaagctgaaacagccgcatggacgtcatattacaccgaaaaacagcttcgccattttcaagaccggttcgtaaagccgcatttcgagctgcgccgacacgatggccggctattctcaaaaacatttatcggctcgaaatttgaaggttgccgatgttttagcctttccgtcagaagactttataaagctatcgctttaaaatactaa

SEQ ID NO: 1364 - DNA, 975 bp, Bacillus licheniformis
atgagcgcattgctggaagtcaatgatttaaaaacttattttttcagaaaaaagcagccgatacccgcagtggacggcgtcgatttttcaattaaaaaaggggagaccgtggcgctggtcggcgaatcgggatccggtaaaagcatcacgtctctgtcaatcatgggactcgtcgagggctcgggcggaaagatcatgaacggttctatcaagctcgaaggacgggatctcgttacatacaaggaacaagatttatgcaagatccgcggaaatgaaatctcgatgatttttcaggagccgatgacctcgctcaatccggttttgacgatcggcgaacaaatcacagaggtgctgatctatcataaaaagctatcgaaaaaagaagccgccaaaaaagcgatagaattattaaagcttgtcggtttttcaagggcaggcgagctgatgaaagaatatccgcaccggctgtcgggcggcatgaggcagagggtcatgatcgccattgccttaagctgcaatccgaagctgctcatcgcggatgaaccgacgacagcgcttgacgtcaccattcaagcccaagtgctggaactgatgaaagacctatgcgacaaattcgatacctccatacttctcattacccacgatctcggcgttgtgtccgaaattgcggaccgcgtgatcgtcatgtattgcggacaagttgttgaaaatgccacagtagacgagctattcgacgaacccctgcatccctatacaaaaggactgttaaactccatccctgtcattgaaggctccattgaaaaattaacagccattaaaggaaatgtgccgacgcctgacaaccttcctgccggctgccggttcgctccaaggtgtccgagcgcggtcgacaaatgctggggggcgcagccagacttgaaaacgcgtccggacggccggtctgtcagatgttttttatatgaggagggagaataa

SEQ ID NO: 1365 - DNA, 1023 bp, Bacillus licheniformis
atgacttcatcagctgaacaattacagcccggacaggaaatgaacccacaacaatcccttctggagctgaaagacatcaaaaagtactttccgatccgctcagggatatttcagaaaaaaatcggcgacgtcaaagcggtggacggcatcagtttttcgcttaaacgcggcgaaacactcggcattgtcggtgaatcgggctgcggaaagtcgaccgccggacggacgatgatccgcctttataaaccgacggcaggacagatcttttacaaaggccgcgacatttcaagtttgtcggaagaagcgttgagaaagagcgtccgcaaaaacatccagatggttttccaagatccgtttgcctcactgaatccgagaaaaacgctgcgttccatcatcaaagaacccttcaacacgcatcatatgtacaatttcaaagagcgcaacgaaaaagccgaagagcttttggctaaggtcgggctgcacccgtcgtttgcgaaccgctatccccacgaattttccggggggcagcgccagcggatcggaatcgcgcgggcgctcgccttaaatccggagcttattatcgccgatgaaccggtatccgcattggacgtgtcaattcaggctcaagtaatcaacctgatggaagagcttcaggaagaattcaatctgacatatttgttcatttcccatgatttgagcgtcgtccgccatatcagcgacagggtcggtgtgatgtatctcggcaaaatgatggagctgacagacaagcatgagctgtatgacaacccgcttcatccatacacgcaggcgcttctgtccgccgttcccgtcactaggaagaaaggcgggacaaagcgggagcgaatcgttttaaaaggcgagctgccgagccccgccaaccctccgaaaggctgtgtatttcatacgaggtgtccggccgcaaaagcgatttgcgcggaagccgaacccgctttcaaggaagtgaaaacaaaccattttgtggcgtgccacctttacgaataa

SEQ ID NO: 1366 - DNA, 1632 bp, Bacillus licheniformis
atgagcaaacgcaaaacaggattttcaattttaagcttgctgctgatcttatcgatctttctaacggcgtgcaacagcggcgaagtcggaggggacgaaaaggaaggcaaatctgacgggaagccgcaaaagggcggtgacttggtcatcggttctacaggggagcctacgatgttcaacgctttatattcaaccgatgtgtcaagctctgatattgaagggtttatttttgacggacttgtcggctctgacaccgatttgaatccgacgatgaagcttgctgaaaaaatagatcagtcggaagacggcataacgtataacgtgactttgaaaaaaggcgtaaaatggcatgacggcgaggagtttacggccgatgacgtcgtgtttacgtataacatcccattaagcaaagactatgccggtgagcgcggctccaattttggaatgattgataaagtgacgaaaaaaggagactacgaggttgaattcaagctcaagcatccggacccttcatttttgcctgtctctttaagctacggaatcctccctgagcatattttaggggacgtgccgattaaagaccttggcgaacacgaatttaacaggaaaaaaccgatcggaacgggaccgtttaaattcgtagagtggaaacaggggcaatacgttaaagtggaagcatttgaggattactacggtgaagggccataccttgacacgctgacatacaaagtgattccggatgccaatgcagcgatcgcccagcttcaggcgggagacattaattatttcgtcgtcccgggcacggatgtgaagacggtcgaaaaattcgatcatgtcaagcttgagtctgatctaggcctgaactattcatacctcggctggaacgaaaaaaatgagctgtttaaagataaaaaagtccgccaggccttaacccatgcgattgaccgcgaatcgatcgttcaaaatgtgctggacggcgatggggaagtcgcgaatattccggaaagccctgtatcatggaactatccgaaagacgccgatattccggtctttgaatacgacccggaaaaagcgaagaaaatgctcaaagaagctggttgggaagatacagacggtgacggcattttagacaaggacggcaaaaagttctcctttaccattaaaacgaaccagggaaataaagtacgcgaagatgccgcggttgtcatccagcagcagctgaaagaagtcggaatcgaagcgaagccgcaaatcgtcgagttcagcgctttaattgaacaaacgagcgcgccaaactggaattatgacgcactcctgctcggttggagcttggcgaccttccctgatcaatatgatatcttccactccagccagtcgaaagcgggcttaaataacatatggtacaaaaacgaagaagtcgataagcttctcgtcaacgcgaaaaaactgaaggatcggaaagaatattcgaaagcttacgagaaaatttacaaaatgattgccgaagatcagccgtatacattcctgttctattataactaccaccgggcgatccctaaaaacctgaaaggcttcgaatttcatccgaaaaacgatttctatgaagtgaacaaatggtggctgaaaaaataa

SEQ ID NO: 1367 - DNA, 951 bp, Bacillus licheniformis
atggttacatacattattcggagaacgctgatgtctattccgatcctgtttgggattaccattctttctttcgcgatcatgaaagcggctcccggtgatccggtgtcactgatggtcgatccgtccattaaacaggctgaccgcgagaagttcatcgaaaaatacggactgaatgagcccgaacatattcaatatttgaaatggctcggcaatatgatgcaaggggactttggcacttcgatcgtcaggaaaggaacgcctgttatcgatttgattcttgccaggcttccgaatacgcttttattaatgcttgtatcaacgattctggcgcttctgatttcgatcccgctcggcgtgctctcggcgaggcggccctattcaaagcttgattacggtattacgtttacgtcttttatcggacttgctgttccaaacttttggttcggtttaattttaattatggtgttatccgtgaatttaggctggtttccgaccgggggcgttatgacgctgaattcgggttttagcttgtgggatcggattcatcatttaattttgcctgctttcgtactcgccaccgcagatatggccgggcttacgagatatacaaggtcaagcatgctggatgtgctgcgccaggattttatccggacggcaagagcgaaaggttttaaagaaaatcgggtcgtgtacaagcatggactgcggaacgggctgctcccggttgtgacgattttcggactgatgattccttcctttatcggcggtgcggtggtgaccgaacagatcttcagctggcctggactcgggaagctgtttattgattccgcgtttcaaagagactatcccgtgattatggcgatgaccgtcatatccgctgtactggttgtcatcggcaatctaatagcggacattctgtatgcgatcatcgatccgcggattgagtattaa

SEQ ID NO: 1368 - DNA, 915 bp, Bacillus licheniformis
atgacacagccaaatccacaagtgccttcagcggagatcggccttcaagaaaacgtttcgcaaaaaccggaaacgatgacaaaaatctttttcgagaagtttttcaaaaacaagctcgctgtcatcggcggaattctcttgcttatcattgtactgtcggccttgtttgcaccgctgattgctccatacccgccggaacagcaaaatctgatgaacaaattaaaagcgccgagcgcggagcatttgatgggaacggataaattcggccgggatattttcagccgcctgttgtacggcgcacaaatctcgctgctcgtcggtttcgcgtccgtcctcggttcgatcaccatcggcacggttgtcggggcgatcgccggctatttcggcggaatcattgatgccattttaatgagaattgttgatattatcttatccatacccgacatctttctgttaatcacgctggtcaccatcttccagccgggcatagataaactgattttaatatttgccttgacgagatggacgacgacggcgcgcctcgtgcggagcgagtttttgtccttgaggtcgagggagttcgtcttggcggcgaaaacgatcggcacaagaaattacaaaatcattttttctcatattcttccgaatgcgatgggtccgattatcgttgccgcgacgctttccgtcggtaccgtgatccttgcggaatcggcattaagctatcttggattcggggttcagccgccgatggcaagctggggcaatatgcttcaggacgcacagaactttacgattatgatccaggcgtggtggtatccgctgttccctggcctgatgatcctgctcactgtgctgtgctttaacttcttaggcgacgggctccgcgatgcgcttgatccgaagaatattaaatga

SEQ ID NO: 1369 - DNA, 1266 bp, Bacillus licheniformis
atgttaagtgtattgaaaaataaaaactttttattcttgatattggggcgtttggtaaccaatattggggacagtatgtatacggttgcggcaatgtggcttgtgtttgatttatcaaaaagtacattttattccggattagctggttttttaacgatgttccccactgttttgcagtttttaacaggtccgattgttgataaagtcagattaaataaagttttggtttggagtcaactgattcaagctattctggtgttgattattccgtttttttatttcattggttatttgaacatttggattatcatgatgattatgcctcttatcgtattcattgagcaatttacttatcctgcgcaatctgccgcactgcctaaaatcatcaaaagtcaagatctggttaaagcaaactcacttatgtcattttcatatcagggtacagatattatatttaccggtattgcaggtattgtgattgcttcggcaggagctataagcatatacttagttgactctttcacttttttgttagcggcgctgttttttaagtgcgtaaaattagaacaaaaaagtgagatccaacataagccccgattccacttcaaaaaagtaatacacaattatacaacggatataaaagagggatttacactcattcgtcattctctcattccaaaaatcctcttgggctcgatgatttccaatttcatgcttagtgcgacgattgtgattttgccaagcttctcttcgattagaggaggagaagaatactatggatattatttggcttcaatgtcatgcggcttactgataggttcaatattcgcaacatggtttggtcgattcgctataggatcacttacgatatacggatttttcatttcaggggttttatggagtatttcggcgatcgctacctcttcatacatatcgattattttatttggtttgtctcaaatatccatcggcgtgacaaacgtcattttcatgtccattttgcaaagcatactgccagaagagtttatagggagagttttttcttttatcgcaagtttgacaagcatagcagctccttttggatctttgctgggagggtttactgcgtcattgatcggcagcgataaggttttttttataggaggaattgccatgctgtttgtatctgtttattgggtgtttcagtcttctttaagatcaattccttcatctgaaagaataaacgctaaagaatatagcttttttacaaacgtgttgaataaataa

SEQ ID NO: 1370 - DNA, 120 bp, Bacillus licheniformis
ttggccggaattgcttcattcagtcgtgatgattttgcctattgtctggactccgcgatgcgcttgatccgaagaatattaaataaaaagctgaggggtgccgcccttggctttttttga

SEQ ID NO: 1371 - DNA, 753 bp, Bacillus licheniformis
atgttatttcttcatgatgtgtgggtgaattggtttgagggagaagaaaatggctacaacgtctgccactttcatgaatggcggaaggaagacagtgttgaattgcttgaccaggtgcctttgttaagggtgtcgtctgttttgtttcactacatagaaaatgatttgtcagagcttccggccgaattattgaatgatgttcatcaaaaagcatatattcgcaaaaatcatgagcggacacagcttgatcattgtttcgtcgtaacggacggcatcggtattcttgcggtcgatacggccggttatacaataccggtaagaaaaagccgcctcatcccgagacaggagcagctcgtttatgaaatggtgaaggacgttgaagaggaaacttacgattttgcaccagagaagctgcaaccttccaaagaataccacattttatccttatcaccggagcatgtcagaggattaacgagaaaagaacgccagctcaaacagctgctgttcatggcgctcgatcagctcaaagggctccaaaaccgggccgagatcgcctattggtacaccgaatggaacccgtatatgtatgaacagatcaagcgcatgacatttgaagaaatttgggacatgcttttcaatgagacgatcgacggatggtcagacaagcacagggacttttgtgaaaatttgattaaaggacagccgttttttgaaaagctttgggaaattgagaatgagtctaaagtcaactaa

SEQ ID NO: 1372 - DNA, 993 bp, Bacillus licheniformis
atgaaaaaaacgattttttccggtatccagccgagcggctctgtcaccctcggcaactatatcggagcgatgaagcagtttgtcgacttgcaggatgactacaactgttacttctgcatcgtcgatcagcacgcgatcacagtcccgcaggaccggctcgcgctgagaaagaacatccggaaccttgccgcgctgtatttggcggtcggcctcgatccgaaaaaagcgacgctgtttatccaatcggaagtgcctgcacacgcccaggcgggatggatgcttcagtgcgtcgcctacatcggcgagcttgagcgcatgacgcagtacaaggataaatcagccggaaaagaagccgtcgtctccgggcttttgacatatcctccattaatggcggcggacatcctgctttatggaacagacgtcgtccctgtcggcgaagatcagaagcagcatcttgaattaacccggaacttggcggagcgttttaataagaaatacaatgacatcttcacggttccggaggttaaaataccgaaagtcggcgcccgcattatgtcgcttgccgatccgctcaaaaaaatgagcaaatcagatccgaaccaaaaagcgttcatcaccctgctcgatgatccaaagcagctcgagaaaaaaatcaaaagcgctgtcacggactccgacggaatcgtcaaatatgataaagaaaacaaacccggtgtatccaaccttctgacgatctattcgattctcggacaagtctcaatcgaagagcttgaggcgaaatacgaaggcaaaggctacggcgaatttaaatcagaccttgccgaagtcgtcatcggcgcgctgaagccgattcaagaccgctaccacgaattgatcgaatctgaagagctggaccggattttggacgaaggcgcagaacgcgcaaatcaaaccgcaaacaagatgctgaaaaaaatggaaaatgcaatggggctcggccgaaaaagacgctga

SEQ ID NO: 1373 - DNA, 123 bp, Bacillus licheniformis
atgttaaaacgttttacacgtataacattcgccattctttatatcgaaccgaacgatgccgcgccaactttattcagcccggtattcgttttcttttccccggggttgtcgactttcatttaa

SEQ ID NO: 1374 - DNA, 168 bp, Bacillus licheniformis
ttgaaaattaatattgcaataaattattctattaattataatgaatttgttcacctcggtgttacaggtttcttacataacaaatattcagaaaagacgaaacagaggaaaaagtatggcaagtgggcctattacttttttatgataaatctgaatgttcaggagtaa

SEQ ID NO: 1375 - DNA, 1626 bp, Bacillus licheniformis
ttgaaaaagcgtttgtcatttatcagtttaatgctcattttcacactcgtcctcagcgcctgcggcttcggctcaagctccggtgacggcggtaaaaaagacagcaaagggaaagacacattaaatgtcaacattaaaacagaaccgttttcactacatccgggactcgcaaacgattcggtgtctgcaaacgtgcttcgtcagacttttgaaggattgacgaccatcggcaaagacggaaagccggttgaagcggcagccgaaaaaatcgaagtcagcgacgaccagaaaacatacacattcacgctccgcgacgcgaaatggtcaaatggagatcctgtaacagcagaggattttgaatacgcatggaaatgggcgctcgaccctaaaaacgagtcgcaatatgcgtatcagctttactacttaaaaggcggagaagcggcgaacaccggcaaagggaaaattgaagatgtcggcgttaaagctgttaatgataagactttaaaagtcgagcttgaaaaaccgacaccgtattttactgaactgacggcattctacacatatatgccagtcaataaaaaggtagcagagaagaatccgaaatggtacacaaacgcagacgagaactacgtatctaacggacctttcaaaatggcgaaatggaagcacggcggtaacatcgtgctggagaaaaacgaccagtactgggataaagacgctgttaagctgaagaaaatcaatatggcgatggtcaacgatccgaacacgggtctgaacatgtacaaaaaaggcgagcttgactttgtagggcagccgcttgatcagatttcaacggacgcgattccaagcctgaaaaaagaaggcctgcaaattgatccgttcgcatcggtttacctgtacaaattcaacactgaagcggctccgcttaacaatgtcaacattcgtaaagcactgacatacgcgatcaaccgcgaagcgatcgtcaaaaacatcacacaagcggaacagctgcctgcgatgggattagtgccgccggcggtccacggctttgaatccaacaaaggctatttcaaagaccatgatgtcgataaggcgaaagaacacttggaaaaaggcttgaaagagctcggtttgaaaaaagcgtcagaccttccgaaaatcacgctttcctacaacacggatgaagcgcaccaaaaaatcgctcaagccgttcaggaaatgtggaacaaggaactgggcgtagatgtggaattaggcaatgaagaatggaacgtttacatcgataagctccatgccggaaactatcaaatcggccgtttaggctggaccgccgactttaacgacgggatgaacttccttgaaacataccgcgacaaagaaggcggaaacaatgatacgaactgggaaaacgcgaagtataaagagctgctgaataaagcatcaagagaaactgattcagcgaaacgcatcgagctgatgaaagaagcggaaagcatcatcatggatgagctgccggtcgcaccgatctacttctacacaatgccgtatcttcatgatgaaagcttaaaagactttgttctgaccggtacaggtgagatctatttcaaaaccgcgcattttgaataa

SEQ ID NO: 1376 - DNA, 936 bp, Bacillus licheniformis
ttgattaaatatttaggccgtcgtcttgtttatatgttaatttctctctgggttatcgtaacagctaccttcttcctgatgagagcgataccgggcggacccttttcaggcgagaggaaacttccccctgcaattgaagccagtctcaattcctactatggtttagaccagcctctttttaaacaatatctcgattatttagtatcggtagcaaagtgggatttcgggccgtcatttaaatataagggacaaactgtgaacgacttgatcagctcagggttcccgatttcttttacactcggattggaagcgatttgccttgcgctcgctttcggcgtattgttcggcgtgatcgccgcgctgaagcgaaacaagtggcaggtttacacagcgatgatcattgcggttgtcgggatctctgtgccgaacttcatcatggccgcgcttctccaatacgtgctggcaatgaagctgggcatgtttcctgtcgcgcaatgggagtcatggggacatactgtgcttcctgcaatcgctgttgcctcgatgccgatggcgtttatcgcccgtttgacgcgctccagcatgcttgaagtgttgagcagcgactatatccgcacggcgcgtgcaaaaggtttgagcacatcagccgttacgtttaagcatgcgatacgaaatgccatcatgccggttgttacatatatgggcccaatggcggcgtccattttgacaggaacgtttgtcgtcgaaaaagtcttcggtataccaggactcggcatgcactttgtcacaagcattacgaaccgagactatacggtgatcatgggcgttaccgtcttcttcggggcaatcttgctgctttgcgtcttgattgtcgatcttttatacggcttaattgatccgcgcattaaattgtttggcgctaagaaaggggagtaa

SEQ ID NO: 1377 - DNA, 918 bp, Bacillus licheniformis
atgcagcaaataccaaaagacatgtttgaacctgcagctgttgaccatagcgaagccgaaaagatctcaaagaaaaacctttctttttggacagacgtattcttgagatttaaagaaaacaagctggcgctgtttggactggtggttctgatcctgatcgctctgatggctatcttcgcgccggtgttctcaagctttcaatatgaagaaacagatttaacgaatgcgaaccagccgccaagcggtgagcactggtttggaacagatgaccttggaagggacgtattcgtccgtacatgggtcggcgcccgcatctcgctgacaatcggactcgctgctgcgctgatcgacgttttgatcggtgtgatatggggtgcgatttccggcatcagaggcggacgtacggatgaaattatgatgagaatagcagatgttttatgggcgattccttctttattaatgaccatcctgctgctcgttgttatgggaaaaggcctgatcacgatgatcgtggcgatggttattacgggctggatcaacatggcgagaatcgtccggggccaagtactccagcttaaaaatcaggagttcgtactcgcctcaagaacattgggagcgaaaaactcgcgcattatcagaaagcacctgctgcccaacatcatgagcccgatcttggtcaccatgacattaaccgttcctacggctattttctatgaggcgtttttaagctacctcggcctcggggttccgcagccgcttgcaagctggggaacgatggcaacagacggtgttcagggattggaatactacccttggcgcctgttcttcccggctacttttatctgtctgaccatgtttgcattcaacgttatcggcgacggactgcgcgacgctttagatccgaagctgcgtaaataa

SEQ ID NO: 1378 - DNA, 1068 bp, Bacillus licheniformis
atgaaacacttacttgaagtgaaagatttagccatttcttttaaaacatacgccggagaagtacaggcgatccgcggcgtcaactttcatgttgacaaaggagagacgcttgcgatcgtcggtgaatccggatcaggtaaaagcgtcacttcacaggcaattatgaaactgattccgatgccgccgggctattttaaaaacggacaaatcttatttgacggacaagacctggttccgaaaacggaaaaagagatgcagtcgatcaggggaaaagagatcggcatgatctttcaggatccgatgacttctttgaaccctacaatgaaagtcggccgccaaatcacagaagtgctgtttaagcatgaaaaaatctcaaaagaagaggccaataagcgggcggtagagcttctcagccttgtcggaattccgatgcctgaacgccgcgtcaaccagtatccgcacgaattcagcggcgggatgcggcagcgcgtcgtcatcgcaatggcgcttgcggccaatccaaagcttttaattgcggacgaaccgacaacggctcttgatgtgacgattcaggcgcagattttagagctgatgaaagacctgcagaaaaagatcgagacatccatcatttttattacgcacgatctcggcgttgtcgcgaacgtcgccgacagagtcgccgtcatgtacgcgggacagattgtggagatcggtacggtcgacgagattttctacaatccgaagcatccgtatacatgggggctgctggcttcaatgccgagccttgacaatgacggtgatgaggaattaatggcgataccgggctctccgccggatttgaccaatccgccgaagggcgatgcctttgcgttaagaagcccgtacgcaatgaaaatcgattttgaacaggagccgccgatgtttaaaatatctgatacacattatgtgaagtcatggcttttgcatccggatgctccaaaagtcgagcctccggcggctgtcaaaagcaagatgaaggagtttaaaaatcagtatgaaaaaccggttcaagtgaaagaaggtgaatga

SEQ ID NO: 1379 - DNA, 933 bp, Bacillus licheniformis
gtgaatgacatggcagaaaaactgctcgaaatcaagaatttaaaacagcacttttcaacgccgaaagggattgtaaaagctgttgacggaatctcttttgacatttacaaaggggaaacgctcggtcttgtcggagagtccggctgcggaaagtcgacgaccggccgttcgatcattcgtttgtatcaagcgacttccggagaagtcttgtttaagggaaagaatgtccacgacaaaaagtctgccaaggaccttctcgaattcaaccggaagatgcagatgatttttcaggacccgtatgcatccttgaatccgcggatgacggttgccgacatcatcgcagaaggtattgacatccacggtttggccaaaacgaaaaaagaacggcttgagcgcgttcatgaactcctcaatctcgtcggcttaaataaagaacacgcgaaccgctatccgcacgagttttccggcggacagcgccagcggattggaatcgcaagggcgctggcggtcgaaccggaattcatcattgccgatgaaccgatctctgcactggacgtgtccattcaggcgcaagtcgtcaatttaatgaaggatttgcaaaaggaaagaggactgacataccttttcatcgctcacgatctgtcgatggtcaaatatatcagcgacaggatcggcgtcatgtatttcgggaagcttgttgaattggcgccggcagatgaattgtatgaaaatccgcttcatccgtatacacaatcattgctttccgccattcctctgcctgatccggattatgagcgcacgcgcgtgcggaagacgtatgatccgtccgtccatcagctgaaaggcgacgaacagatggagctccgcgaagtaaagcccggccatttcgtcatgtgtacagaggaagaatttaaagcctatcaatccaaataa

SEQ ID NO: 1380 - DNA, 579 bp, Bacillus licheniformis
atgaactggtatgagaagcttagcgagtatttccctattgaagaaatgaaatcaaaagagcatatggaagcattgttaaaggaacaaaacgatatttaccataaagaagaaggccgtcatcatgtgttgatgtacgccgaattcgactcttttattttcatcgactatttattcgtttctaaagacgcacgaggacagggacttggatccaagctgattgagaagctgaaaaagaaaaacaaaccgatcctactcgaagttgagcccgtggatgaagatgatgccgatacggcgaaacgtcttaaattttatcaaaaggaaaactttaaacacgctgagtcgattggttaccgccgccggtcactcgcaaccggcaaagtgaacaaaatggagattctgtattggtctccaaaatcaaacacagagaaagaagtgtttgacgcgatgaaagaaacgtacgaaaaaatccatacatacaaagatcaaaaatggtatggagaatcttatgaagatgtggatgacgtccttacgattgttgacgatcataaacagaagaacattttcgatgaattaagctaa

SEQ ID NO: 1381 - DNA, 396 bp, Bacillus licheniformis
atggttacattatatacatccccaagctgcacgtcttgcagaaaggcgcgcgcatggctagaagaacatgatattccgtttacggaaagaaatattttttcagagcctttatcaattgatgaaataaaagagattttacgaatgacggaggacggaacagacgaaattatttcaactcgttccaaagtgttccaaaagctgaacgtcaaccttgaaacaatgccgcttcaagagctgtaccagctcatcaatgaacatccgggccttttgcgccgtccgatcatcattgacgaaaagcgcctgcaggttggatacaacgaagacgaaatccgccgcttcctgccgcgcaaagtgcgcacattccagcttcgtgaagcgcagcgtcttgcaaactaa

SEQ ID NO: 1382 - DNA, 663 bp, Bacillus licheniformis
atggaacacgatatactgatgtcgttccttgtgatcatcggaatcgatctcatacttggcggcgacaacgctgttgtgattgcaatggcaagccgtcatttgcctccccggcaaaggcaaaaagcgatcatcatcggcacattgatcgccatcatgatgagaatcgcgctaaccatggcagcagtatacctgctcgcggttccttatctgcaatttatcggaggaatcttccttttgtacttaggatatcagcttctgattgagaaaaaagatgcccagcatgtcaaaggcgggacatctttatttaaggcgatccgcatcatcgtgattgccgacttgttcatgtcccttgataatgtgattgcggtcgccggagcctcacacggacgcctgatgcttgtcgttgtcggcctgatggtttccgttccggtcatcatttggggcagcaggctgattcaagcggctcttgccaaatttccgctcttaatatacgcaggaagcggactgctggcttatactggcggcgaaatgatcgtcagggagcaggagttgtcttcctttatggcgcagcacagcaccctcgaaatgctgctgcccgtccttacggttatttttgtgattttagccagtatttattatgaacagacgagtgaaaagcattaa

SEQ ID NO: 1383 - DNA, 639 bp, Bacillus licheniformis
atggaaatcgaaagaataaacgaacacacggttaagttttatatttcctacggtgatatcgaagaccgcgggtttgacagagaagaaatttggtacaatcgagaacgcagtgaagagcttttttgggaaatgatggacgaagtgcacgaagaagaagagtttgccgttgaaggccccctttggattcaagtgcaggcccttgacaagggattggaaatcattgtgacaagagctcagttgtccaaagacggacaaaagctggaactgccgattcctgaagataaaaaacagcatgtagcagaagaaagccttgatgctttgcttgacgactttcaaaaagaagagcaggcagaagagcagaaactgcagtttgttttaaaatttgacgattttgaggatttaatctcactgtcaaaaatgtctgtcagcggttgccaaacgacattgtactctcatgaaaaccgctattatttattcgtggatttcaatgaactgcctgatgaagaggtggaaaaccagctgagcattctgctggaatatgcctcagaatcaaagatgacgattcatatgctgaaagagtatggaaaactgattgcagcggatcatgctcttcatacaataaaaaagcactttgcataa

SEQ ID NO: 1384 - DNA, 1017 bp, Bacillus licheniformis
atgacaaagaggggcagatgttacggctttacgattttacttgtgtttgcgctgattttgggaggatgcggcggaaacacggcttcaaataaagccgcgaatgaaaaagactttaagccatcgaaagcaatcgaggtcgtcgcgccagccggagccggcgggggatgggatacaacggccagaacgatctcgaaaatcatgggtgaagaaaaattgattgaaaagatggctgtcgtcaacaaaccgggcggcggtggagcgtccggatggtcgtatgtccaccgcaaaaaaggcgataatcatacgttgtttgttacatcaccgccgattttgttcgtgcctttaaacggacaatcccagtacggccacaatgattttacgccgattgcaagcgtgattgccgattacggagcgtttgtcgttcataaagattcgccttatcagtcgatgacagaccttgtggatgcgcttaaaaaagatccgaaagcagcttctattgtagggacgtcttctcctggaagcatggaccacatgcagtttgtcagcgctgttcaaaaggcgggcgttgatgcgaaaaagctgaaatatattacggctcaagacggcgcagggatgagcatgctgctcggcaaaaaagccgacgtctactcgacgggtgtcggtgaagcggccgaacaagcgcgagccggaaaagtcagagtgctggccatcaccgctcccgaacgcatgaaaggagataccgtcaaggatttcccgactttaaaagagcagggaatcgatgatgaatttacggtttggagaggatttatgggacctccgggaatgagtaagtccgccgtaaagtattatgaggaaaaaatcaaagagatgatggaaaaagacagctggaaatcgattcgggacagctatggatggacggataactttatgggccatcaagaatttaaggactatcttgacactcaatataaagaaatgaaagcgctccttgatgagattggattgggcgacaaataa

SEQ ID NO: 1385 - DNA, 456 bp, Bacillus licheniformis
atgagaatcacaaaccgggccgtttctgtcatcattttggctgtagcagccatttacctggcgctcagctttaatttagacagctatccgtacgcggtgatcgatgcggatgtgctgccgaaaagtttaggcatattgcttctcatattaggcatatttctgttttttgaaaaagatcaaaaggatacaacggtgaaaaagctgtttcagctgcagaaaaaagacgttaaggtcatgatgctttgtgttgtttctctgttgatctacatttccgttttagaattcatcggatttttgctatctactgtgatgctgctgctcgttttgcccgcggtgttgggatatcggaactggaaaacggctgcgatcgtttccctggttttcagcagcacaatttatttttcattcaattatgtactcaacatcatgcttccgcagggggttatgcctttttaa

SEQ ID NO: 1386 - DNA, 1506 bp, Bacillus licheniformis
atgttagatagtattttatacgggtttcaggtggcgctgactctgcagaatatcatgttcgcttttatcggagtgctgatcgggacgattatcgggatgctgcccgggctcgggccgatcaccgcgattgccattatgatcccattaagctatggaatggatccggcctccgcgttaattttgatggcgggtgtctattacggagcggtctttggcggttcaacatcatcgattctgttaaatgcccccggagtggcaggcactgtcgcgacatcgtttgacggctatccgatggcaaagcaggggaaagcggggaaagcccttgccatcgctgcaatttgctcctttgcaggcggaacgatcaccgtagttgcgctgatgctcgtcgcgccgacaatggcaaacattgcggtgacatttgggccgacagaatattttgcattgatgatgctcggcttggtggcaatttcgagcctttccgaaggatcgacggtcaaagcgctgatctctgcgacattgggctttatgacggctaccatcgggattgatccgcagacggggaccgaacggtttacattcggtgcggcaagccttctggaaggaatcgattttctgatcgtggcgctcggtttgtttgcacttgctgaagttgcgtttttaatcaagacgcggaacaagccgatgacagagggagcgtctcaggtcggcagcctgaaggtgacgaaaagcgaaatgaaagagatttcgggaccgatcgcaaggcattcggtcatcggatttctgctcggcatcctgcctggtgcaggagcgacgattgcatcatttatttcttatattacggagaaaagaatctcaaaacatcccgaaacgtttggcaagggaaatattaaaggagtcgcagctcctgagacttcgaacaatgcggcaacgagcggcgcattcgtacctctcctgacactcgggattcccggatcagggacaacggccgtcctgctcggcgcacttttggtcgtcggcgttcagccggggccgctcatgcttacggatcatcccgacgtgttctggggcgtgatcgcaagcatgtatatcggcaatttatttctgctgattttaaatttgccgttaattcctttcttgtcaaaaattcttctgattccgaagcagcttttgatttcgctcatatttgttttctgcctgatcggcgtctacgctgtgacatttaatgtcgtacacctttatattctcgtgttcttcggaattctcggatattttatgagagtgctgtcttttccagcggctccgtttattttggcttttattctcggaagtttgatggaagagtcgttcagacaagcgatgacactgtcatcaggaagcctgtccgtgttttttgaaagtcccgtcacaatcggtttattgattacggctctattgtctctcatcgtgccgccgatttcccgggcaatgaagaacagaaataaaaagtcgatcgatttggaaggctaa

SEQ ID NO: 1387 - DNA, 717 bp, Bacillus licheniformis
atgaaagcattacaagtatttatcgtagaggatgacatcagaaacgctgacatccaccaaaaactgatcagcaaaattgatggattttctgtcattggaatcgcggaaaattttcaagatgcaaaagatttgcttccggacgtgaagcccgaccttgtcctgctcgacatttttctgccggacggctccggcatggagcttctctggctgatcagacaaacgctcaggcatacagacgtcatgatgattacggcggctaaggaagtcgaatatgttgaacaggcgattcgcgcgggagccgtcgattatttgatcaagccgattatgttttccaggctgaaagaaacgctgttaaactatcggtcttaccggctcaaagtaaatgaaatgtcttcaatcgaccagacagacgttgacagcctgatggcaaaaaggcggagcatcacgaaagaacaaattgctaaagccgattatccgaaaggaatcgacggactgacgctgaaaaaagtagccggcgttttaaacaaaagcgaaaacagcgatggcatcaccgccgaaagcctcgggcgcaccatcggtgtcagccggacgaccgcaaggcgctatttagaatttttagctgccgaaaagcatgtaaaaacagaactttactatggaaccgtcgggcggcccgaacggcgctacaagcccgtaaaaaatgaaagtccggaaacgtag

SEQ ID NO: 1388 - DNA, 1596 bp, Bacillus licheniformis
ttgagaaaaggagtttttgacatcaaacggaagctgaccaccaagctcacattgctgattcttaccctgcttttgctcttgctttctgtcatgagcggcctctatttaattattttagaaaattctttaaaaacacaaatccaggccagagcgctcgatatggcgaaaacgctcgcccacatgccttccgttcagaaagcgtttgaaacggacgatccgtctcgaacccttcagccaattgcagaaaatgcgagaaaacagtccggtgcgcaatacatcgtgatcggctcggcggatgcgattcgctatgctcatccggaccctggaaaaatcggcaaaccaatggtcggcggagacaatcggcgcgcccttgaaaaaggtgaagcatacgtttcggaagccgtcggcacgcttggcccggccatcaggggcaaagcgccgatccataatgaaaacggcgaaatcgtcggcatcatctcagtcggttttttaatagaaaatattcaggacatcgtctatcaatatcagtcaaaattcatatttttattgggatttgtcgtgctgatggggattttgggagccgtctatatttcccgcaatgtcaaaaagtccattttcggccttgagccttatgaaattaatcaattatatactgaaaagcaggcgattacagaatctgtgcacgaggccttgatcgccatcaataaacatgaagaaatcacgcttttgaatagaaaagcgtgtgagctgcttcgtgtcgaaagcgaagatcagtggctcggcaaaccgatttccgagcttcttccggatacgctgctccccgaagtgctgaaaacgaaaacggcgcaaaaagatcaggaattaacgatcggaaacgaagaattaatcgtcaacagagtgccgattttcgaaaacgaaaaaatccgcggcgccgttgcgagcttcaggagaaagacggatattgacgaactctccaaaaagctggcgcaaacttcgcaatacgcggaaggtctgagagcccagacccacgaatattcaaacaagctgaatacaatcgcgggactgattcagctggaaagctatcctgaagcactcgagttgattcaaaaagagaataaaagccatcaggatatgctgcaatttctcatccattcgattccagatccgcttctttccgggttgctgctgggtaaggtcaaccgtgccaaagagctgcacatcaacctggaaattgatgaaagctcaaaattgaacgctttgccggacgaaatggataagggaaaattcattacgattttaggaaatttgattgagaatgcctttgacgccgtttcccacaaaaaagaccgcagcatccttgtctttttgtcagacggtgcagatcacatattaattgaagtcgaagactcgggagacggtattcccgagggggaacaggagcggatctttcaaaagttttattcgacaaaaacggcaaaccaccgcggcctcggcctctttttagttaaagaagccgtcaatgcgttaaacgggcaaattaaagcggacaaaagcgaccttggcggagcattgtttactgtcgtgataccaaaatag

SEQ ID NO: 1389 - DNA, 1149 bp, Bacillus licheniformis
atgttcagtgcaatgatcgatcaaggcgggaccatctgccttgccgacggatacaaagccgaagatctcaagcgattgagaaaaagacatgcattttactgcccggtgtgccggtgtgaactcgacctgaaaatcggttccgtcaagcttccgcatttcgctcataagccggatgcagcatgtccggtgccccatgaaccggagagcccctatcacctgaaaggaaagcggctgttgtacgaatggcttggcagacaaggactccgcccggtgcttgaaccgtatttgcaagagatcagacaaaggcccgatttgctgctggaacacggaacccgccaggttgcggttgaatttcaatgtgcgaatctcaatgccgcagcgtatcgcaaaaggacggaaggctttctcagactgggaatcgagcccgtatggattctcggcggaaaccggataaaacgcttgacgggggatttatttcagctttcgcggtttcactggcagttcattcagaaaagcgacaagcccccaaagctcctgtttttttgccccgaacaaaaggctttcatcatcctcgaacacctcattccctttcaaacaaacaaaacatccgcatccttgcgctttcttcctcttgctgaagcaagctggcgtaatgtaacagaacgagaaagccgttcgcctctccagctcaaaggctggaaaaagaacatcctcagctttcggatgtcggccgtgcgttttttatcaaaagaaacgaagcagattgccgccctcttttatgaaaatcatcagcttccgctcccgttttttccctcagaagcctttctcccggtgccgtcaggctatatttttgcccacccggtttatgtatggcaagggtacctttttttatttataacgaagcatgatacgtttcgcctgcagtctgcgcttcactatatggactggctcatcaagggcaaaaggctgaagctgagatggagcgggcggcaaacggctgcggatgccgtcggtgaatacatttgttttttgcataaaaaaggatttttggtgaggaaagaggaattttattattccgagggttcttttgttccggagccgcggttagaggcgctgttaaaaagggatgaacattatttttccgaatga

SEQ ID NO: 1390 - DNA, 1830 bp, Bacillus licheniformis
gtggctgaagaaaaaaaatcgaagaaactgccttcaagagaagaggtgaagcaagaagacacgtggagactggaggatatcttcccgtcagatgacgcctggaacgaggaatttcaagccgttaaagaactgctgcccaagctttccgaattcaagggcaagctcggccattccgccgatgatttatatgaagcgctgacttatcaggataaggtgatggagcgtctcgggaagctgtatacttacgctcatatgcgctatgatcaggatacgggaaattctttttaccaaggtctcaatgataaagcggcgaacctctatactcaggctgcgagcgccacggcctacatggtgccggaaatattatcgattcaggaagaaaagcttcagcagttcctgttggaaaaagaggaattaaagctttactcacacgctctcgaagaaatcaataaagagcgccctcatgtgcttagcgaggaagaggaagggattttggccgaagcgtctgatgttctttcatctccttccaatacattcggcatgctgaataacgccgatatggaatttccggagatcaccgatgaaaacggagaaaaggtgcagctcacacacggcaattatatcacctttttggaaagcgagaaccgcgatgtccgccgcgcggcattcaaggccgtttatgaaacatacggccgctataaaaacacgctagcttccacgctcagcggagctgtgaaaaaagacaacttttatgcgaaggttaaacattataaatcggcgcgggaagctgccttgtcgcgcaacagcattcctgaagaagtctacgacaatctagtcagcacgatcaacaagcatctcccgcttcttcaccgctatgttgagcttagaaaaaaagtgcttgagcttgatgaagtgcacatgtatgacctgtatacccctctggtaaaggattctggaatgaaagtcacttacgagcaggcaaaggactatatgctgaagggtctggcgcctttgggggaagaatattcatccatcctgaaagaaggattgaacaaccgctgggtcgatgtgtatgaaaacaaaggaaaacgaagcggcgcctattcttcaggaacttacggaaccaatccgtatattttgatgaactggcaggacaacgtcaacaatctgtttacgctcgtccatgaattcggccattccgtgcacagctactatacgagaaaatatcagccttacccgtacggtaactacagcattttcgtagccgaagttgcttctacgacgaatgaagcgctgttgggagaatacctgctgaatacaatcgaagatgaaaaacagcggctctatattttgaatcatatgctcgaaggctttaaaggaacggttttcagacagacgatgtttgccgaatttgaacatgagatccatgtcaaagcccaggaaggggaaccgctgacacctgagctgttaacgagcatatactatgatttgaataagaaatatttcggagacaatattgagattgataaggaaatcggtcttgagtggtcaagaattccgcatttctattacaattattatgtatatcagtatgcgacaggcttcagtgcagctcaggcgctcagccagcagattttaaaagaaggcaaatcggctgttgaccgctatattgagttcttgaaagctggaagctcggattatccgattgaagtgctgaaaaaagccggcgtcgatatgacgtcttcagagccgattgaagctgcgtgcaaaaagtttgaagagcagctgaacgaaatggaagaactcctgcaaaaagtcaatcattcataa

SEQ ID NO: 1391 - DNA, 168 bp, Bacillus licheniformis
atgcttcagatcattttgggacttgcatcaattttattttttttcgtcttgaatattttaggtttgatgaatatgctacccctttatattacgtctcccctattatttatatcaatcctttttacgatcagccgcctcaaccaccgcaaaacgtttaaaggtttttga

SEQ ID NO: 1392 - DNA, 903 bp, Bacillus licheniformis
ttgacactcaatcagcgtgaccaatttttctcccattgccacggacatccgcaaaaaccgatggaaatttatatgtttgtcgaccctttatctcccgaatgctgggcattggagccggcgatcaaaaagttgaaaatccgctacggccgctttttcacactaaggatcatcgccgcatgcagcattacagcgctgaacgttcagaaacgcaaaaagcgccggctcgcagaggcatgggaaaagatcgcatgcaggtcgggcatgtcttgcgacggaacgctcctgcacgacaaagcactctctgcaccttaccttgcctcgctcgctttgaaagcagcggaactgcaaggcagaaaagcagggctgcagtttttgagatgcatgcaggaaagcttgtttctcaatcagcaggatatcactgaagaacaggtgcttttagcgattgcagagcacacgcagctcgatttggaggaattcaaaagggatcttcattcgcagagcgccgtgaaagccctgcaatgcgatttaaaaatcgctgccgaaatggaagtggcatctgttccgactcttacgtttttcaacagcctccgcgaaggagaaggcttaaaggtaaccggaaattattcatatgaaatttacgaagaagtattgtttgaaatgcttggcgatgagccgaagccttcacaaacacctccgctcgaactttttatcgaatactttcaatttgtagccgacaaagagattgccgtcgtttacgactggacgcttgaacaggtggaacgggaaatgaaaaagctcgcgttcgcccgcaaagtcgaaagagtggaagcgaaacacggcatgttctggcgctatataaatgaacatcacgatgccggtccgctctatcaatgcgaaaaatag

SEQ ID NO: 1393 - DNA, 399 bp, Bacillus licheniformis
atgggacaatcgtttaacgcaccttatgaagcgattggagaagagcttctatcgcaacttgttgatactttttatgaacgtgtaaagcggcatccgctgctctacccgatttttccggacgacttaacggaaacggcaagaaagcagaagcaatttttaacgcaatatttaggcggtccgccgctttatacagaagaacacggacacccgatgctgagggcgcggcacctgccgtttccgatcacaccggaacgggcggacgcatggctttcgtgtatgaaagaggcaatggatcatgtcggtttaaagggcgaaatcagggaatttctttttgaaaggctgacattgacagccagacatatggtaaatcagccgaaaatggaggatggttcacattga

SEQ ID NO: 1394 - DNA, 654 bp, Bacillus licheniformis
atgaacatcaaccatttggccgctctcttggaacttcaggcgatacggtcgttttatccggcttcagacagcggttccgaagatgcgggttttgatttcagctcgattttaaaccaatatttaagcaatgtcggcggcttggagtcttcacagcccgcggttgctccgactgtgtcgacagcgtctcagcttcaggccccgctggcagctgaaaagcctgaggcaattgcggccgtcccatctgccgcagcgaaacccgtctctttcggcggccaaaatcagaacattgaccagatcatcaaaaacgccgcagaaaaatacggggtcgatgagaaactgattcatgccgtcgtcaagcaggaatcacgctatcaagagaaagcggtcagcccggccggcgccatgggcctgatgcagctcatgccgtccacggcgaaggcgctcggcgtgaataacgcttttgaccccgttcaaaatatagaaggcggaacaaaatacttaaagcagatgctcgataaatacagcggaaatgtgaagctcgcattagcggcatacaatgccggaccgggaaatgtccaaaagtacggaggcattcccccttttaaagaaacgcaaaattatgtaaaaaaaatcacctcaaattactacgcttaa

SEQ ID NO: 1395 - DNA, 576 bp, Bacillus licheniformis
atgagccaggaacttgaaatcgaatttaaaaatatgctgacaaaaaaagaatttgagaaaatcaaatcatattatcaattttcctccgagcaatttgttatacaaaaaaaccattattacgatacgccttccttctctttaaaagaaaaaggagctgccctaagaattcgcgaaaagcagcagcgatttgtcctgacattaaaagaaccggcgcctgtcggactgatggaaacccaccaggagctgacccggaagcctgaaatcgaaacgttcatgattccgcatgggccggtatacgatcgtctgaagcgtctcggcattgaagcggacgagctcatccttttcggaacgcttgcgacaagccgtgcagaaaaaaaattgccgcagggcttaattgttttggatcacagccgatacttaatggtagaagactttgaaatcgaattcgaagtgacggattatgaacgcggaaaacgggatttctctgaactgctgaaatcgttcggcgtcatccctgagcgtgaaaccaaaaacaaaatcgtccgattttatgagcaaaaacttaaagatcaataa

SEQ ID NO: 1396 - DNA, 366 bp, Bacillus licheniformis
atgcagaacagaattgagattacagaagccaatctgcgaaacgaccggctggtgttgaccagcgaaatcaatgacggagcggagcggaagccggccggacgcatgctgacagactccgatcattttgcatttgtatacatacttgaacaggacgaatcctttgaatacgtcattttaaacgaaggcatctggtccgatcttaaagcggcccttgacgccggtcttcctgtgtttttacatatcggaaacacggagctggagcttaacgggttccatgatgagctcggatatttaatagagaatattaaagataatgcaaattatggcgaagaaatggaagagagagtgaaacggatattcctctag

SEQ ID NO: 1397 - DNA, 636 bp, Bacillus licheniformis
atggatgaaaaacaatgggagcagtttttagcgccgtaccggcaggctgttgaagagctgaaagtgaagctgaaagggatccggaccctttacgaatacgaggaagagcattcgccgattgaattcgtgacggggcgggtgaagcctgtgccgagtattcttgagaaggccaagcgaaaaaacattcctctgcacaacattgaaagcatgcaagatatagccgggctcagaatcatgtgccaattttttgaggatattcgcattgtcgtcgatatgcttttggcgagaaaggacttcacggtggtggataagcgcgactatatcgcggaacataaagagagcggctaccgctcctaccatctcgtcgtgctgtatcctttgcagacaatcaacggggaaaaacagattttggttgaaattcaaatccggacgctggcgatgaatttttgggcgacgattgagcattctttaaattataaatacagcggcaacattccggaaaaagtaaaattaaggcttcagagagcttcggaagcagcatcaaggctcgatatggaaatgtctgagatcaggggcgagattcaggaggctcaggcggcgttttcacgcaagaaaaaggatgaggatgacggttag

SEQ ID NO: 1398 - DNA, 804 bp, Bacillus licheniformis
atgatgaagtttgcggtatcgtccaaaggaaatgcggtttctgattcattgaaaagcaaaattcagacgtatctgctcgacttcggtctcgaatgcgatgaagaagagccggatatcgtcatttccgtcggcggtgacggaacgctcttatacgcatttcacaaatacagcggccgcctcgacaaaacggcttttgtcggggttcataccgggcatctcggcttttatgccgactgggtcccgagtgagattgaaaagctcgtgatcgcgattgcgaaaacgccgtatcaaattgttgaatatccggttttggaagtcatcgtccgctataatgacggcagcgatgaagcgagatatttggcgctgaacgaatgtacgatcaagagcattgaaggaacgcttgtgacggatgtcgagattaaaggggaactttttgaaacgttccgcggcgacggcctttgtctgtcgactccttccggaagtacggcatataacaaggcgcttggcggtgcgattattcatccgtccatcagggcgatccagctggctgaaatggcgtcgatcaacaaccgggtgtttcggacggtcggatcgccgctcattctgcctgagcatcacacttgtttaattaaaccgataaatgatgtgacgtttcaagtcgcgattgaccacttgacattgctgcataaagacgtcaagtcgattcaatgccgcgtcgcaaacgaaaatatcaggtttgcccgctttaggccgtttccgttttggaaaagggtccaggattcctttatcggaaaaggagaatag

SEQ ID NO: 1399 - DNA, 891 bp, Bacillus licheniformis
gtgagcgattttttgatgaaacagatcataacagaagaggacagcggggttcttttgaaagaatacgtccagcggctgggcatttcaaaaaggatgctgacggacatcaaattcggaggcggcgatcttttggtaaacggcgggcatgtaacggtcagatacgttcttcaaaaaggggacgagctcgtcattcagtttcctccggaaaaaatgagcaaatctttgcaaccggaagaagtgccgcttcatattttgttcgaagatgaccatgtcctcgtcttaaataaacagccatgcatttcgtcgattccctcgcgtgagcatccatcaggcagtctggcgaacggtctgattcattattaccagcggacgggcgtacacgcgaccgttcacctggtgagcaggcttgaccgcgatacatcgggtgtcatgcttgttgccaagcaccgcttcgcccactcgcttttatcggggctgcaaaaaaagggagccgtcaaacggcaatatcgagcggtcgtccacggtttgatcgcggaagagcagggaacgatcgatgcgccgatcgggagaaaatcatcgagcatcatcgagcgggcggtaatcccggacgggcaaaaagcagtgacgcatttttgggtgaacaggcgcttcagcggcatgacggatgtctccatccgtctggaaaccgggcgaacccatcagatccgcgtccatatgagtcatatcggatatcccttgtgcggtgatacgctgtacgggggaacccgcggcttcatcaatcggcaggcgctccacagtgagaggctgacattttttcatccgttcacaatggaagagctgacgttccaagcgccggtgccgaatgatatgagacagttgatagagagctga

SEQ ID NO: 1400 - DNA, 741 bp, Bacillus licheniformis
atgaaatacgatgttatcggtgatattcacgggtgctatgacgaaatgattgcgctgattgaaaaactcggctactcgctgacatcaggagttcccgttcatccggagaacagaacacttgtctttctcggggatttaactgacagagggccaaaatcgctggaggtcgttgaatttgtaggacgggccgttgaagaaggagctgtgcgatatgtgcccggcaatcactgcaataagctgtaccgttttttcaaaggcaatccggtgaagctgcagcacgggctggagacgacggcggcggaatacagaaaccttccgaaacataaacagaaggatatcagagaccttttcatgcgcctttatgaaaacgcccctctttacgagatcctgcataacggcgaacttgtcgttgcacatgccggcatcaaagcggaagacatcggcaaaaagcctgtcggaaaagtaaaacagtttgtgctctacggagatattacaggggaaacgctgccagacggacggccagtgagacgggactgggccgctcattacagaggcgagccgtgggttgtatacggccatactcccgtcaaaaacccgaggatgattcatcatacaattaatatcgataccggttgtgtattcggcaacaggctgaccgctttcagattcccggaactgacaaccgaatctgttccctcctctttgccttatgatgagtctagattccgcatggaggcataa

SEQ ID NO: 1401 - DNA, 123 bp, Bacillus licheniformis
atgcgttttttcgcctccagtccgtttgtttttcatatgtatatacattgtcccaagccgtataaatcaagcttctgcaactttctccggagaaaatcaggcatatttacttttttttcttga

SEQ ID NO: 1402 - DNA, 1845 bp, Bacillus licheniformis
atggagcacacatctgtctcatctttagttgtcgtactgattatcgcatttttaacacccatcctgctgcaccgtttcaggttaagcataccggtggttgtcgctgaaatcatcatgggtcttattatcggaaaaagcgggttcgatctggttgcccagcacgatacttggctcgaaactttatcgatgctcggatttatctttttaatgtttttaagcgggcttgaaatcgatttttccgtatttgaaaaaggaaagaaaaagcagctgcttccaagcggaaaggaagcgccgaatacatttaaaacggcttcggtcatctttattgccgtctttattttatcgctcggcctttcttacagctttgtcatggcaggatttattgacaacgcctttttaatgacgctgatcatttcgacaatttcgctcggggttgtcgttccgacgctgaaagaagagcgtctcatgaagacaaatatcggccagattattttgcttgtcgccgtcattgccgatcttgtcacgatgattctgcttgcagtgttcgcctcaatctacggggacgaaaacagcaatatgtggctgctgatgatcttatttgccgccggcgtcgttttatacctgttcggaaggatatttaaaaagcggccttttgtcgaagtgctgtcaaaaggaacgatccagatcggcacaagggcgatatttacgctgatcatcgtacttgtggcgctgtccgagtcgctcggtgcagaaaacatacttggcgcgtttttggccggggtgcttgtttcgctgctttcgccgaacaaggagctcgttcagcagctcgattcattcggatacggattcctcatcccgatcttctttgtgatgacaggcgtcaaattggacatttggtcactgtttggcaatccgaaaattttagtgatgatcccgcttctgtttgtggctctgttaatcagcaaagtcgttccggtgctgtttttgaaaaagtggtatgacatgaaaaccgtgctggcttccggttttctcctgacttccacgctttctttggtgatcgcggcgacaacgatcggcgagcgcatcggcatcattgacgcgcagatgtccggcgcgctgattttggtggctgtcattacatgcatcatcacaccgaccggctttaaaaaattaatgccgaaaacggaaagcgaaaaagagaaaaagacgatcacctttatcggcgcgaatcaaatgacgctgccggtcacgcttgaactttctccagaagattatcacgtcagaatcctgcatgtccggcaggaaaagaaggaagaaaagctggcggatccggtgtttgacgttgaagttttgccagattatgaatacgaaacgcttcaatcattcggcgttttccaaacggatatactcgtcgtggcgacaggcagcgaagagcgcaatacagggatcgccctttatgcgaaggagcagaaagtcgcgagaattatcgccagcgcagattccccagacgccgaatcgaggctgaaagaaaacggaattgatacattctccattctgctttccacgaaaacgctgctgcgcgcgcttatcgaggcgcctggcgttatgaaacttttgacgaaccaggatgcgtcgctgtatcagatcaatatgagcaatgagcgatttgacggcgtcctgttaagggagtttccgtttacgggagatgtcatcttcgtccggattttccgcggggttgacagcatcgtgccccatggggatacaaggctgcaaatgggtgacaggctgatcgccaccggttcgcgcgaatatattgcggaattgaaaaaaacgcttggagactga

SEQ ID NO: 1403 - DNA, 702 bp, Bacillus licheniformis
atgaagttttcagaagaatgccgaaacagcgctgcaacttggtgggaagggagttttgtccatccgtttattcaaggaattggagacggcacacttccggttgaccgatttaaatactatgtcatgcaggattcctactatttgacccactttgccaaagtccaatcctttggagcggcatatgctcacgatctatatacgacaagccggatggccgaacacgcgaaagggacatatgaagccgagatgtcgctccacaggaaattcaccgatctattgggcatcacaaaggaagagctggagtcgtttcagccgtcgccgacagcgtatgcgtacacatcgcatttgtaccgttctgtcgtcagcggcagttttgcggaaatactcgctgctttgcttccttgctattggctctattatgacgtcggcgaaacgctgaaaacgtgcaggcctgacaacgcgatttatcaggaatggatcgcgacatacggaggagactggtttaaaaaatctgtaacggaacagatcaaccgcttcgatgagctggctgaaaacgccgatgagaaaacgcgcgcgaagatgaaggagaatttcgtcatctccagcttctacgaataccggttctgggatatggcctatcaaaaagaaagctggtcaaaaagcggggtggatcagcttgcatctgcacgcgatcaccgatga

SEQ ID NO: 1404 - DNA, 612 bp, Bacillus licheniformis
ttgcatctgcacgcgatcaccgatgacaagcactccgtggaagagctttcagcaaaaatcatctcgattcacgatgccgttgactttatccacatcagggaaaggtcaaaaaaagtaagcgaaatatcaagtttgatcgatcgcctggccgaagaaggcgttgataagcgaaagctcatcatcaacgacagggtggatattgctttgtttcatcatattcaccgggttcagctgccttcacacggcttttccgtcaaaagtgtaagaagccgttttccgcatttgaaaatcggaaagtccgtacattcacctgaagaagcggtgcaggctgaaactgaaggtgcagattacgtgctgttcggccacatttttgaaacggactgtaaaaagggccggaaaggaagaggagctctgagcttggcagaagtgaaggcggctgtccgcattccggtcattgcgatcggagggattaccgaacaacgtctggcggaagtcaaaatggcagacggcatcgccgtgatgtcggggatcttttcccatgacagaccgaatgaggcggccgcgcggcttgccagtctcgcgaagggagattcatatgagaaagcgctatga

SEQ ID NO: 1405 - DNA, 1110 bp, Bacillus licheniformis
atgagaaagcgctatgatacgatcgtgatcggcggaggcatcatcgggacttccatcgcttatcatcttgcgaaagcggggaaaaaaacggccgtgtttgaaagcggggaagtcggcaaaaaagcgacgagcgcggctgcgggcatgctcggcgcccatgcggaatgcgataaacccggtacctttttcgaatttgccagagccagtcaaaaagcctataagcgcctgacgggggaattgaaagacataagcggcattgatatcagaaggcatgacggagggatattaaagctggcattttcagaaagcgaccgcgaacacctgatgcaaatgggtgcactggattctgtggaatggcttgaagctgatgaagtatataaattagaaccgaatgccggaaaaggaattctcggcgccaattttatcagggacgacgtccatgtcgaaccggctgcagtgtgcagggcatttgccaggggagcccggatgctcggtgcagatgtcttcgagtatacgcccgttttatcgatagaatccgaagcgggggccgtccgcgtcacgtccgcttccggcacagcggaagcggagcacgctgtcattgcaagcggcgtgtggagcggagctttgtttaaacaaatcggcttagacaaaaggttttaccctgtcaaaggggagtgcctgtccgtatggaatgacggcatctctttgacgagaacgctttaccatgatcattgctacatcgttccgcgccatagcggaaggcttgtcgtcggcgcgacgatgaagcccggggactggaatgagcagccggaacttggcggaatcgaggagttgatccgaaaagccaagtcgatgctccctgggattgaatccatgaaaatcgaccaatgctgggccgggttgcgtcccgaaacaggggatggcaatccgtatatcggaagacatcctgaaaatgaccggattttgtttgctgccggtcatttcagaaacggcatcctcctggcacctgcaaccggtgagatgatggcagacatgatcctcggcaatccggtcaaaacagagtggatcgaggcgtttaaagcggagcgaaaggaggctgtgcacaggtga

SEQ ID NO: 1406 - DNA, 204 bp, Bacillus licheniformis
gtgaacattcagctcaacggccggaaaatagagtggagagacgacggcggcacgatttatgatttgctcgcatcctacaatttggaaaatcgtgttgtcgttgttgaaaaaaacaggcggattatcggaaaagaccaatatcaaacggtcaaattggaagaacacgatgtcatcgaaatcgttcattttgtcggagggggataa

SEQ ID NO: 1407 - DNA, 768 bp, Bacillus licheniformis
atgttaaaaatcgcagatcgtcaattttcatcaagattattgctcggtacagggaagtatccgtcatttgagattcaaaaagaggccgtcagcgcatctgaatcggagatcctgacgtttgccgtcagacggatgaatatttttgaagaatctcagcctaattttttggagcagctcgatttaagccgttatacgcttttgccgaatacggcaggagcaaaaacggctgaggaagccgtccggatcgccaagcttgccaaagcaagcggtctttgcgacatgatcaaagtcgaagtgatcggctgtgaccgttcgcttctgccggacccggtagaaacgctgaaggcgtcagaaaccttgcttgaagaaggcttcattgtactgccgtatacatcggatgatgtcgtcctcgcgagaaaacttgaagagctcggcgtgcacgccattatgcccggggcctctccgatcggttcgggacaaggaatcatcaatccgctcaacctgtcgttcatcattgaacaggctaaggttcccgttatcgtggatgccggaatcggttctccgaaagatgcggcatacgcaatggaactcggtgctgacggggtacttttgaacacggcagtgagcggggcgaaagatccggtccaaatggcgaaggctatgaagtttgccgttgaagcgggcaggctcggatatcttgccggacgaattccggaaaagaactacggcatcgccagcagccctgaagaagggaagttgacgatttga

SEQ ID NO: 1408 - DNA, 1011 bp, Bacillus licheniformis
ttgaccggcaggtattcaagacaggagctctttcacccgatcggaccggacggccaggaaaaattaagccgcgcccgcgtcctcgtgatcggtgctggggctttgggcgcggccagcgcagaaatgctggtgagggccggggtcggttcgctgacgatagccgacagggattatgtggaatggagcaatctccagcgccagcagctctatacggaacaggatgtgattgatcatatgccaaaggccgccgccgctgaaaaaaggctgcgcctgatcaacagctctgttcaagtaaccggaatcgtagcggatgttactgcggaaaaagcgctcgagcttgcggaggaagcgtccctgatcgtcgatgcgacggataattttgaaacacggctgatcatgaacgacgcggcggtcaaattaggcatccctttcctgtacggcgcgtgtgtcgcaagctatggcatcacatatagcgtaattccgggaaaaacgccgtgtcttcattgtcttttggggcatttgcctgcgaataccatgacgtgcgacacagcaggggtgatcggtccggtcgtccagcaggttgccgcataccaggtaacagatgccctgaagctgctgaccgggcatgaaccgtcagggatgctccgctcatttgatatttggacaaatgagcggtctgaagtccgggctgacacgcttaaacatgagacatgtccgacgtgcggaaaaggcgagtttccgtttctttcagctgaaaacgaaacaaaagcagccgttctttgcggcagacaaacggttcagatcaggccggccgcggaacagccgctggaactggaatcgcttgctgccaaattaaaaaaagccggtttaaatgtgacgggaaatccttatttagtttcctgccgtgcggaggattttaagttcgtgatttttcgggatggacgtgctttaattcacggaacgaatgatatcaatcgcgcgaaaacgatatatcacaggtggattggctaa

SEQ ID NO: 1409 - DNA, 819 bp, Bacillus licheniformis
atgagcatatataaagcattaacaatcgccggatcggattcaggaggcggagccggcattcaagccgacattaaaacatttcaggagcttggcgtcttcggcatgacagttttgacagcagtcactgcgcaaaatacaacaggggttcacggcgtctacccgctttctccggaagcgctcggcgcacagattgatgcagtggcagaagatttaaaacctgacgccgtgaaaacagggatgctgtggagcgcggagatgattgaggtcactgctgaaaaaattgcaacatatgagcttaaacgtgtgatcgtcgatcctgtcatgatcgccaaaggcggcgcttcactattgaatgaggaagctgttgaaacattgaaacggcgccttcttccgcttgcttatgcggtaacgccaaacattcccgaagccgaagtgctgacagggagaagcattcaaacaatggaagaccgcaaaaaagcagctcgtgacttgcatgaaatgggtgtccgcaacattatcatcaagggaggtcatcagcctgaggatggcaaagtaaccgatctcctcttcgacggagagacgttcacagaaaaaaccaattcctatattaagacgaaaaatacccatggaacaggctgtacatttgccgcggctcttacggcacaaacagcgaaaggaaacgggattcaaggagctttccgcatcgctgaggctttcgtccacgaagcggttgtacacagccttgattttggagccggccacggaccgaccaaccattttgcatatcaaaagttatccaacgcagggttggaactgtag

SEQ ID NO: 1410 - DNA, 777 bp, Bacillus licheniformis
atgaatttatcactagaaggccggaatatcgtcgtcatgggtgtagcaaataaacgaagcatcgcatggggaatcgcccgctcgcttcacaatgcaggcgcaaggctgatttttacgtatgcgggcgagcggcttgaaaaatcggtcaaggagctggctgattctttggagcgaaacgattcaatcgtacttccttgtgatgtcactaatgaccaggaaattgaagcatgcttcgccgacatcaaaaaagaagtcggggtcatccacggcattgcacactgcatcgctttcgccaacaaagaagacttggctggcgaatacttaaatactacccgcgacggttttctgctcgcacacaatatcagctcctactctctgacagcggtcgctaaagcggcgcgcggcatcatgactgaaggcggaagcatcgtcacgctgacataccttggcggcgagcgcgttgtatccaactacaatgtcatgggtgttgcgaaagcatcgcttgatgccagcgtcaaatacttggcgagcgatctcggaaaagacggaatccgcgtcaacagcatttccgcagggccgatccggacattgtccgcaaaaggaatcagcgacttcaactcgattttaaaagaaatcgaagagcgcgcgccgcttcgccgcacaacgactccggaagaagtcggcgacacggctgctttcctgttcagcgacctttcccgcggcatgaccggcgaaaacctgcatgttgattcaggctaccatatcatcgcgcgataa

SEQ ID NO: 1411 - DNA, 126 bp, Bacillus licheniformis
ttgctccgcatcgtgttttctgctagacatcttgatccctccgatctgttcatggtatatctatatgcaaaaaaggagaaatcagaagaaaagaaaaagcaatcctttagcggattgcttttttag

SEQ ID NO: 1412 - DNA, 480 bp, Bacillus licheniformis
atgtctagcagaaaacacgatgcggagcaaaagccgctcatgtatattgtgcagccggactatgataaggcagaggcgaacatgcaggatattctgattaaaagaaagaagaaagcaaagcccgaagcttccgaacaaaaagcgcggcggaaggaacagcaggatgaagccgtccggcccgacgaaaaagacgaagctgaagcggtgtttaacgatgaggcgaatcgatccgaaaaaggagtcaaaccgattaaaaagccgctcagcaagatgacgattgccgagaaaatcgactttttggcaagccttcccggcaatatgccgaaaaccctttgtctcattgaagcagacgggaagacatacaggggaacgatcgtcggaaagaagggcgattccgtctttgtcagaacgtcgagcaaaggggctccggcggaactgccgatcgagagcattacctccttgcacccgctcggcttttaa

SEQ ID NO: 1413 - DNA, 450 bp, Bacillus licheniformis
atgacgaaatgttcagccgaaaattgcgtgtgcgaagccgttgaaaacattcacgatctgcaaaacgccattgaggaagaaggctgcccgacaagctgcttcagcaacctgctttccccttcgagacacttaggcgacaccattccgtttattttatacacttctaagtctaagccgttcgtagcgtttggaaatgtcggagaacttcaggcaggtccttgcttcagcaccgtgtttttcagagttgaaaacattgatgactgctgcgctacattgagactgttgattgcctttgatgataatcgccgtgttctcgatttcacagaagataaagacaaaatttgcgatgtgttccgcttggaaaaaacaagtttctgcattgaagtcgatctggaatgctactgtgcgatcgaatgcttaaatccaaaactgatcaatcgttcaaattaa

SEQ ID NO: 1414 - DNA, 489 bp, Bacillus licheniformis
atgagctgcggaaaacaccatggccggcatgaaaattgtgtatgcgatgcagtagaacagattataaaagaacaggatgccgttgaggaaacaacagcgtgctcgacaagctgctttggcaacctgctgagtccgacggtttccggtaaagacacgattccgttccttttgtacgacaaaaaaggcggactgttttcaacatttggaaatgtcggcggattttcagatgatatgcagtgcttcgaatcgattttcttccgggcagaaagtctcaaagattgctgtgcaacgctttcaatcctgaggcctgtggacataaacggcgacacattaagcgtctgccatccttgtgaccctgactttttcgggcttgaaaagacggacttttgcatcgaggttgacttgacttgtttctgtgcgattcaatgtctgtcacctgacctagttgatcgcgcagcagacaaaaaacacaatcaccaccacggttaa

SEQ ID NO: 1415 - DNA, 513 bp, Bacillus licheniformis
atggaaacaagaccatattcatggattgcgcttgacccggaatgcgaacatccaggcaacgattatcaccctagttatcctaagaaaaaattatgtgacgactatacttgcaactgtggtaggaaagggcaaaatggctttatcgattctgacctagatcaacttcatcttaacaaacagctctcagatgaaacgatcatcattaaagactcttgtgatgttcaagtctcaactgaagacacacaaacgttggcatcagtcatgacagctgcacaaacactagctgttactattattctcgccattatcgatgatcctgatctagccgaacttgtcacaactgatctgttgcaggtaactgccaataaacaaacgaacagacaaaaattggtgatcgataattccagaaatgtacatgtcacaaccgaagatacagacacagctatcatcgtaagcacatttgttcaaactgttgtaatcaccatcaccgcccttatcgtcggccttctataa

SEQ ID NO: 1416 - DNA, 399 bp, Bacillus licheniformis
ttggcagattttgaaaaacttcaagagaacgtagatccgataatgaaatcagttgttaaaaatatcttgaaaaatcggggagtaaccagcgataaagttcggacgctctcagaagaagaaaaagaaaatattttcaatatgctggaagatctaaaaaaacaaaccgatgctttggttcaaaaacagaaagaaaaagcagccgcaccgaatgaaaaagggacaaagagagaaaagaacgctgatgcgtcatcagaaaatggcgagagaccaagaagaagaagaaacagaacaaatagactgagagaaaaacttcgacaacggagggagcaagaaaacacagcaacagcggaaaattcaaccgagtcagatacttcagcagaaaaaaatggggatttgtag

SEQ ID NO: 1417 - DNA, 387 bp, Bacillus licheniformis
atgtcgtttcatgaaaaagccgaagcgctgtacgcagaaacatttgacgaattacaccgggaatatgaccagctcattgaagtaattgattcagaacatgtcacggtaaacacggcaaacataacagcagctctctctttacaagccatcgtgatctctttgacgattttatcggctcagcttgcgatcgaagacgaggatacagcagacattgtctcagaacaccttttagccgtacacaggctgcaaagcaggagaagagtcatcatcaaagtcatcggcagccgcaatgtcaccattacgctttcctcgctggagatcctgctttccgtccaagttttaaccgaagtgctgatcgcgcttatcacagagcttgacatactttaa

SEQ ID NO: 1418 - DNA, 357 bp, Bacillus licheniformis
gtgatacaaagctggtttttattttttttattttctatcgcggtatttcggctgacgaggctgattgtgttcgacacgatcatggcgccgtttagaagcctgtttcatgaagaggttgaagaaaaaaacgaaaaaacgggagagaccgaaacgtatcttgtcatgaaaggaaaaggcgtgagagcgtgggtcggcgagctgctgagctgctattggtgcacgggcgtgtggtgtaccgcgtttttgcttgttttttacgcatttgttccggtcattgctgaatggctgattcttctgctttcgatcgccggcctggctggagtattggaaacgatcgtttccaaatggctcgattga

SEQ ID NO: 1419 - DNA, 657 bp, Bacillus licheniformis
ttgcggtatatcgattcaaccagctgttcaaataaattcatcgcttcccctccttatgatggtgtatgcaccagaagaaaaattggcaacaaaaaaaccggatgcattccggctttttttgatattaataggttctcttttttttgccgcatccgcagccttttttcttcactttttttgagaaagtggactgatgattgctggaagcgttcgttaatcggccttgctgccttcttttcacttgtctcattgcattccttcctttctcatgcttatacgccattatatgagtcttcttttcataagttgctaatgacaaatccccattcaatcgagccatttggaaacgatcgtttccaatactccagccaggccggcgatcgaaagcagaagaatcagccattcagcaatgaccggaacaaatgcgtaaaaaacaagcaaaaacgcggtacaccacacgcccgtgcaccaatagcagctcagcagctcgccgacccacgctctcacgccttttcctttcatgacaagatacgtttcggtctctcccgttttttcgtttttttcttcaacctcttcatgaaacaggcttctaaacggcgccatgatcgtgtcgaacacaatcagcctcgtcagccgaaataccgcgatagaaaataa

SEQ ID NO: 1420 - DNA, 210 bp, Bacillus licheniformis
atgaatttatttgaacagctggttgaatcgatataccgcaaacatgatcaaactcaagccggccatgacaaggtgctctttgaacagcagaaggaactggagacatttgaccgctcggccgaacagttcggcaggcagatcgaagcgtttgcggagaatgccgaaaaatggctgggagaggacgggagtctgccaggcatttttaaataa

SEQ ID NO: 1421 - DNA, 132 bp, Bacillus licheniformis
atgggcttttgttgcggaggctacggcggtggctacagcggcggctatggcggcggctatggttcaacgtttgtattgatcgttgtcttgtttattcttttaattattgtcggcgcttcttttaaatattag

SEQ ID NO: 1422 - DNA, 258 bp, Bacillus licheniformis
atggacaatcaatttttcaaaaacatcgaaaagaaaacgggcgtcagcatgaatgacgtcatgcagctcgcaaattcgctgcaaaatgccaacttcaaggatgaaaatacggtccgcagcgtgattaagcgcgtcgctaaattggcgaataaacgggttccgaaggaaatggaagataagattgttgaatccattgtaagcggcaaagaaaaaatggatttcaacacgatcgcgaaaatgatgaacagcaaaaaataa

SEQ ID NO: 1423 - DNA, 2283 bp, Bacillus licheniformis
ttgaaatgcgcccgattcaataaccgagacattcatatacatacatattcgagagaacacctgcaattcctctttgatgaagcaagaaaagacaggatcacgtgtaaatattgcggcttgccgctcagactgaaattgtcaattcatgaagagccgcattttttccaccgggaaaacggggatttttctcaatgtgaagcggcttgcttaaatgagaagacagagcagaagaccaaacagaacgattatactgaaagcggcgttttccgcctcccgaaaggcaaagcgatcggagaggaaaagaaggcggacacggacttctggacgccgcctcgcgaagcttccatccattctcctttctctccagcggcagaaacggctccggaaccggtctttccgaatgtgccgctgaatgagaaacagcttgccgccgtgacggcccccgaagaaccccttctcgttctggccggcgcgggaagcggaaaaacgcgggtattaaccgcgcgagcggcttatatgatatcccggctcgatatcccgccttctgccatattgctcgtcacattcacgacaaaagctgtgaaagaaatgaaagagcggatggcctcgctatacggtttgccgatgcagactgtgaaccgcctcgtgacaggcaccttccacagctttttttacaaaattctttatcatcatgatccggccaaatggaatggcgagcacctgctgaaatgggaatggcaaaaagaacagtacatcaaaatggcccttgccgaagaagggcttgatgaaaaagactttccggttgaccaggcgatccagcagatcggctactggaagaacgcttatcttccgggtgaacagattccgcttgaagacgaatgggaaaagcgggttcaccggctgtaccgtcattatgaagaacaaaaagcagcgcggcgccaattcgatttcgacgatatggcatctgcgtgctggcagctgtttcaagaacagccggacattttaaagcgatatcagacgcgctttcacgcgattttgattgacgaatttcaagacattaaccctgttcaatacgccatcatcaagctcttggcaagccccgaaaacaacctgacctgtgtcggggatgatgatcagtcaatctacgcgttcagagggagcagtccttcttttatactcgattttgaaaaagattatccgaaggcgaaaacggtccgcctcacgacgaattacagatcgagccatccgattgtggcaagcgccgatatggtcgtaaggaaaaacaaaaagcgttttccgaaaacattaagcgccgcgagagacgaccgccaaaaaccgctcttattttatccttatgatgaagaggaagaagcgattatgatcgtctctgatatccaagaaaaaattgaaatgggcgcaaagcctgatgacttcgccatcctataccggacaaacagcagcggccgcgccatttttgaacgtctgcaccagtcagccattccgtacacggctgaacaaggtgtccggtcgttttacagcaggaggatcgtccggcagatgctggcctatctctacttaagccaaaatcaagatgacgcggaagccgtaaagcagattttacccgccctctttctcaagcagtctgctttaaacacgcttaaagcgctctcgattacagaagattgcacaatggttcaggcgcttgaaaaattgactgacattaaaccgtttcagcttgataaaataaaaaaaatcgttccttttttcccaggcttaaaaacgatgaagccggttgaagccatctctttcgcagaagaaaagatgggcttttccgattacctgaaaaagcgcggaaacgaagggaacaagctcgaaaaagggtctgacgatctgcgggatctcaaaactgcggcaaaaaaattcaaaacgatccccgaatttcttgagcatgtcgatcatatgagagccgcggaaaagcaaaaagctgacggatacggtgttcagcttttgacaattcatcgtgcgaaagggcttgaatttaaaacggtctatatactgggagtgcaggacggctcgattccgcatgactttgccctggagacagcgagaaaaggcgatgaaaccgctcttgaagaagagcggaggctgctgtatgtcgccatgacccgggctgaggaccgcctgtatatcagcgtcccttccttcagaaggggaagaacggcataccgctcaaggtttttacagcctattttacgcccgaatccacaagttcagctgcaataa

SEQ ID NO: 1424 - DNA, 249 bp, Bacillus licheniformis
atgggatatttgccgcctgtccgcaatgatcaatatatacagtatgccaatcgaagcatcagccaaaaatcgaactacgcttatatacaaaaaaccgccaatatcccaagcgagcgcgcctaccgcgaagtcgaaaaaagagaggaaaatcagactgcggcttttaggcgggtcgaggaaaaaaagacggaaaaaagcgctcaaccgccgtgttgcgaaaaaggcggaaagcgggcgcttcgtcaatga

SEQ ID NO: 1425 - DNA, 588 bp, Bacillus licheniformis
atgggaagcatagtgaatgatattttaatgtggctgaccgatcttggctatttcggcattgcgatcggtttaatgatcgaaatcatcccgagtgaaatcgtactcgcctacggcggatacatggtctcaaacggctcgattacgataacaggcgccgtgattgccggcgtcatcgggggaacgattgctcaattgtttttatactggatcggctactacggcggacggccgtttttatacaaatacggaaaatacttattgatccaaaagcatcacattcaaacagccgaaaaatggtttgagaaatacggcggaggcgtcgtcttttctgcccgcttcattcccgtggtcagacacgccatctccattccggccggcattgcgaaaatgccgattttaaaattcacgggtctgaccgtgctggccatcataccgtggtcgatactgttcgtctatctcggcgtacagctcggcagccggtgggaccatgttgaaaatgtagcaagaacgtacacgactccgatcatgctcggggcggcggctatgatcattctgtatttcggactcaaaaaactgcgcagaaaataa

SEQ ID NO: 1426 - DNA, 987 bp, Bacillus licheniformis
atgacatccgtactcgtaacaggaggagccggatacatcggcagccacaccgtactcgaattgacaaagcaaaaccgctccgtcgtcgtgcttgacaatttatctaccggacacagggaagccgtcagcggggtcagcttttacgaaggcgatatcgctgatgcggcacttgtcaaagccatcatcaaacatcatgatgtcgatgctgtcatccatttcgccgccaaaagccttgtgtccgaatcgatcgaaaagcctgagatatactttagggaaaacacgctaaagtcttgtgcatttttcgaaacggccatcaaggaaggcgtcaataacatcgtcttttcgtcaaccgccgccgtatacggcatcccggagaaagccccgattaaagaggctgctcccctctcccctgtcaatccttacggggaatcgaagctgatgatcgaaaaatatctgcactgggtcggaaaaacgcacggtgtcaaatgggccgccctccgctacttcaacgccgccggcgccgctttaaacggagcgatcggcgaggaccacgatcccgaaagccacctcattcccctcgtcctgcagacggctttgggacagcgaaagcagctgtccattttcggagaagattattcgacgccagacggaacctgcatcagggattatattcacgtcctcgatctggctcccgcccacctggctgcccttgatggattatatgaagacagactgaagcaaaatgtttataatgtagggacaggggccggacattccgtaaaagaaatcattgaaaccgcggaaaacatgacagagcgaagcattgcagcaaaaacggacgagcgcagagcgggagatccgccagtgctggtggcggacagccggacactgatggaagataccggatggaagccgcaatacagcgatttgcaaaccatcattcaaagcgcatggcaatggcacaaagcgcatccggacggtttttga

SEQ ID NO: 1427 - DNA, 891 bp, Bacillus licheniformis
atgaaagtaaaaaaagcagtcatcccagcagccggattaggtacgagatttttgccggcaacaaaagcgcagccgaaagaaatgctgccgattgtcgataaaccggccatacaatatatcgtggaagaagctgtccaatcaggcattgaagacatccttatcattacaggaagaaataagcgttcgattgaagaccattttgaccgctctgtggaacttgagcaaaacctgctggccaaaggaaaaaacgatgtgttaaaagagatacgcgagatcgccgatatggcgaatattcattatatccggcaaaaggagcccatcggcctcggacatgcagtgttatcggccaagcatttcatcggtgatgagccgtttgccgtcctcctcggcgacgatatcatggtgtcagaaacaccggcgcttaggcagctgctcgaagtatatgaagaatatcagaccgaagtgatcggcgttcagcccgtcgatccagcggacgtgagcaaatacggcatcattcagacatccgcgcaaaagaacaaagtgtatcaaatcgacgatctcgtagaaaagccgaccgtcaaagatgcgccttcaaatatcgcggtcatgggccgctatgtgctgaggccttcgattttccctgtgctcgaacaaacgaagcgcggcgcgggaaatgaaattcagctgactgacgcactaagggaaatctgccgggaacaaagcatgtatgcgcgcaaattgaaaggaagccgctttgatatcggcgacaagctgggcagctttaaagcgagtacggaaatcgccctcatgcgggacgagatgcggccaaaactgctcgcctacctggagagcgtcttaaaaaaagaagcgcagaaaggagcatggcaatga

SEQ ID NO: 1428 - DNA, 396 bp, Bacillus licheniformis
atgaacaaaaaaaacatccccacactcgttcgtttcgggacagtcggagccgggaacacactcgttgatttcgtcgtgtttttcctccttacgtcgctccacgtcccctacctggccgcacagttgttttcctattcggcaggcgtggcaaacagctatatctggaatcggacatggacgtttcaagtaaaagaaaaagcgcatggcgcggaaatcgtccggtttatcatgatcaatcttgcagcagcgggcgctacatttgtccttctgtacatttttcaaaaagccggcctgtccctttttatcagcaagatgtccgcaacagtcgcaggaatggccatcaactttaccggaaacaagctttgggtgtttcaagaacccggcgcagattcataa

SEQ ID NO: 1429 - DNA, 420 bp, Bacillus licheniformis
gtggaagccgtcattgtgaagaatcaacaacagcttgaagacgccttctttgttagaaaggaagtctttatcaaggagcagcacgtatcaccggaagaagaaatggatcatcttgatcaggaatcttcacatctcgtcatctatgacgaaaaagagccgatcggcgctggccggctccggcttgtcgacggctacggcaaacttgaacgaatctgtgtgctgaaaagccaccgctccctcggcgtcggcaacctgatcattcaggcgcttgaagaggaagccgccaagcaaggcgcgtctcaatttatgctgaacgcgcagacacaggctgttcccttttacgaaaaacacggctataaagtcgtgtctgaagaattttcagatgcgaatattccccatgtcaaaatggtcaaaaagtaa

SEQ ID NO: 1430 - DNA, 510 bp, Bacillus licheniformis
atgaaatacggtattgtgctatttccatcaaaaaaacttcaggacattgcaaattcctaccgaaaacgctatgacccgaattacgctttaattccgccccaccttacattaagaacgccttttgaagtgtctgaagacgagatctcaggcgtcgtccgacacttgagagagctttcaaaagagctgaaaccggtcacgctgaagattacaaaattcagttcctttgcccccgtcaataatgtcatttacatgaaagccgaaccgacagaggaattgatgcagcttcatgaaaaaatgtacagcggcgttttggaagacaaacccgaatacgcgtttgttccccatgtcacagtcgcacaaaagctgtcagatgatgagcattccgacgtcctcggcacgctgaaaatgagagacgcgtcacacgaagaagtcatcgaccgctttcacctgctttaccaattggacaacggatcatggaccgtctatgaaacttttattttaggagcgtga

SEQ ID NO: 1431 - DNA, 723 bp, Bacillus licheniformis
ttggctatgaaaacaggagtcattcaggagaaaaagcttttttcggaagagctcggcgaggaaatggagcttctcgtctatttgccgtcctccttctcgccgctttacaaatatcatgtgatcatcgcacaggatggacatgactatttccggctcgggcgcatcagcagacaggttgaagaactgttggcgaacggtgaaatcgaaagaagcatcatcatcggcattccgtacaaaaacgtacaggaaagaaggcttacataccatccggaagggtcaaaattcgaagcgtataaacgttttttggcaaatgaactcgtccctttcaccgacagagagtatccgacatatcaagtcggatcaggcaggacgctgataggggattcgctcggaggaacggtttctctcatgacggcgcttgactacccgaatatgttcgggaacgtcattatgcagtcaccttatgtagaccgccatgttctcgataaagtgaaacagtccgattccctgcagcttatttcaatttgccaccaaatcggcgagaaggaaaccgccgtcaaaacgaccgatgatcaaattttggatttcacaggtccaaatgagcaattaaaagagttgcttgaatcaaagcagacaaactacgatttcaaagcttttgacggggatcacaaatggacgtactggcagccgctcatcacccccgctttaaaaaaaatgctgtag

SEQ ID NO: 1432 - DNA, 333 bp, Bacillus licheniformis
atgaatttgatcatccgcctcgtaaaattgaaaggctgctgggaagaccttgtgccgaagatgcgctgcgatgcatcgtccattataaccaacaatcccgaaagcggcaaaagccggcgggatttcacagcggaaagaaaaaggtaccgtgagcgatacggataccctccgatagaccgacaatgccttggtacgaaaaaaaacgatcataaaaaatcacggctgccgaacagttcggcagcccttttcgcttctttcacaagagaatttcgtgttacaatgaatggaaacgttcacaaacattatttctggaggaattcaccttggctatga

SEQ ID NO: 1433 - DNA, 144 bp, Bacillus licheniformis
gtgaaatcccgccggcttttgccgctttcgggattgttggttataatggacgatgcatcgcagcgcatcttcggcacaaggtcttcccagcagcctttcaattttacgaggcggatgatcaaattcatgcttgatgtcgcctga

SEQ ID NO: 1434 - DNA, 489 bp, Bacillus licheniformis
atgaatcaagttcaagcgctgcgcggcgatttgttccacgaattggagacgggcatccgctccacgtgtcatcttctgaaaaaagtgaaggaatctgactggtcttaccggcccgccgaccgcatgcgaagcctgaaagaactggcaagccatctgacggccatcccagaagccgacttggccatcatgcaggaaaaggaagaggacgtcatcgcccggattgaaaagaaatatggtgctttgcagtcggctgaccaaatggctgcagctatgcagaaaggattcgacgcttttcaaacgtatatgacttccctctccgacgaggattttttgacaaaaaaaacaaagccgttttacctcgatgaagggatgacccaaagccgctggctgacggaaacgctcacccacatcttccatcacagggcccagctgtttaattatttaaaacagctcggctatgacgtcaacatgttcgacctgtatctataa

SEQ ID NO: 1435 - DNA, 948 bp, Bacillus licheniformis
atgcccaaaacagagcgtttaatcgaattgatgatgaccattcatacaaaacgaaaatttacggccggggagctcgcggtggaattcggagtttcctaccgcacggttctccgcgatctggacgagctcagcgcactcggcgttccgatctattctgaaacaggcgcgaacggaggctattatttgctgaatgagccggtgcttccgccgctctttttcacacaatcggaggcggcggctatgtttttcgcgtatcaatctttgcagtttttcggatcgctcccctttgatgcggaaacgcggatggttttaaaaaagttctaccgccaccttcccccggaaacacaggagcggattgatgcgatgaaagacagaatcgtgttctggaatccgcatcgcccaaaagccgccgaacatttagagacgcttcttgacgcagccgtcactcaatccgttttgacggtcgtttatgacggaactgacgagtgcacggagagatccatccagcctatcggcttatacagctggaacggcttctggtactgtccggcctattgctttaaaaggcaggcgttcagactgttccgcgccgaccgcatcctccgtgcggaaaaagcggacagcgggcaggcccgccagcttccctatccatcagttctcagctggatcaaacattcggagagcgagtgccctgaaccggtgcggctgcaagcggaactgacacgtagaggagccaggcgggctgcggctgatgtggatttattcaagatcctcaccatgcgggatgacggaacgggggcgatcgatgccagtatccccaggtctgaacttgagtatttcggagaacttttgtggaatctcggcgctgaggtaactgtaacagaacccgcggaaatcaagcttcatctgaaacggaaggctgctgacattttagcgaggtacggctga

SEQ ID NO: 1436 - DNA, 1125 bp, Bacillus licheniformis
atgactgaacatgtacaaacaacgctggcgcaaatcggcaaccgcagtgacgaaataaccggaaccgtcaatcctcccgtttatttctcttctgcgtacaggcacaaaggaatcggggaatccacaggatttgattacattcgcacaaaaaatccgacaagacagcttgtagaagatgcaatcgcgaaactagaagggggaacgcgcggctttgcgttcagttctggtatggctgccattcagacgatcatggctctgtttcaaagcggggatgagctcatcgtttcatccgatttatacgggggaacataccgcctttttgaaaacgaatggaagaaatacggactgcgctttttatacgatgatttttcagacgaagactgtatcaagtcgaaaatcacggacaatacgaaggcactgtttgtagaaacgccgacaaatccgctcatgcaggaagcagacattcaaaaaattgcgcaaatcgccaaagagaacgacttgctgctcattgtcgacaatacgttttatacaccggttctgcaaaggccgattgagctaggcgctgatcttgtcattcacagcgcgacgaagtatttgggcggtcataacgatcttttggcggggcttgtcgtcgcaaaaggcgaagagctgtctgaggaaatgttccagcaccaaaatgccatcggcgcggttttatcgccgttcgattcgtggctcttaatgagagggttgaagacgctcgctcttaggatgagacagcatcaggaaaacgcgcgggagctcgcggcctttttggaagagcaggaggaaattgccgatgttctttatccgggaaaaggcggcatgctgtcattccgcgttcaaaaagaagaatgggtcaatccgtttctaaaaaatctcaagacgatctgtttcgccgaaagcctcggcggagtcgaaagcttcatcacctacccggcgacacagacccacatggatatcccggaagacatccgaattgcaaacggcgtctgcaacaggcttctgcgcttttcagtcggaatcgagcacgtctccgatttgaagcaggatctcaaagctgcgctggaaaaagtgaaaggggaggcggttccgcatgagtcatga

SEQ ID NO: 1437 - DNA, 1176 bp, Bacillus licheniformis
atgagtcatgaaaactggacgcttgaaacaaagcttgttcataaccaaaataaaacggacggagcaaccggagccgtcagcgtgccgatccagcacgcatcaacctttcatcaagattcttttgacaaattcggcgaatatgactacagccggtcaggcacaccgacaaggaaggcgcttgaagacacgatagccgagcttgagggagggacgagaggatttgctttttcatccggcatggctgcgatttccaccgcctttctgcttttgtcaaagggcgatcacgtgctcgtcacaaaagatgtgtacggcggcacttaccggatgattacggaagtgctgagccgctttgggattgaacatactttcgtcgatatgacggatttaaatgaaattgctttaaacataaaggaaaacacaaaagtcatctatcttgaaacaccgtcaaatccgacgctcggcattacggatattagaggggtcgtcaagcttgccaaggcgcacggctgtctgacgttccttgacaacacgttcatgaccccggcgttgcagcggccgcttgagctcggcgtcgatattgtgcttcacagcgcgacgaagtttttaagcggacacagcgacgtattatcaggccttgccgtcgtgaaagacaaaaagctcggcgaagaactctataagctgcaaaattcgttcggcgctgttctcggcgtccaagactgctggcttgtgctgagagggctgaagacgctccaagtgcggcttgaaaaagcaagcaggacggctcagcagctcgccgaatttttcgaaaaacatccggccgtcaaacaagtgtattatccagggctgtcttcgcatccgggtgcatcgatccacaaacaccaggcgaacggcgcaggtgcggtcctttcttttgaacttgaggatgcggaagccgtcaaacaggttgtggaaaatgtctctctccctgtcttcgccgtcagtcttggagctgtggagtcgatcctttcttatccggcaaaaatgtcgcacgccgccatgccgaaggaggagcgcacaaaacggggcattaccgacggacttctgcgcttgagcgtcggggtcgaaaatgccgatgatttacaggcggactttgcccaagcgttggaagccgtatccggagcgcttgcccgttcataa

SEQ ID NO: 1438 - DNA, 1191 bp, Bacillus licheniformis
atgaattcttcattgatttcaccggatgacgtgtgggtgctttggggatttatcgcggtgtgggctgctgtgagtatttatttagagcagcggtttcgctgggctgccgctgtatcgggggccgtattggcactgggcggatcgatgctgtttactaatgcagggattcttccggccgagtcgcccttctatgatgcggtgtggtcctatgttgttccgcttgcgattcctttgctgctttttcaaatcaatgtgcggaagatcctgaaagaaagcggcagacttttgatgatgttttgcatcagcgcgctgggcactgcggccggaagcgtcattgctttttttctgtttaaggatcagattccgcaccttgataaaatcggcggcatgatcagcgcctcttatatcgggggaggcgtgaattttgcagcgatggccgccaagttctcaactcccggtgagtatgtatcatcgacggtggttgcggataattttatgatggcttttctttttttcattttaatggggataccggcgctaacatggtttcaaaaacgcttcggcgttcaggaagtggcgggcggccgcgaaaatcaggcggaagcctattggaagagaaaagacatctccttgcaggacatcgctttaaacatcggaaccgcctttgcgatcgttgctgtgtctgtaaaagcagcggcttttttcaaggaacgtttttcttctgacggcggatttcagtttcttgcctttattctgggcgaccagttcctgctgctgacgacgctgacaattttgctgacggtagtgtttccccgctattttgaacggctgcgcggctcacaggagatcgggacttatttgatttacttattctttgtcgtgattggcattccggcggatttgcggatcatcctcatgaacgccccgctcctcctggcatttgtctttgtgattgccatgtccaacctgctcgtatcgctcttctgcggaaagctgtttcgttttcggctcgatgaaattctcttggcttgcaacgcatctgtcggcggaccgacgacagcggcggcgatggcgattgccaaaggctggcggggcctcgttgctcccgtaatgctggtcgggacgttcggatatctgatcggcaattatgtcggcaccttcttgggcacatggttttccaccctgttataa

SEQ ID NO: 1439 - DNA, 570 bp, Bacillus licheniformis
atggatatcaacggcttaatcaacgaattacatttgatgcagcaaagctatgcgacattgttttcggttgtcaataaggtgcaaacccgcggtgacgaatatatggaaatattaactgccaggcaacacatggcgctcatcgctatcgcgcatttgccgcctgaaactgccacgcttacgaatatctccaaaaagcttggcacaaccaaacagaccgccaacaagctgatgactggtctggtcaaaaaaggctatgtcaaatcagtgccaagccaaaaagacaaacgctccattaatattgaaatgaccgctgaaggaaagaaagcgctggtggagtgttccgaaaggtccgtctatttcctggccgacttgtttcagcaatttacatccgaagaggttgcgacattttggcggctgttgcaaaagctttaccgttttgacggtgaggaacatgacggttttgaggagaatgcaaacattcagcttggcgtggggaattcgttagatacagaaaggattctcggagaatttgagaaacgccgctatggaggagaaaacgatgaaaagtga

SEQ ID NO: 1440 - DNA, 285 bp, Bacillus licheniformis
atgaaaagtgatctttatgtaaaagcaacaacttttaaaatcaaggcaaagaagaagttctatcatgcaaaagataaattccgccagacaaaggaaaccattcgccgcggcacaaaattagacaggacaggcccctttttctcaagctgcattgctctgatcattattggatgttcctgggggacaaacgcagaatggctcgtctggttaggggccgcaagtcttttaagcaacgttttattgctgtttgcaacattttttcgccgtaatcaaaagtcaatttga

SEQ ID NO: 1441 - DNA, 1374 bp, Bacillus licheniformis
gtgaaacagaacaaaagagaacaacttgttaacctgtttagtgtgttaaaagaaaaaggtcagatcaacgcggcagtgctagtcgctgaagacggagacattctttatcaaggcgccttcggatatgaaaacttggcagataagcgtttattgcaggaacattccttatttgaattagcatcgctatccaagccgttcactgctttgggcatccttcaattagcccagcaaggggaattgaaaatcgaggatcccgtagaacggtggataaccgggtttccctaccagggcgtaacgattcgcgatttattgacacatacgtcgggtctgcccgattatatggagtggtttctacaacattgggatcataacaagattgctgttaatcaagatatcgttgatatgctgatgaatcatcatccgcaacgctattttgccccgggtgaaggttggctttacagcaatacgggatatgtgctgcttgcggttatcattgaaaaggcatcaggtctgagttttgcagaatatatgaaaaaaaacatctttgaaccggtgaaaatgcggaactcaagggtttataacagaaggctgcagcctgaaaccattgagaactatgcgtatggatatgtgtatgacgtgcatacagcacagtacgttctgcctgatgaccttgaagaaacaaaatatgtctgctatcttgacgggattcagggggacggaaccgtaaactcaaccattcatgacttatatttgtttgatcaagccttatatacagattgtttgatcaatcaagtctcaaaagagcttgctttttctcccgcgtctctgaaaaacggagtgtctatagattacgggtgtggatgggtgcttcgggacagtcctgaaacagggagaattgtcggtcacagcggcggctggccaggctattcaaccgtaatgatccgatatatcgatcaacgaaaaaccttcatttatttgagcaatgtggaacaggatgatgaatatgaacaggccatctttgaagccgttgaaaatatcctgtttgacaaggcctacaaaatccctgatcgccctgccgataaagagaaaaaagagatcgatccggccatttacaaaagatatgccggaagttattcacttcaggatggcaccgccgctgatgtgacagttgataagggccggatttatatgcaaatcaccggacagatccgttttgaattatttccagcctcggaaacgcgctttttcctcaggtcattgtctgttgaagtggaatttattttggaggatggtgtcgcaacccgcttgattatatatcaaaatggcgcagaggaagaagcggtgcggatagtggaatcaaacagcaagctatga

SEQ ID NO: 1442 - DNA, 150 bp, Bacillus licheniformis
atgcaatttggggatatctgcccggctgaatttcctgatgagcatcaatcggatattcatggtaaaggtgctccatctataaggaggttaatgaggctgaacaaatttaacctgttgaaagagccctgggtgatgaatatagtggcatga

SEQ ID NO: 1443 - DNA, 984 bp, Bacillus licheniformis
atgttaaagacatcgaaatttgaaaggagaacaactgtggctaagactatcatttctggttttattttattttttctgcttattttctcgtcggctgaaccaacatcagcggctttttgggatacaaaaggagacaacattattcatgatccttccatgattaaagaaggaaatacgtggtatacattcggcacgggtatcggcaatggaatccgcgtcatcaaatcgacagacggaaaaacatggagcgcagcgccaagcatatttgcaactccattatcatggtggaaaaagtacgtgccgaaccatgaagaaaaccaatgggcgcctgatatcagctattataatggacgctattggctttattatgcggtatccgcgttcggctccaatacttcggcgatcggactggcttcaacagaccgaatctcatccggaaattggcgcgacgacgggcttgtcatccggacgacgacctctaacaattataatgcaatcgaccctgagttagtgattgataaagaaggaaatccgtggctgtccttcggctcgttttggagcggcatcaagctgacaaagcttgataaaaaaacgatgaaacctacagggaaggtttattccatcgcatcaaggccgaacaacggaggagcggttgaagcgccgtctatcacatataaaaacggctactattatttattcgtttcgttcgataaatgctgccaaggtgtgaacagcacgtataagatcgcttacggccgctcgacaaaatcacggggccttactatgacaaaagcggcaagaatgacggaaggcggaggcacaatcctcgactccggaaacgaccagtggaagggcccgggcggcgcggatatcgtgaacggcaacatcatcgtcagacatgggtatgatgcgcttgacaacggggcgcctaagctgctgatcaatgatttaaactgggattctaaaggttggccgaagtattag

SEQ ID NO: 1444 - DNA, 180 bp, Bacillus licheniformis
atggatctgatacttaaaagtgttgatagtattttaatcgtatttttagcaatcttttttatgtggaaattcgtttatgaaattaaacatgagaagcggaaggctgttatcttgcttttgctgctcatcaatgtctattttattgtaaaagtgttcaatctcgtgttgcaattgatgtag

SEQ ID NO: 1445 - DNA, 579 bp, Bacillus licheniformis
atgaaaacagaaaagcaaaaaatgctggacggagagctttatcatgcttctgatccggtgctgtgccatgacagactcaaggcgcgcaaaatgacgaatgaattcaaccattcgaacgaaatcgacgacaataaaaggaccaagctaatcaaagagctgtttggatcaacaggggaaacgatcctcatcgaaccgtcgtttcgctgtgattacggctttaacatacatgtcggggaaaatttcttcgccaattttgactgtgttttccttgatgtatgcgaaatccggataggcgacaattgtatgctcggaccgggcgtccatatttatacggcgtcccatccgctcgatccgtccgaaagaataagcggtgcggagtatggaatacctgtcaacatcggccggaacgtctggataggcggcagcgcggtcatcaatcccggcgtcaaggtcggcgacaatgcagtgatagcttccggagccgtcgtcacaaaagatgtcccggataatgccatcgtcggcgggaatccggcgaaaatcattaaatacgttgatagcaaaaacaccaattctatgtaa

SEQ ID NO: 1446 - DNA, 360 bp, Bacillus licheniformis
atgaagtggttaggtaaaagtttagttgcttcatcattactggcgggtatccttgctgtttcgggaagtcccatgcatgtacaggcccaggagctctcgaagactgaaaatctctcttctcacgcatttgcacaaggaatcatcgcccctcaggcgatcgtcatcaacaggccgatgagagtcggacaggaggatcaatacgtcggcatttcgaacgtctcctacagcggcagcgccattaccgtcagaatcacttcggaccgcgtatacgtaaaggccgtaagcccaggcaaagcgacattttcgtatctcaattcattgggacagcttgtcatcaacaatattacggtcacccgatag

SEQ ID NO: 1447 - DNA, 891 bp, Bacillus licheniformis
gtgcattatgatgcgctgaagacattcgttacccttgcagaagtcaaaaatttcacgaaaacggccgagcttcttctcatgtcgcagccgagcgtaagcatgcacattaaaaatcttgaaaaagaattccagacgaaattatttgaacgctctccgaaatatttaaaaatcacgccgaccggtgaaattttatacgaccgcgccaaacaaatgatcaccatctatgaacaaacgaggcaggacattctcgatcaccacaactcgatcaaaggcgagctgaaaatcggcgcaagcttcacaatcggcgaatatattttgccttcgctcctcttcgaccttcaaaaggaatatcctgaactcgagctcaaggccgtcattggaaacacggaagaaatcgtgcagtccgtccgcctgtacaaagtggacatcggcttgatcgaaggacagacaaatgaaaaagagctttctgtacacgcctttatgcaggacgaattattcatcgctgcttcaagcgatcatccgcttgcggccaaacaggacgtgacaatctccgatctgcaaaatcaaacgtgggtaacgcgcgaagtcggctcaggcacacgcgaatacttaaaccatgtcatccgttcaaacggtttaaaagtgaagtcgtttctgacgatcagcagcaaccagggaatcaaagaaacgctcatgacgggcatcggactgtctctcctgtctggaagcgtcattgaaagagatgtacagcacggaaacctttccgttatccggctgaaaaatcaaacctttaacaggacgctttcctatatatattcacctgtcatgcaggacaagaaaaatgtgaaaacctttattaacgctttgaacaaaagaacatcttcgaaataa

SEQ ID NO: 1448 - DNA, 189 bp, Bacillus licheniformis
atgacttgttttgaaacggaaaaggataatactcatcatatatccactattcctataaatcaaatcggttttattgacgcaaagcatctgtcgatcacggcttttgctgctaagaaacattgtaagcgctcactcatcacgtcccctttgccgcgcggcgtcatcctgcttcaaaccaaatattcctaa

SEQ ID NO: 1449 - DNA, 1830 bp, Bacillus licheniformis
ttgcaacttcaggtaatgaacagtccttttaatcaggagcaggcagagctcctcaaccgtcttctgccaactttgacggcatcacaaaaagcctggctgagcggttatctggcagctgtgcaaaccgccgatgccgcggcggctcttgaaacattgccggcggaagctcctgctgcaagcccggctcagcctgtttccaaagaagtgaccattttattcggatcgcagacaggaaatgcacagggacttgccgaaaacgcggctaagacgcttacagaacggggatttcaagtcaccgtctcttcaatgagcgattttaagccgaaccaattgaagaaactaaaaaaccttctcatcgttgtcagcacgcacggtgaaggggatccgccggacaacgcgctgtcattccatgagtttctccatggaagacgggctccgaagctcgatgatctccgttattctgtgctggctcttggcgacacgtcgtatgaatttttctgccagaccggaaaagagttcgaccagcggcttggtgagcttggaggcacaaggctccatccgcgcgtcgactgcgatctcgattatgatgagccggctgcagcatggcttgacggtgtcatctcaagcttaaacgaaggacaggaacagggcgcaagcgccgcacctgctcaaacggcagctccgcaagccgcgggaggagtaacagtatattcgagaaaaaatccgttcagagcggaagtgctggaaaatttgaatttaaacggccgcggatcaaataaagaaacgcgccatcttgaattatcgcttgaaggctcaggtttgacttatgaacctggcgacgcgctcggcatctttccggaaaatgaccctgaactcgtcgatatgctgctgaaagagctgaaatgggatccgaatgctgccgttgctgttgatcaaggggaaaacctttctttgaaagaagcgttgacttcttactatgaaattacggtgctgacaaagaaattcattcagcaggcggcagaaatcattgaaaatgaaaagctgcgcgagcttgccgctccggaaaatgcggatcaattaaaagcgtatatcgctggccgcgacctgattgattttgtgcgagatttcggtccgatcgcagcagctccgcaggaatttgtatcgattcttcgaaaaatcccgcctcggctttattcgatcgcatcgagcttcgctgcaaatccggatgaagtgcatttgacgatcggtgctgtccgctacaatgcgcacggcagagaccgaaaaggggtctgctcggtattatgtgccgaacgtctgcagcctggcgacaccctgcctgttttcattcagccgaataaaaactttaagctgccggagaatccggagactccgattatcatggtcggtcccggcacaggcgttgcgccgtttaggtcatttatgcaggagcgcgaagaaaccggagcatcggggaaatcgtggatgttcttcggcgatcagcattttgtcactgatttcttatatcagacagaatggcaaaagtggctgagtgaaggcgtgctgacaaaaatggatgtcgcgttctcgcgggatacggaagaaaaagtatatgtacagcatcgcatgctggagcacagcaaagaattgtttgagtggcttgaagagggagcggctttctacgtttgcggcgacaagaacaacatggccaaagatgttcaaaacgcattgcttgaaattatcgaaaaagaaggcggcaaaagccgtgaggaagctgaagcctacctcgcagaaatgaaaaagcaaaaacgttatcagcgcgatgtatactga

SEQ ID NO: 1450 - DNA, 1719 bp, Bacillus licheniformis
atggggaacgaaatattaaaagcgcctgaaggcccgccgagcgatgtagaacgtattaagaaagaaagcgattatttgcgcggcaccctgaaggaatcgatgctcgagccgctttcagccgggatttcagatgacgacaaccgtctgatgaagcaccacggcagctatttgcaggatgaccgcgatctccgcaatgagcggcaaaagcagaagcttgagcctgcgtatcagttcatgctgcgcgtccggatgccgggcggtgtggcgacgcctgagcagtggcttgtcatggatgagcttgcccggaaatacggaaacggaacattgaagctgacaactcgggaaacattccaaatgcacggcattttaaaatggaacatgaaaaaaacgattcagtcgatccattcagccatgctggataccattgcagcatgcggcgatgttaaccggaacgtcatgtgcacttccaatccgtatcagtcagaaatccatcgagaagtgtatgaatggtcgaaaaaactgagtgatgacctgctgccgcgcacacgtgcgtatcatgaaatctggcttgatgaggaaaaagtggccggcacgcctgatgcggatgaagtcgaaccgatgtacggaccgctgtatctgccgcggaaattcaaaatcggcatcgccgttccgccgtcaaatgatatcgatgtattttctcaggatcttggttttatcgcgattgtggaggatgacaagctcatcggcttcaacgtcgcgatcggcggcggcatgggcatgacccacggggacaaagcaacgtatccgcagcttgccaaagtcataggcttctgcaagcctgaacagctatacgatgtcgctgaaaaaacgattacgatccagcgggactacggaaaccgttcggtccgcaaaaatgcccgcttcaagtatacggttgaccgcctcggcttggaaacggtcaaaaacgagctggaaaaccgtctcggctggagcctcgctgaagcaaagccttatcatttcgagcataacggcgaccgctacggctgggtaaagggcgtaaaaggaagatggcactttacaatgtttgttgagggcggccgtgtcactgattatgatgattacaagctgatgaccggcttaagggaaatcgccaaagttcataccggcgatatccgcctcacagccaaccaaaacttgatcattgccaatgtcacaagccaaaaaaagaaaaagatcagcgagctgatcgaacagtttggcttgactgacggcaagcattatacagcgctccgccgcagctcgatcgcatgcgtcgcactgccgacgtgcgggttggcgatggccgaagcggaacggtatttgccgaagctgattgacaaaattgatgaaattgttgaagaaaacggcttgaagaatgaagaaatcaccatccgcatgacagggtgcccgaacggctgcgcccgccatgcgctcggcgaaatcggcttcatcggaaaagccccgggcaagtacaatatgtatctcggcgccgcttttgacggcagccgtctgagcaaaatgtaccgggaaaacatcggcgaagaagaaattttaaaagaacttcgcaatattcttccgcgctatgcgaaagaacgcaatgaaggagaacgtttcggagatttcgtcatccgcgccggaattgttaaagaaacgacggacggaacgaattttcatgactga

SEQ ID NO: 1451 - DNA, 888 bp, Bacillus licheniformis
ttggttataaacatgaacagtcttcacatctttgtgaaagtcgcagagactttgaatatgacagaagcagccaacgaactgtatatttcacagccggccgtgagcaaagccgtaaaaagcttggaaacgtcgctcggggtcaaattattgattcgggataaacaaaacaagataaaacttacggacgcgggaaaggaaatcgtcgtactggcgagacagatgatcgtgattgaaaacaaaatataccaagtggccgatcaagaaaatcatctgctcagagggaaagtcaaggttggctccttccccgccgtctcagcaaatattttgccgcaggctatcgcctccttcagatcaaagtatccgctcgtacaaatcgaactgcttgagggaacctccgaccaaattaagcaatgggtcgaaactcgcatggttgatttaggaatcgtcgcctctccctttgacggattcgaaagccaagtattgtttcaagaccggatgacggccgtgattcctgagcaatatcaccacttaaaagacgcaccgttcattgatctgaaaaaatatcaaaatgaattgattttttgtaaaggcgggcacgaaatcgcggtatctcaaatctttcaaaaacaccgcctcgagttaaaagaaaacctgactgtgcaaaacgcggaaacattggtcaatatggttcataacaatttgggaatcggcttgatatcaagcttctcgctttcctccgtgtcccatcggttgatcaaaaaagacatctctcctcaaattatccgcgaagtcggcatgataacaccctcatttgaagaagcaacacctgcggctgcagagtttatgaaaatgatcatagagtcggaaactgtccgggcattttcgtaa

SEQ ID NO: 1452 - DNA, 900 bp, Bacillus licheniformis
atgtttaaagtacttttggggatcatctctgtaacgctgatttgggggtatacctgggtgacgatgaaaatcgcaatcactgacattccccctgttttattttcggccctgcggctgttcattggagctgttcctttgtttgtgattctcttgatcaaaggaaggaaacgttcaataggaaaggagaatatcaagcattatctggtgatgagtttattgatgggtttaggttatatgggggtgttaacttacggcatgcagtttgtcgattcgggaaaaacgtctgttttggtgtacaccatgcctatttttgttactgtcatcagtcattttaaattaaacgagaaaatcaatgtgtataaaatgctcggtttattttctggtctgatcggtcttttgtttatattagggggcgggattctgcatgttgatcaaaacgtcatatttggagagctttgcgttttaatcgcagcgctcagctggggcgtcgccaatgtttacagcaaactgaaattcaaaaatacagatatgattcatatgaatgcatggcagcttctcacaggagcggtgatgttattgattttctcttttatactggaaccgtcccggccgattcactggtcaaatgaagcaatcttgtctctattgtttaacggtttattctctacggctttgacgttcgtcatttggttttggatactgaatcaaatcgaagcgtcgaaagcatcgatggctttaatgtttgttcccgtattaggccttttgttcggctggctgcagctgcatgaaccggtcacattcagcatcctgatcggcgcattcatgatctgcatcggcatttttatgaatacttatcaatttaaaaaagtagtaaaaaaaggcagaggatctatatggtaa

SEQ ID NO: 1453 - DNA, 378 bp, Bacillus licheniformis
atgaaaatcgaacacatcgccatatggacgaacaatttagaggaaatgaaagatttctatacccgtttttttcacggaaagacgaatgaaaaatatgtcaatccgaaaaagcatttcgaatcatatttcatccagtttgaatcgggaacacggcttgagctgatgagacgccccgaccttgcaaaaggagaggagaacgcttccggctatgcacatatggcgttttccttagggtcgcggcaagaggttgacgagatgacgagccgctttgaaaaggaaggataccaggttgccggaaagccgcgcgtcacgggagacgggtattatgaaagcgtcattctggatcctgacggcaacatcgttgaactgaccgtttga

SEQ ID NO: 1454 - DNA, 549 bp, Bacillus licheniformis
ttgaaaaagttaatcgtttgtttattagctgttttactgatcttgcctgccggagcgtccctcgcagcgaaaaatcaaacatcagggaatttaacaattaagcaagtcatgcaattaaccttgcaggcacgggagcacttttggaatacgatgagcggccacaatccaaaagcgaaaaactcaacttgcccatccaaaacatttgaataccgcggtcttccatatacgtatatgtgcagtgaattcagcacaaaagcaaaattaacagactacttgacgccggttttcacaaaagacgccattaaaaaaggcttggaaaaatacaacatcatttcttataaaggaaaaatggccgtgcctgtcggcgatggggacaacctcttaggatgggacaaggcaaaaatcaaactgatctctcaaaaaaacaatacccgcacttatgaattttccgtaccggcattggatggatcggtgactgcgaaaagaaagatcacgtttgtgaaagaaaacaacaaatggaaaatcaatcagctcgatgctgccatctaa

SEQ ID NO: 1455 - DNA, 126 bp, Bacillus licheniformis
gtgatcctctttcctgctcccggcgaggtcccagatagaattctttttcaatataaaatactttttcaacatgaggcttctatgtttatgaggagagaaatccgggaaacgaatcaatggacataa

SEQ ID NO: 1456 - DNA, 735 bp, Bacillus licheniformis
atgaagaagacaatcatgtccttggctgcagccgcggctatgtcggcgactgcattcggagcgactgcctcagcaaaagaaatcgaagttcaaaaaggagacacgctctgggggatttctcaaaactacggaatgaacctcaaggacttaaaaaaatggaatcagctttcatcagatctgatttttccaggtcaaaagctgaacatttcttctcaagaagaaaaatctgaagaaaagcagtacaccgttcagccaggggacacgctctcaaaaatcgcaaaagagttcggtgtgactgtaagcgatcttcaaaaacggaacaacctgaagtcagacttgattattgcagggcaaacgattgcaataaacggagaagcggcagctgcagcagcgcctgtgaaacaagagtccgctccaaaacaaaatgatcagcctgtcaacgtacaaaaggaaatcacagtgaccgcaactgcgtatacggcaaatgacgggggcatttcaggcatcacaaaaacgggagtcgacctgaatgcgaaccgcaatgcgaaagtcatcgcggttgatccaagcgtgattccgctcggcacgaaagtatatgtggaaggctatggcgaagcgacggctgaagacaccggcggcgccattaaaggccataaaatagacgtatttattccagataaaaaagacgctttcaattggggcgtcaaaaccgtaaaggttaaaattttaaactga

SEQ ID NO: 1457 - DNA, 1425 bp, Bacillus licheniformis
atggaacaagctagaaaaggctccttcatgattatcgcaatcttaatcgtcggaaattttctcgctctgattaatgagacggtcatgaatgtggctttgccgaaaatcatcgacgattttggcatttcagcgaacacagcccagtggctgtcaaccggatatatgctcatgatcggcatcgccgtgccgattaccgcgtttttaatgcagcgctttacgacaaggcagctgtttctgtctgcgatgacgctttttacagcgggaaccttgctggccggaattgctccggtcttcccgctcgttctcgccggacggatcatccagggttcaggtacaggcctgatattgccgcttgtgatgaatgtgatactgactttgattccgccgcaaaaacgcggaacgatgaccgggatccttacgctcgttatcttatttgctccggcgatcggtccggtcatctcaggctatattgtcgaacattattcatggcgcgttgttttcttcatgatgctgccagtatcggtcttcatgattttttatgcggcgttccgcttgaaaaatgtaaccgaactgacgtatccgaaaattgacatattatcaattcttttatcgaccgtcggatttggcgggatcgttttcggcttcagcaacgccggggaagcagcgggctggagcagtccgaaagtcatcatcggactggcggccggtgtcatcggattaatattgttcgtcatgcgccagctcagattggaagtgccgatgcttgatatgaggccgtttcgttcaaagatattttcaatctcggttatcctgatgtggatcgtgatgatgctgcagttttcgatgatgctgattttgccgctttacttccaaatggcgcttgagctgtcaccgctttatacaggcattctcatgctgccgggcggcctcgtcctcgcgatgacatcccttgttgcagggcgcctgtttgataagcttggctttaaaccgctgttgatcaccggattgatcattgtgattgccgtcctttcgctgtttacgaatatttcaagcgatacgccgatggcggtcggaatgatgctctacgccggctttacactcggcgtcgggttgacaatggctccgattatgacgctcggtttgaatcaggtgcccaaaccgctttacccgcatggttcggcgataatgaatacagttaatcaagtttcaggggcaatcggtccggcattgtatacgacgatcctgacaaccgtttcgaatcgctttatcgcgcactcttccggaggcagccgtcaggagctgcacatgcaaggcatgacagaaggcgttcatatggtttatttcgtagccatcgcctttgcagccgccgctcttgcgatttcggtttttgtaaaaagcagacgcgcggaacagcatgcagcataa

SEQ ID NO: 1458 - DNA, 579 bp, Bacillus licheniformis
atggcagaaaaaatgagcagccgcgacaaaattttgcggacggcttcacgattgttccgcaaacaaggctaccatgccacaggcttaagccaaatcacagccgaaagcggagcgccgcggggatcgctttattattatttccccggcggcaaagaggaactggcgcaagaggcgattcaattaaccggagaaagaatcaaagcgtatatatcgtcagcgatcagcggtgaagctgatcctgtcaaggcgtttcaatcttatatccagatgatggctgacggaatcgaggaatacatcatcgaagaaaacgacgatattccgatcgtatccgtcgccgcagaaacgtggtcgttcagtgaaaggctccgccaaacgtgtgaacaggtttatcaagactggcagcttgtctatcaggaaaaactactccagtcaggctatgcgccggaaacggccgagacgctgagcgtcgcgatacaagcgatgattgagggtgcgtatgtgctctcagtgacgaaaaaaaacggccggcctctcagtgcagccgccgaacaaattccttttttgctaaaacgttcataa

SEQ ID NO: 1459 - DNA, 267 bp, Bacillus licheniformis
atgttcggctatgtttttttagccgtttatttaacggcgctcgcactctataccatcaattccgcttttgttcacttcatatctgacagccttttgtcgatattggcagcgattgctgtggcgcctgctgcttgccggctttctgaagccttcagcggattcccgctgaaccgaatatggacaaatcgtccttattttaaaacaggccttcaaaaaaggtcttttttttcgttaaaattatatagaccgatcagtataaaatcataa

SEQ ID NO: 1460 - DNA, 414 bp, Bacillus licheniformis
atgattaaaaaaactctcggtaccatgttcgcagtgactatgatctttcttttgatcctcactgtgtttacgctctttttcgggtcttattatttcggcgtcgccggtttttttgcgattttcggcgttacatacgaatcgccctggtcgctcttctggtatatccttttatcttttggcctcggcgcgctgtttgaaatcccggaaaaaattctgagctttatgattgggcataaagctgcgacctttatgatcgaatgtttttttacttggcttgccatccatctcgctgatgaattgatggacagcatcaccatcccgctggatgtcgaaatcatcgcctgtctgtttttattcgtcattcatctggcatttgaagacaacaaagaaagaaaccggacatacgaggattga

SEQ ID NO: 1461 - DNA, 2044 bp, Bacillus licheniformis
atgaagactctggacgttcaggcgctgcacaaagcgattgatcaaacggtggaacaattaaagcaacaatcggaagaaatcgtcaacattaaaaaaagcgtggaaggtatcacgtcgctcaacgatgccttaaaaggaaaaggcggcgacgcaatacggaatttttataaagagtgtcacaccccattccttcaattttttgaaacttttatcgaggaaatcaatcagcattgaagaaaatcaaaagtgcattgaattccctggagccacaacacaatggatatatttcgcaagccttcctcgataatgagctggaacaaggagtgaaagatgccgatcgcaccacgaagcgtttggtttctaaaacgaatgctacaatcgctaaagtcagccatatagtcgatttgccggaattagatgacagtaattttcacgagaattactcgaaagctttaaaagaaatcaatcagacaattgaaaaattacatacattcgacagggagcagacgaacaccatcaaagccgctgaaaacgacttagaaacaatgcaaagatacatggctaggcttgaaaaaatgtacacaggccctaaaattgaaatcaccggctatcagaaaggttctattttaaaacaggataaaatggataccttgagtggaaaccaggaaacagcgatgggcgttatgttggctaagctcgataagagatcaaaactcgaaaaggaagttagtgaagctaacaaacaggttaataaaatctctcacctaaaggaaaagctcgaaaatgtcattgatcctgatgaatttgttgagattgcacaagagattggaattgaaaatctgacagaaaagcagcaaaattactatttttacactataaatcgaaaacgaaaacaaagtggtatcatggggcgtattaagcagggcattgaagaaggaatagaagatgtggccgtcgatacagtgacaggaatacgagataccataaccaatccaaaagaaacgctagagggcattgcctacacagtcacccaccctgtagaaacatttgaaatcataaagaaagatatcgaggactccttcgtgagggacgtcatcaatggtgatgcagaaagcagggcgagatggtttacatacgctaccggaatggttgcgtcatccattgtcggaacgaaaggtgcagacaaagttagcaagttggctaaggcgggcaagatgggaaaagccgcatctaagataaaggatgtctctaaaaagacagctagcaagggcatagagagtgcgaaaaaggcaggtaagaaagcagctgataaagttgtcagggattttaaagatattaaaaatctcattccgaaagtccaaatcgcttctcctcaactagctttagccaatgctggtaaagttccgttcaatacgatagatggatctcgattgaaagataaattaattcaacaaaccaaaaagatttctgatcaagcaaaacaagcaagaaatcgaatggtcagcatcattgcgggtgtttcttccaaaacaaaaacagacattaaagtagactcaaaaaccatccataaagtgaaatatggtgaccatttcacaagagtcaaaagaagaaaggtgttaaaaccgaacattgagtatacaacgcctgtaggctatacttataaaactgatcataaaggacgtattacaaatgtcagcggcaaactaaatttgggagcagcaaagagaaacaaatacgcccaaagaattgccggccgtgaagatcgattaaaaaccgatgagggcggtcatctcattgcaagtatattcgaagggtctggaaagcttgacaaccttgtgccgatggatggtaacttaaataaaggagaatggaaaaagcttgagaacatgtgggccaaacacctcgaaaaaggaagaacagttgaggttaaaatacagccagtatacaaagggaattcccaaagaccggcaagctttgagatagaatataaaatcggaaaacgggaatgggaagttgtgaaatttgataataagcctggaggtaa

SEQ ID NO: 1462 - DNA, 648 bp, Bacillus licheniformis
atgaagcgggctttaactgaccaatacggcagctttacagagatggcagaaaacgaaatagaagggaccgattattcggtggctgctcgggatgcagggagcgctctgcttgtgatggctccccacgggggcgggatcgagccgggcatcagtgaaattgtcaaggcttttgcagagggcgcttcggtttatttattggaaggattgaaaaggcgcggcaataagagccttcatgtgacaagcgctcattttgactgcccgcttgccttgcgaatggctgcaggacaccggtacatactggcttttcacgggtatgaggagcctgctcatcgacatacgctcatcggagggacagatcgaaggcgcgccttgatgtttaaggagacattggagaggcacggattttctgcggagctggcggctgaaaggggctatctttcaggtacaaaccctgcaagcatcaacaatcgctgccaaaccggtttaagcgtgcaatttgaaatcagcacagcccagcggaaggcgatgtttgagcaattcacattaaagggcaggcgaacgtctcaaaatgaggtgttttcccgctatgtcaaagctttgaaggaaggagcatgcatcgcatatgggccgagtgcagccggcagctga

SEQ ID NO: 1463 - DNA, 657 bp, Bacillus licheniformis
ttgaagttttatttatctcacctagaagaatacgtcaaaaatatgtaccaaaagttcggtttttttgaacctcaccagattgatatgaatcgcatagccgctcattttaatatttggattcactatgaaaatgtcaacagcatgatgattaagcatgacggcatgtacagcattattctcaacagcagcctttcaaaggaaaagcagtgggaggactttgcccatgagctgtgccacgtattaaagcacgcgggaaaccagctttacatgaatcagatgttcagggagctgcaggagttccaggccaatcaatttatgtaccatttttgcgtccctacttttatgcttttaaaaatggattttcctcagctgcgatgccaagccgctaaaatgatcgccgacctctttaaagtcacggagtcgttcgctgtcaaacggatcgagctctttgaaaaacggcaggccggaatccagtttcatgaggcgtggatggcaagcctttcccaagagagcgaatcggcgaatgctccacgccttgaagaagtagacgaacttgcacgctaccggcgggaaacccgccgcacgtacgcagcggtaaacggcctcggcaaaatggtcgctgcggaaagccggccggcttatatgctgagaaaataa

SEQ ID NO: 1464 - DNA, 354 bp, Bacillus licheniformis
atgttaggcggcagactgaagagcctgagaggaaaaaggacacaggaagaagtggcaaagcagatcggtgtatcgcgggcacgctactcccattatgaaaacggaagaagcgagccggactatgaaacattaaaaaaactcgctgattactataaagtgacgatagactatctgctgacaggcacggaaaagaaaaaaaacatcgaagacgaaatcgcagatccggatctgcaaattgcctaccgcgacatgcaggaattttcccccgaaagcagacagcaggccatcgagttcattcaatacttaaaagaaaaagagaagaaacgaaagcccggagataaacaaaacggataa

SEQ ID NO: 1465 - DNA, 261 bp, Bacillus licheniformis
gtgcgaaaacgattgatcgaagagcgctctaagaggggatggacccagaagcaagtgtcggaaagacttggactctccgaggtttatgttcgcaaaattgaaaggggaacacgcaatcccggcagagaaacgatgctgaaattcgaaacgctttattcagtgcctgatcgtttgctgtttcccgatctttttcaggtctttatagatacatattgtatcaaagaaaacctgcataaaagaaggcgatgtcatgaatcttga

SEQ ID NO: 1466 - DNA, 120 bp, Bacillus licheniformis
gtgaccatcggatgttcaagattcatgacatcgccttcttttatgcaggttttctttgatacaatatgtatctataaagacctgaaaaagatcgggaaacagcaaacgatcaggcactga

SEQ ID NO: 1467 - DNA, 297 bp, Bacillus licheniformis
atgaatcttgaacatccgatggtcacacgcatccgaacacacggctatccaaaggaagccgacagagagcaaatgagaagccacggcggacttgccggatatccaaaaggaggaagcatgggtaaaattgtgatttcctacagctcagaccggtttgatcaatggcggctcggagaagccgggggattcatcgcttttacgaaagacggaaagcctgtattccaatttgatcataaaggccaatacgaacggtatctcaggctgaaccgcaaaaggcagaaggaagggggaagatga

SEQ ID NO: 1468 - DNA, 831 bp, Bacillus licheniformis
atgtcccgcccgccggatcaaagctatcccttttcggtttactcagggcttttaacacctgttcactacgagaaaataggcaatgccatttggctttttttatggtgcatcagttcaacaacaaaggaaatcgaacgcgatggggagacatggggcatcgtgctcggcaacaagccgctgaaagcagccgaactggctcttcaattcggcgtcaacgaaaaaacgatcagaagatggctcgctcttctcgaacgaaacggctacattgcagtcacaagagcgccttacggaatgattttgtcagtcagacattcaaaaaaatttgcctacgccagccatgtccgaacagaactgcctgatcggacagaagagactggcagtgcggacaagcttgtccaatccaataaagatatcacacaaatcaacacaaaacataatatgagttccataaaaacaatagcagaacgatttgccgccctcaggtcgatgcaggaaggaaagcccgtccatccctcgtcaaaagactatcaggccatcgcccggattgtcgcccgcggagtgtctcttccgcaaacaatcaaatggcttgaacaatgttttgaggagtatgaggcgcggcgccgaagccgtcatgaaacgatcaaggtcttcagctactgtgaaaaatatatcatcggccggctggctgaagcggaagcgaaaacgaaaacaactgtcaggagggagaacaatgcccaaaagaacaatcgaagaggtcatggacgaactgagaaacaggagccgtcaatcacaggggggcaaaccggaagaatccgccgcaaaacggtatga

SEQ ID NO: 1469 - DNA, 801 bp, Bacillus licheniformis
atgcccaaaagaacaatcgaagaggtcatggacgaactgagaaacaggagccgtcaatcacaggggggcaaaccggaagaatccgccgcaaaacggtatgactgtccgaagtgcaaagatgaactcggatttatcgaacggcgcggaacgatggaagtatgggtatcatgcgtctgccgcgaatggcgcaaagcgcaaaagctgttgaagacgagcgaaatcaccgaacaatttaaaaacttaaactttgctcaattcaagacggaaggaaagcatcaatctgtaaaagaagcgtatgaatgcgccgttgaatatgtacaagcttaccgggacattcaggaaagccgcagaaacagcatcgcgctcttgggacgacccggttcagggaagactcatttgctgacggctgccgccaatgagctgatgaggaagctttttgtacccgtcctgtattttccgtttgtcgaaggattcaatgatttaaaacaggacttttcgttgcttgagaataagctgaaccggatgaagcaagtcgaggtgctgtttcttgatgacctgtttaagccggtggcaggcaggccgcgggcaacggaatggcagatcgaacagacatatgccgtcgtcaattacaggtatttgaaccataagccgatcatgctgtccagcgagctaagcgttgaagaaattgtcagcatagacgaagcgctcggaacgaggctggtcgaaatgtgcggggactttctcgtcgtcctgaacgggagctctttcggcatcaatcatagactggaggggatggtttga

SEQ ID NO: 1470 - DNA, 171 bp, Bacillus licheniformis
atgtgccggctatgtaatgggagaaaatcaatccatcaggacgcaagggtcggaacgattttccgcgcttgcccgaactgctgcactgaaagcggcggtttgacggatgtgatcaaacatctggaagcgctgattgcaaaaatgaaaacaagggtgacacaaggtgcttaa

SEQ ID NO: 1471 - DNA, 342 bp, Bacillus licheniformis
gtgaaaaacgaaagtgaggcgtacagcccatcaccatggcgcgtcgtcagaacaaataccgacgtatacatttattcagcatacagcaaagccgaaaagaaacggtttccttattccaacggaagggtgattgccaaagtcgccgactacagcgcatattccaaggaaaaaaatgcccgcttaatcgctgcagctcccgaactgttgaccgcagtgaagctcacgcttgcctatttgaagcgaaaacggcccgttcacagcgattcagttgagaatcaattgaagaatattttagaaaaagtcgtcgcaaaagcagaatttgaagaggaggaaacaagatga

SEQ ID NO: 1472 - DNA, 204 bp, Bacillus licheniformis
atgaaccatccggcaaagttaacagatatcaacgatacgacggttgcaagccgcatcaaaaaaggaaaggtgacggtgatcgtccttgacggaatgaacggcacggcatggcaggccgaggcgcctgagcacggcaaaaccgtcattgaaacgagaaagggagatctcgcaaggatcgaatttgaaatcggctataagctatag

SEQ ID NO: 1473 - DNA, 504 bp, Bacillus licheniformis
atggaagatttgcttttcgaatataaaagagcgctgaaaaacacgaaaaaattgtataagccctatcaagatgaacaagggctgacggctgaacagctgaatgataaaaaactgatcagaaacatgatgaccgatttggaatatgtgatcgactggcttgaaaacggaagagaacctggaatcagacgggcgattgacaggcgcgactcttataagcggatgctcctgaaagatccgcggatcatcgacacgttttcagaacagagtgcatttgaaccggctcaggaagtgtcagcatacgataaagcccggattgaatcagcgctgtctgcccttacggcacgcgaaaaagaaatcttcattttacataaggtcgaacagttttcctatgagcggattgccgccatgctcggcatcaaaaagtctactgttcaaaccaatgtgaaacgggcgcagctgaaaatcgcgaaacagatcgaaaagcctctcgattgtatggcataa

SEQ ID NO: 1474 - DNA, 801 bp, Bacillus licheniformis
atgccaaggaaaagggatccaaaaagggatgaagcttttcgtctctatcaaaaatacgggggaaacattacgaatctcgcaatcgcaagagaactcggcgtttcaaataaaaaaatcagcgtttggaaaacccgcgaccgctggcaagaggctttagccggagatgacgcgaaccgtggaaaagcagacattcacaatgaagggctgaatgaacggcagcggctgttttgcatctattatgtgaaaagcttcaatgccacccaagcggcggtaaaagcgggctattccccggccagcgcccatgtgacaggctgccggcttttgaaaaatgaaaaggtggccgatgaaatcaggcgaatcaaaaaagaaatggtaggggagatattcgtcgaggcgatggatgttctccaagtttatgtaaaaatcgcgtttgccgatatgaccgattatgtgactttcggcaaaaaagaggtacaggctgtcggaaagtccggaccgctgtttgatgaagaaaacaatccggttatgaaagaggtcagctttgtggatgtgaaacattccgacctcgtcgatggcacagtcatcacggaagcgaaactcgggaaagaagggatcgcgatcaagctggccgataaaatgaaggcgctcgataagctctcacagtattttgaccttttccctgattcatttaagcggaaaattgaaaatgagaagctgaagctcgccagacaaaaagccgacaaagatgcggaaacgggtcccgttgaagtggtcatcgcccgaaaatgtgatcaggcttga

SEQ ID NO: 1475 - DNA, 1299 bp, Bacillus licheniformis
ttgatcataaaagaagtcaatccgcattttgaagattatttgtttaactgggatcagacctttcaatttcttgtcggcggatacggttcgtcgaaaagctatcataccgctttaaaagtcgtattaaaactgcttcaggaaaagcggaccgctcttgtcgtaagggaagtgtttgaaacacacagggattcgacgttttctttattcgcatccattatcgatgagctgggtgtccaaaaggcggctcaggcggtttcttctccgatgcatatcaggtttgcaaacggcagccgaattatttttaaaggaatggacaacccggcgaaattgaaatccgtcaacaacatctcgctgatttggattgaagaatgttcagaggtgaagtatgaaggcttcaaggaactgatcggccggctgaggcatccttatcacaggctgtatatgatgttgacgacaaaccccgtcagccagtcaaactggacgtacagacactttttcaaggatgagcggaacaagcggttcattttggatgatgaggtcttgtataaaaagcgggtcgctgtcgtcggtgatacgtattaccaccattccacagctgatgacaacctgtttttgccaaaaagctacctcaaacagcttgatgatatgaaagcatatgatcccgacctgtaccggattgccagaaaagggcggtttggggtaaacggcaccagggttctgccgcaatttgaagtgatggagcatgaggaggtcatgaggcagatctccgccatttccaacccgctgaagagaaccggaatggatttcggatttgaggaatcatacaatgccgtcgtccgggcggccgtcgatcccgacaaaaaatatctatatatctattgggagtactacaaaaataaaatgacagatgataagacggccgaagaacttcacgaattcgcggttacgaaggagctgattaaagctgatcccgctgagccgaaaagcattcagtttttcaggcagaatggttttaacatgacagcagcacgcaagttccaaggctcgcgcctgcaatatacgaaaaaaatcaagcggtttaaaaaaatattctgttctgaccgatgtgccaatacgatctacgaattgcagccgctgacctatgcgacggatcaagacggcaatctgaaggaggatcagtttacaattgatccgcacacgctttccgcgctatggtacgcgcttgatgattatgaagtaaccgatttgaaggctgagccggaagtgagaaaacggccgaacaggaaaagggggagatag

SEQ ID NO: 1476 - DNA, 1515 bp, Bacillus licheniformis
atgtccactcagcaaacggtaagagcgaaagtcatgaaatcccgttttcacgggcctgtaacaaaacaaatatatgaagatcaattttcggagatctacggcgatgatattatcgctccgccgtacaatttgaaagaattgaaagccattgccgaatattcttcaattcttcagcaatgcattgacgcctataaaacgaatattgcggggttcgggctcgatgtagaatacgcttttgatttcaacggggcggatgtgacgcccgatcggaaaaaagctgctgagtccgattggacaaggcttgaagatttttgccgccaccttcattttgacgaatcggctgaaacaattttaagccatatgatagaggaccgcgaaaaaaccgggaacgggtttttggaggtgctcagaaacggtgcggggcagccggccggaattgaatatctcgatgtcaaaaatatgcgggtatgcggattgacagaaccgatcgaagttgaattcgcctacatggaaaacggatcgctaaaaaacatcaagagggagaaaaggttccgcaaatacgttcagatgattgacggcaggaaagtgtactttaaagagtacggcgatccgcgcgtcatggatatgaccaccggagagtttgacaggcagactccccctgaacgaagcgcgaatgaagcgatccattttaaaatcggcagcggcgtctacggcgttccgcgctggatcggaaatattgtcaacctgtacggggcgcggaaagcggaagagctgaattatatgtacttcagacaaggccggcacgtacctgccgtcattacggttgaaaacggcatgctctcagaggcttcctacagagagctgcaggaatatatgaacgacttggaaggcgttgaaaatgcccacaaatttttgctgatcgaagcggagggaatcgcacaggaaaaagacattcacggcagccaggacattacgccggtgaaggtggacatcaaatccctcgccgaaattttgcaggaagatgcgctgtttcttgaatatgacgagaaaacccggaataaaatccgctcttccttcaggctcccgccgctctacaccggtgatgcccatgaatataacagggcgacagccgataccgcccgcaaaatcaccgaagaacaggtttttgaaccggagcggaaaatattgatcggcaagctgaatacgctgtttctccgcgatttaaacattttccacgcgaggctccagctgaaaggaccggactttcgcgatccgcttgagatcgcaaaagtgctcggtccttttattcaggcaggagcagtatctgcaaatgatttgcgcgacctggccggcagagtgctcggcaagacgctagatgaatggccggaggaagaattcagcaggccgctcgtttaccaggaaagctcaaagcgtgcggaagcggaagcaggagcattgctgcctgaactgcaggaagccgtcgagacattgaaacagatcactgaaaggaggtga

SEQ ID NO: 1477 - DNA, 849 bp, Bacillus licheniformis
gtgccgagagagcttaaaaatgccaaaatcaatttcgtcagttatgtcgacaaagcggcgaacaaaaagaaattcttcatgacgaagtcgagtgaaccgccgacatttcaaaaggaagtcaagctgattgcaaaagccgaggatgaaaagaagctcgtctacggcgttgtctacgagccggacattcaggatgcccacggcgactttatgacggctgaagaaatccaaaaagccgcccacggttttctgaaaaatgcccggaagatcgacaaggatcacaatttccagggaggcgtcggagaagtcgtggagtcctacgtagcgccggctgattttgaagtaaacggcgaaacgattgtgaaaggctcttgggtgctggtgacaaaagccggcgatgagatctgggaacagattaaaaaaggaagcatcaccggctacagcatggcgggcactgccgaaacggtcgagcacgcgccccaagccgactctgaaaccgatgagcccggcagtttctttcagctgtttaagcagttttttgccggcgacaaacaaaaaacgggagaggaagaaaaaaagatgaaacgatcagaagttcaaggaacgattgaagccgtcttggctccgcttctcaaacgtcttgacgatttggaaggggataaagcggcagatgaaaaagagcaacagacagaccaagacgcacatgtgaaggaaatcgtcgaggacatgctcgcccctcttattgcacgcattgaagcactcgaaaagatgagaggcgcctcaaagcaggcagcagccgaaaaagacggggaagaagaagttaaaaaatcgatttggagcggattgctttaa

SEQ ID NO: 1478 - DNA, 936 bp, Bacillus licheniformis
atgagaaatcaagagattattcgtaaagccgagatgtcgcttgcgactttgaaaagcggaggattaatgaatccggcgcaggcttctgcatttattcgcatggtgcaaaacacgccgacaattttcagcgaatcgcgcgtgattcaaatggaaaacgactcgcaaaaatttgaaaagatcggctttggccagcggattttacgagcggctgatgaaggtaaggcattggcgaaagatcaattaaccgcaccggtgaccagcacggtcgaactgaacgcgaaagaagtcattgccgaagtcaacatcacttatgacacgctcgaaaataacattgaaaaagacggccttcaacagacgctgatgcaaatgctggcggagcgggctgccgttgatattgaagaactgatcgtcaatggtgatgtcgcatcctcagatccataccttgcccagctcgacgggatccggaagcagtccgtctcccatatcgtcgatgcgggcggggagcaaatcagccggcagcttttcaaacaggggctgaaagctgttccggcaaaatatatgcgcgttcctcaggaattcagattcttcacatcgctcggccaggagattgaatggaaagaccgcgtcgcagaacgtcaaacgactctcggggatgcggcggtacagggcggactttctaccgcttttggcgtgcctgttaaaggggtctcaaatattcagccgtatgcatacggagaaggagatgcggccgccgaagcatcagacattattttgacgcacccgaaaaatatcattctcggtttctcgcgcaatatcagaattgaagtcgataaagacattcgcgcgcgcaaattcatcattgtcctgacggcaaaactggacagcaaattcgaggaagaagacgcggttgcaaaaatcatcaatgtaaaagagtaa

SEQ ID NO: 1479 - DNA, 375 bp, Bacillus licheniformis
atgctgatcacgcccgacgatatcatccaatattccgttattgaagccgtgaaaaaccggccgcaggaattgctgcgtcaggatatccttgaagctgaagcggaagccgagcagataacggggcaccgttttacagatgaaaaatatgatccgctgccggaaaaggcaaggctcgctttgctgcagctggcacagtactttgcattgaaaaacggtgatgaatcgcttttgaaaggctacaaatctgagaaattgggagactactcctatacgctttcaagaagcggaggcctagtgaagcccgacgtctataaactgctcgaagaatttattcttgattatgaatctgttcgattcaaggtgcgcccgctatga

SEQ ID NO: 1480 - DNA, 357 bp, Bacillus licheniformis
atgagctacaaaaggttattaagcgaccgctgcgatatctatcatttaaaggaagaccaggctgaggaagcaaggtacggcattcctgcgcgagacctgcagccgattcgcacatacggggaaacacctgatcttcaaaacgttccctgctattttacggaaaaaaaccagtcgatcgtccagcaagatcccgaacaggttatttatcattcatatttggcccattttccggcggaggcagatgtgcgccttcacgataaggcggtctggaacggtgtcgcctacacgctgcagcagccgcgcaacatcaaaggccatcacctcgaagtgttagcggtcagggatgaaaaactatga

SEQ ID NO: 1481 - DNA, 489 bp, Bacillus licheniformis
atgaaaatcaaaggattgaaacagctgtcgcagacgctggaaaaagcagggcagagcggctttcgaaatgaagctgccaagtggcttgaacaggcgggaaccgattttttggacctggtctgtgacgaaatcgtgcgcgccggatcgattgataccggcagccttttgcgctctttcaagcggggagccgaagggaacaggtgggaaatcgaaaaaggcggactcacgcttgaagtcgggacggagttagagtacgcctcatttgtaaatgacggccattggacaggcggaaaagacgaagtcaggtgggttccgggacaatggcacggcggccggtttcaatatgatcccggttcatcgtccggcatggccttaaaacggcaatgggtaaagggaacaggctattgggagcatgcgctttacatatttgagcgtttatttgaaaaacgcctgaatgaaaggctgcaaaaatggctgaattccctttaa

SEQ ID NO: 1482 - DNA, 441 bp, Bacillus licheniformis
ttgaacgacgaaacgggatctgtcatgaatttcttttatcaagtctttcctgtcgtctgttatgaaaaggaaatacccgaccactttcaaataccgtcgctgtattttcctcccccttctgtttttgatgagaatgatacggtttcaacatttaaaaaagtcttcaccctgaatgtgaaactgtttcaccacgattcgcagcaggcccatgatcatgccgagcgcattgcagacgccgtaagggaagcgaggcacatcataccgctcattgaccgatcgggtaaaggcacaggggacagcttgaggatcagccggatcgagacgagaataggggattccggcaccgcgtccattattattcaatggaacagccgctactggtacaaacgggaaagcgaactttctctggaaacaattgattttacaaacggggtgaaataa

SEQ ID NO: 1483 - DNA, 225 bp, Bacillus licheniformis
ttggcagtcagcaaaaaaacaaacaccgaagcaaaaaaggcgcctcaagaggaacgtgaagcgctgttctacatcgaagacctgagggagcacgcgaaagagcttttcggcattaagccggaagttctcgatggtgctctttttcatgtgaaagaagagcagatttcaaaacctgaggcaagtcagcttattcaaacatttttagccaaggaggtcatgaattaa

SEQ ID NO: 1484 - DNA, 1347 bp, Bacillus licheniformis
atgaacggcggaacatttacaccaggcaaagaaaaagatcgtgccggcatttattttaattttaaaacgacagcagaggaacgcgtttccatcggggatcgcggtacagttgccctccctgtcgtcatgagctggggggagccgaaaacattcgtatcgatttccagcattgaagacttaaataaaaaagtagggttgaacatcgatgatccgtctcttctgcttttccgggaagcgaagaaaaacgcacagaccgttttgctgtaccgtctgaacacaggagcgccggcgaaagcccaaatcggcgaaacgctgagcgtaacggcaaaatacggaggcgagaaagggaacgacatttcgatccgcatttccgaaaatgtgctcgattctaaaaagtttgatgtcaccacctttgtcggaacagatgaagctgaccgacaaaccgtcaaaacggcagaagagcttaccgcaaatgcgtacgtcgcgtttcaaggggaaggcgcgcttgaactgacagcgggcacaaagctgtcaggcggggagaacggaacggcaagcgttgccgattacaccgcatttttagatgctgccgaaacggaatacttcaatacgatcgcactcccggtcgcagacaatgaacagctgaaagccacttttgccgctttcatcaaacgccttcgcgacaagcagggccagaaagtccaaggcgttgtcgccgattatgccggagactatgaaggcattattaatgtaacgggaggcgtcgtgctggaagacggcactgaaatcactcctgaaaaagcgacggcatgggttgccggagcgagcgcaggcgcgacttttaaccagtcgctgacatttgtcgaatacgaaggtgctgttgatgtcctgaaccgtctggatgaagaccaggtcatcgaacgtctgaaaaaaggcgagtttttatttacatttgatgcacgcgatcaatcggtcagcgttgaaaaagacatcaactctttaacgagtttcactgccgacaagaacaaaaaattctcgaaaaacaaaatcatccgcgttctcgacggagtcaacaatgacctgacccgcgagttaaaggctttaatcaaagcacgaaaagcaagcggcagcgacatccctgcatcagacgatggtttgcaatacgtcaaaacgctgatcattcagtatatgacggcgcttcaggaagccggcggcattaccggctttgattctgaaagcgatattgccattacactgaatgaagaccgcgacgggtttttaatcgatttagccgttcagccggttgatgcagcagaaaaattctactttaatgtggaggtaaaatag

SEQ ID NO: 1485 - DNA, 444 bp, Bacillus licheniformis
atggcattaaaagcgcaaaacacgatttccggaaaagaaggccgtctttttctcgacggacaagagatggctcacatcaaaacatttgaggccaatgtcgaaaagaataaagctgaagtcaatattatgggccgccgcatgaccggccacaagacaacaggggcaaacggcacgggaacggcgacattttataaagtcacgtctcaatttgtcacgttaatgatgaactatgtgaaaaaaggcgatgatccgtatttcacgctccaggccgtccttgacgaccagtcatcaggccgcggaacggagcgggtcacgctgtatgacgtgaattttgactcggccaaaatcgccggtcttgacgtcgactcagaggcgctcgaagaagaagtgccgttcacatttgaagatttcgacgttcctgaaaaactgaaagatacgttttaa

SEQ ID NO: 1486 - DNA, 629 bp, Bacillus licheniformis
atgagcgaaaaacaagaagaaaaagtatatgatttatccttttttatgccgggccaaaccgttgaagccgaagaaatcaaagtgccgatctcaaagcggttcgtcgataaaaagggcaatgtcattccgtttgtgtttaagccgattacaaccgagcgcattgacgagcttgaaaaagaaaatacgacttataaaaacattaaaggcagaggccgtgtcaaggatctagacacccagcgcttttacgccagaatcgccattgaatcgacgatctaccctgacttccgttcaaaggaattaagagaagcctataaaacggccgacccggtcgaagtggccaaacgcgttctctccgtcggtggggaatatgcgaactggctcaacaaagcgattgaaatcaacggctttgaagacgatcttgaagatctggaagaagaagcaaaaaactaatcaaggatgggaataaagaagcggtgtatctctatttcgcgatgcacgaacttcactattctccatcccagctccgggagctgtacgaagccccaaaaccgtttaaggcattattatacggactcatcagctacaaacttcaactcttggaaaaagaagcgcggaaaggaggtacataa

SEQ ID NO: 1487 - DNA, 3783 bp, Bacillus licheniformis
atggcaaaactgacggcacgttttgaacttgaagaccgggtgtctaagaagctgcggaggattcagaagggttttgcgattttagaaaagagagcagaacgattgaaccggcaaatcaaaattaacattaaaacggaagatcaagctttttttcggcttaaaaaactgaacaattacctgatgagaaagttcattcactccgtaaatattggagtgaatataaatgaccaggcatccgctcaactaatagaaatacaaagaagattaaaaagaattccgccagaaacaaccgttaagttaactttagcagacaatgtctcgcaaaagttaactaaaattaaaaggatgctctctaagcgtgaatattccttatcaatctctgctgaagaccgtgtaacattaactgttaaaaaaataatcggctatcttaaaaacaatttgaaaaaaggttattcagttcagttatatgtacttgataaagtaacgaaaacagcaagcagaattgcctcgctcctaaaaaaactagagaaaacgtacattgtcacaattgatttaaacgacaaggcgaccaacaaaatcaaaaacaaaaaagtttcaggagaaacatcagaagccaaacacgataaaaagggatctttctttgaacaaggaaaagacttgttaggcgaatggtggaaaaagtcaggatggccttggataaaggatactgggaaggaaattggcaaagcatttgtagatcgatttaaagatagactgatggaaaaattgaacagtgatatttttgacaaaatcattgataaaatcttagggcctcagtcaacaaaaggttctcagtcaaaatcaagcggaccaggccatggacaatgctgctgctgtttatatccgcagaaagagcctccgaattcagccggaaataggcaaaatgtctctgtttcaggttcaagtgaagagcataaaggctggaatctaaaaagcttatcaaggggaattcttccagccgcaaagatactcttctatttaaaaagtttaaggcccaacaaagagcccggtaaacttgcaaaattattagagcccttaaaaccaatgattgaaaaattaaagccgctaggtaaaaaactaagtccgctaggcaaacttttgccgcttacagatctaatcggcatcaacaaagataacgcaggcgaaaaaattggttctgtaggcggccgtatgttaggaacttttggtggagaagctgccggaatggcgatcggaggattggttggaggacctccgggtgcaatgattggaggagtagtgggcggctttgcaggcgggatgggcggtgaaaaggcaggcggttccctcggtaaaatgtttgacacttcccaattgaaggaagatctcatgaacacgctgtttaatggagactggtggagcgaacagtgggattcccttagtcaaaccgctacaaatacatttttaaatggagactggtggggagaaaaatggggatctcttaaagaaacagccacaaatacgtttttaaacggaaactggtgggctgaacaagccggctatctttatggtactttggaagctgcatttttagggccgttaagtaatgtttggggaaccattgcaggaacgatcagcgagacgatttttaacggagactggtggagcgaaaaatggaacaatgcagtaacatgggcgcagaatacgtgggacggagctgtctctgtttgggaatccattacaggaaccattaaagacaccgtttttaatggagactggtggagcgaaaaatggaacaatgcagtaacatgggcgcagaatacgtgggacggagccgtctctgtttgggaatccattacaggaaccattaaagacaccgtttttaatggagactggtggggtgaacaatgggacaacgcagtgacatgggcgcagaatgcgtgggacggagccgtctctgtttgggaatccattacaggaaccattaaagacactgttttcaatggagactggtggtctaaccaatggaatagcgctttggaaaggggcaagagtattttcgaaggcgcgaaaagctgggtcggagaaaaagttgaatattttcagaaaggtcgggaaagagcccataaggatcatggatttgaaggctatgccacaggcggctacatcacaaaaccgaccatctcctggatcggtgaagccggaaatgaattcgtcatccctacggaaaacaaccggggacgcgggaagatgctgcttgcccaggccgctaccaagctcggcatgcgcgttgttgacgacatgggggccgcggcgggagacgggggagcttcttctccggtttcaagcaccgcttcgtattcggcttctgtgtcgcctgctgtcggtgtcgggagtatagcagcagaggcgcaggctttcggccgggaattcaccggcggttttgacaaggggatcggctcaaacgctccttcccttgatcaatggaagcaaaaaaacatcagcaagccgtttagcagcctgccggcagaatcgtctaactacggaaaacagacggttgccgggttcgcttccgggcaaaatgcttccgcgaccggaaccggcggttttcttcaagcaaaagtaaatgcgccttatcaaacaacggtgaaaacgtcctcttcctggggtgcaaatacagtcaaaaactttgcaaccgggcaaaatgcaacaccgaccgggacgtcgcagtatgttgataaaaatatcaacaagccgttccttgattcgaaacagtcggctgcaggctgggggtcaggaatggtcggacactttatcagcggcatgaatggaaaaggcagcgaagtttctcaagctgcaaaaaacttggcgaaaaaagttgaaaaagcgttccgcgaagaactagatattcattctccgtcccgggttatgatgagtctcgggcgtttcgcgtcggtcgggattgtcaaaggtttaagctctgtcgatgtcaaaagttttgcggaaaaacaagcaggctcactggcagctgcgttttccggaatcggagccgtcggcggaaatgtaaagtcgtggctgatgcaggcgatcatggctaccggttcgccggtgtcgtggcttcagccgctttctgttattgctcaaaaggaatccggcggaaatccgcgcgcctataacggctgggacattaacgccaagcggggggacccgagcagaggcttgatgcagacgatcggccaaacgtttaatgcttacaaaggaaaaggaatgaatgatattttcaatcctgttcacaacgcggtagcggccatcaactacatcaaatcgcgatacgggtcgccatttaacactccggggattaaaagcatggcaagaggcggagcttataaaggctatgccaacggcggcctgattacgagcgagcagatcgcccgcgtgggtgaaggcggcaaacgcgaatggatcattcccgaagaacgcggcatccgcggcagatatctgcttcagcgggctgcaggcgcgctcgggatggaagtgcaagaccccgctgaagggtccggttccatatcaagtgctcaggcggctgcagccaccacgggcgggacccgatcccggcagcctgctgaaaatggcgccaaagaagtcaacatctatattaccggggacaatcattaccacagtgagcgcgaccaggaaacattgattgcgaaaatcaagcgcgctcttgtcgatgagcttgaacgggatattcatattgggacgaaaggaagcgtagcttatgactaa

SEQ ID NO: 1488 - DNA, 657 bp, Bacillus licheniformis
atgactaaatccgtgtacgaattttggctgacgcaaggaaaggaaaagctgcgcctccctgtgcttccagagcagcttgacgtcagcaataatcttgcgaacgaatctgtaaaggtgtcaaagttcggcgaggtgacgtttatcaatgaaccgggagcgaagacgatttcattttcgtctcattttccgaaaaagtattctccgctctcggaatacaaagggtttctttcgccggagaacgcgattcttaaaatcgagaaatggatgaaagcaaaaaaaccggttcaatttctcgtgacgggaacgaagatcaatttcacatgcagcattgaaaacttttcgcatcgcgagggtgaaaaggatatcggcgaccgggattttgatctcacattgaaagagtaccaaacagcatcaccccggaagattaaacaaaaaaagaaaacgaagaaaaaacggccgtccaaaccggctccaaaaatgtacaccgtcaaaaaaggcgatacgctctggcacatcgcaggccgtttttacggaaacagccaggaatggcggaaaatttggaatgcgaacaagcaggcgatgatcaaacgaagcaagcgaaacatcaaacagccgggacattggatttttccggggcaaaagctgaaaataccataa

SEQ ID NO: 1489 - DNA, 981 bp, Bacillus licheniformis
atgatcgaattatttgtcataaaagaaagcgaatggtatgaacttgtcaccgaaagcgtcacattggaaggagaaagataccaggcgcctcgttcgatcgaagcgtcgattgtgatcaagcagggaagccacaaatattacagcgtgcaggaaggcgataccgttttatttaaatggaaaggaaaagaactgtttcgcggaattgtgttcagtagggtgccgaaagaatatacgcttacgtttaaagcgtacgacatgcttcagtacttggtgaaaaaccaggatgtctatgtattctcgaacaaaacggccgctgacattgtcaaacgaattgcgaacgactttcaaattcccaaaggttcgattgcaaacaccggacatacgattaaatcgctcgtctttaaagacaatacgagcctgtatgacattattttaaaagcgctgcgggagacaaaaaagcaaaccggaaaaaactatcagctgtatgccgaaaaaggaaagctgtgtttacgagcgtggcccgaaccggaggatatctgggttttggaaacgggtgtgaacattacggattacgcttacagcacgtcaatcgatgaaacggcaacccgggtgaaactgagaaagcagaaagataacaaaacctataccgcatccgcaagcgatgaagccggtatgaaaagattcggcgttctccagtacacagaaacggtttcggatgatattaacgaggcgcagctccgcgaccgggcgaagaagatacaggctgaaaagaaaggcgtcaaaaaagagctgaaaagcatacaggcaatcggcataccggaagttcaaagcggactgccggtttatatatcgattccggaagcgggcattaaagaaacctattgggttgataaggataaacacgattttacaggaacaaaacatgtgatgacgattgatgtcgtcgctaaaaacaccatacctgaaggagcgtcttcatga

SEQ ID NO: 1490 - DNA, 309 bp, Bacillus licheniformis
atgaaattaagcgatgcgataaaagagctggctcttggagccgtaaacgctgaatcgcctgtcgatgtcatgccggctgaagtcgtgtccgcgtctccgctcaagctgaagctccgcaatcatgataaattggtgatcccctccgacttattggtggtggccaggcatttgacagagcatacggaacagatccgaattgacggagaagacaaaacgattcgcttttacaatcaattgcatgccggcgaccacgtgatgattgcggctatgcctggagggcagtctttttttgtaatagacagagtgtag

SEQ ID NO: 1491 - DNA, 426 bp, Bacillus licheniformis
atggctctttcgccggaagtatcttttgaagatatcgaggatgacagcgatgtgattgagacttcaaaaacgtacaaaattgattttgaaacaggcaggatgacgggtgatatgatttcggggctggaagccgtggaacaaatggtttgtatggcgctgagaaccgagcgctacgcatacgccgtttacagccataatatcggaaatgaactgcaggaggttctttcagatcatgaaacgaccgacgcttataaagaaatggagataccgagattgatcgaggaagccctcatatacgatgaccgaatttcggcggtgaccgacttcgagattgagcgtcaaggcgatgccttccacgtgtccttttcggttgaaaccgatgaagggacattggaaatcgaggaggtgattggggaagatgtttga

SEQ ID NO: 1492 - DNA, 1044 bp, Bacillus licheniformis
atgtttgaagaccagacatttgaagagatcatggaacgcatgcttgagcgggtttcagatgagattgacaaacgtgaaaacagcgtcatttggaatgcgcttgccccggcagccgccgagctggcgctttcttatatttggcttgatcaagtgctgaatttggtttatgcggatacggctgaaggcgaatatttggacagaagggcggctgaggccggtcttgagcgctatcgggcgtcaaaagccatatggtctgcggcatttacggatggagtatcggttccccccggaacccgtttctttctggaagatttatattttaccatgctcgaagacggcaagctggaatgtgaaacagccgggacaaaaggaaacgccaatttttcggggcggcctttgcttccgctcgataccattcccgggcttgaaaaagcggttatgggaagccttgaaattcccggccgcgacgaggagacggatgaatccctgtatgaaaggtatttaatccgcgtccgtagggaagcggtcagcgcgaatcagctgcattacaaacaatgggccgaagaagtggacggcgtaggcaaagcgaaggtctttccgctgtggaatggcgagggaaccgtaaaggttgtcattacaaacgcgaaaatggagccagccacagacgcattaatcgaaagagtcaagcagtatatcgatcccgatccgggcaaaggggaaggtatggcgccgatcggagcttataccgcggttgaaagcgcggtatggaaagacgtgagcatatctgcaaaaatcatacctgaatcaggccggacgatcggtgaggccaaacaggaaattgcagaaaaaatcactgaattatttaaagaaatggcttttaaagaaagcgtcatccgtctctcgcagatcaacaacatgatctatcaatcgtcctctgtcagcgactattcggaagtcttcatcaacggggaagcgaaaaatctgcagttgacagaaacggaaattccaaagctggggcaggtgaccatcattgagcaagattga

SEQ ID NO: 1493 - DNA, 921 bp, Bacillus licheniformis
ttgagcaagattgatgaaatggcttttcacctgccgccatacttgatggaaatccgggaaattcaagaaattacaacggctgaagcgcctgaatttgagaggcaaaatcaagagattttcgatatgacggaccagcttttcgtcacgacggccacatgggggctggacaggtgggaaaagattttgaatgtcagacgcgaggcttcggacggcgtcgatattcgaagggcccgtctgttaaccaagatgtccaatattccgccgattacaagccgctcgatcgagcgcgcggttaatgcttttttaaaacagccgtccgcatccgtcagactgacggccggacggtatcattttttgctgagtgtaaacggagaggatctgcagtttataccttcaatcattcaaaccgtcaatcatatgaagcccgcccatttggcttatacattccggggcgggtttcattatgaatgtcggccgccgaaaagcattcatgacaggctcgttttaagaagcaaaaacggctttttcggtacgataccggtctatttggacggacagtatctgcttgatgatgcattctacttgaacggttttcgagaaatcgacggactgccccgcaggtttaaacagcagctcacactgcgccacaagaagcggcaatacattcggtccgcctccagctttacgataaagacggccgctgaaaaccggcggaaacagcaaacaaaagctggcatgaaaaccggcattaccaatcaaaacaaaaaggtccaatccttcaaaatcagctgcaaatgcgaacatgaatttaagcaagcaggcgcgcttgaaatgagagagaagtggtggacgctaaacggcgcatttttgctcgacggtacaaagcagctggcagcagcggcgcaaaaaatcgcattgtaa

SEQ ID NO: 1494 - DNA, 387 bp, Bacillus licheniformis
atggcacaacaattaacagtgacaacgctttatgcgagacagcaaatggcaaaagcacgggctgagggcggcaagctcaccaaaatcacaaaaatggctttcggaaacggaggtacaaacgataaaggcgaacccgttcctctgcagggcaacgaacaggccctgaaaaacgaacttctgcaaaaggatatcgacggctttgcctttatggagccggcgaaagtccgctatacatgtacattgggagaaagcgaactcgcaggggaaacgatcaacgagctcgcccttgtcgatgaagccggaaaattcacagcggtcagaacgatgacagacaagcagaaagacggcgacatcgagttcgtctttgaaatcgacgacatttattaa

SEQ ID NO: 1495 - DNA, 1203 bp, Bacillus licheniformis
gtggacatccaaaaaccgagacgctttgaaacaacagaccgcgcccatgccgacttgttcaacgaagcgatagatcagctgaatgtaaacgatgaacggattgcaaagcgggctgaggaagctgaagaaagggctaaaacgtatactgatgcccatgcagccaaaaaaaataatccgcatgcagtgacaaagtcccaggtgggattaagtaatgtgatcaatgaaaaacaagcgacaaaagcggagtttgattcacatagcaatgataatgaaaggcacatcacagcaagcgaacgaagtaaatgggacggcagccagattttcaatattactacagagaatggccaaggtaaagtatacatcggcgtggcagatgattttcatgaggttctcccccaatatacagggctaatccattttacggcggcaggcggtgcttcaaacagccctggaaacgcagttcggggaatttggacatgtaatgccaccggtgagtacggacaagttattgcatttgacaacgcaaatagaacgtacaggaagacagtggccgacggaaagtggtcggactggatagagctcgcctcagctgctgatgcacagttgtataaaattacgggagataacggccgacgtacaaagttggccgacggaacggatttattaacgatgccgacaggtttttattatgctattggccatgttgttcaaaacaaccctgtagaaaatgacagctcctggttcaattacgatgtgattgaaactggtgccggaagaaagaccatccatgcgtggcggagctatgataatacgttatgacatggaaccgttcatacagatggtgtatttaaaggatggaaacgcattataaccgacgttgattttacaacgatgaaatggtatgacttgacgctgattaacggaaataaagcgggcggaagaaagccgcaatacgctatatggggaaatcaagtgtttacgcgcggggaagtagtatctccagattttgcgagtgtttttgctattcttccggcggatgcaagacctattacgcaaaaatcgatggccgcaaccctctttggaacaactggcacatcaaaatatatagccgaaacaaacggagaattaaggctcgttggaaagcatgccaatattgaagccaatatatcaggcgtctcgctggataattgcttcaccatataa

SEQ ID NO: 1496 - DNA, 369 bp, Bacillus licheniformis
atgcaagtctttttatacgatgatgacttctattataaaaggcctgagattatagtggatccgggttccatgccagaaaattcaacggctgtaaaaccgaaggatgggttatggagagcgaagtttatcccttcccttaatgattgggtggagggagcggatcaagaatatataaacggtttaaaaaaagatcaatttgttgagaagaatcctgtatcagagcagctttccgccctcggccggcaacttgcagatgaaaaactggctaggaagcaagctgaaatcgcaaacaaggctctcggtgagcacttggtatctttaaaactagaactgctgaatatcaagggaggtaaggaaattgaaacttaa

SEQ ID NO: 1497 - DNA, 168 bp, Bacillus licheniformis
ttgaaacttaatttttgggtgcatgctttgtcctataattgggctactgcagaaatggtaaaggaagcaattgcttacgatgattgtactattgacgatttaagaaaaggtgtagagactgggtacatcactcaggatgaatttcaagaactgacaagtgaattgtaa

SEQ ID NO: 1498 - DNA, 1278 bp, Bacillus licheniformis
ttggttttgaaaaaaccaaggcgctttgaaactacagaccgcgcccatgccgatctttttaataatgttgttgatcagttgaataagaatgatgagttaattgcagaacttgttaaagaagcagaaataaattcgaaaacatatacggattctcacacaaataatgccacgatacacattaacgatgtggatcgaacccgctggaattcaggtcagttatttaaattaacagaaaataacggaaaggtattttataaaggcagcgcagagacaacggattacaataccttgactgaaacgggtatgtatttaatctacaatgaagggataaactcaccgcccgcatcaaatcgtgtatttttacttgtcatgagtttcggtaatacattggtccagtgtgcttatgaatcatataaaggtgtacagtcatattttaggtttagaaaaagtgactctgtaacgtggacatcatggcagacacaggaaacgacaatcggggcacaggcaaaagtcgatgcacatgagcaaaagtcgaatcttcatattaatgaaactgagcgtgcaaaatggaataatggccagttatacaaaataaccgatgataatggaaaacgaactaaactggaaaatggaacagatctgttaactttgcctacaggcttttattatgctgcaggccatgtcgtccaaaacaatccggtagaaaatgatagctcttggtttaattatgatgtaattgagacgggctcaggcagaaagaccatacaagcctggcgaagctatgacaactcattatggttagggacattacacactgacggtattttcaagggttggaaaaaagtgatgacagttgaagactttaataaaagaacgtatgtagatacttatgatcatgaaaattcatctgtttctgcagaggagaatgttccgacaaaattagtgtttggtgtaacaagggctgatcatttagaagagtataatatatcaaattcagaaataactttaaaaaatagcggtctctatttaataaggttgtatgttactagcaaaaacattacggttaattcagagaatatattaagttgttatgttggaggaaaagagtatcaaagacttggtatttggtatcctgcaacaacaggtaatacatgtgtattttttctgcaacaaaaatttacagcgggtgataaagttactttttacattacgccaaggagtactgggaagaccgtaaccattgcgactgcatatgtcaccatgtcacaaattggataa

SEQ ID NO: 1499 - DNA, 270 bp, Bacillus licheniformis
ttgacgatcttaaatgaaacaaacatctttgagaatgagttaaatggaattaaagctgatcaaaaatcactcgaacagcgcgtcagtacactcgaaagaacatcagaccgccacgatcagcaaatcatctcgattaacgaaaagctgaacaaaatcgaagagaatacaacctggattaagcgcagcatcacaggcgcgataattacagcggtcagcaccggcatcatcggcggcgcgattgctgttttttataatttattgcagaaataa

SEQ ID NO: 1500 - DNA, 267 bp, Bacillus licheniformis
atgaaacatatcgacaaaggcacggtcgtcaggacggtgcttctttttatcgcactggtcaatcagacgttgattatgtttggaaagcaggttttgccgattggtgaagatcagatcaatacactggcggacgctttgtatgtggccgggtctgcggcttttacaattaccgcatcacttattgcatggtataaaaataattatattacgagcagagggcggaggcagaaagaaacccttaaagaacaaggcatattaaaaaaataa

SEQ ID NO: 1501 - DNA, 1065 bp, Bacillus licheniformis
ttgatagaaaaagacttgaaaataagtaacattaaaggattgctaatatttttagtagtctttggacatttaatcgaattgtataaggccaattactatcaaatctttgtattgatttatgcttttcatatgcctttatttatttttataagcggttttttagccaaaagagcaacagtaagcaaaattatcaacttcattatattgtatattatttttcaatctttttttgattggtacttatattttataggtgattataaaaccttgcagtttcattttggcaaaccccaatttcatttatggtatatcgtaagcatgattttttggtatgctttggcgtggggtatccatcggttaagaccgcggaaagttggcaagacaataatctttctgattgtttttgcacttagcttttattcgcgctggtatactgagcctgtcgttgagtttataaaggaaatatatccgaatttcacctcatatacactcagttttcagcgtacaatttcttttgctccatttttctttgcgggatttttcatttccaaaaataaattgagaatgatttatgaatcaatcccagagcgtatagcaaaagggttattggcgattacagcggctgcagttattctctatattcaatacacttctaatttggaatcattattcagaggaagtttcggaatggagcgattcttaaatgaaggagagagttaccatgcgaaaataatgttgcattatttattatcggggtggctttgcttacttatcttaacgagtgtaaagggagaaaaaagtgttttaacaaaatggggagatcattccattgcgattttcttgttccatcctgtgtttgtatttttattgagaaggacggagttcatggctaattggaaagctgatactcaattcaccgtttactttgcaattgcaatattgatttcggccttgttgggttcaaatttcttctcgaaattcagtgcttttgttacgtcacctttaacaacactaaaaaagctttcaggtgttgtcagtcaaaagaaaaaatataatacagattaa

SEQ ID NO: 1502 - DNA, 1065 bp, Bacillus licheniformis
ttggtcaaagtaatcaataactttgtaaaagtcaatcaatacacccgtcccgggctgaagcttgcggcagtcaaaggcatcgtcatgcattggacggcgacgcccggggcttcggcattgaatgagcgaaattatttcaatggcacatgcattgccgacaagcgttatgcgtcggctcattattttgtcgaccgccatgaggcgcagcatattattcccgatcatgaagtcgcatatcatgcgcatgatcaaaaccgctgctatgtcagctttctgaagccgaatgccaataccacggctctcggggtcgaaatgtgcgtggaaaaagacggtaccatccatgaagagacgattcgcaatgcggcagagcttgtagcggatttgtgcaagacatacggtttgtccacagatcggattgtccgccattacgatgtcactaacaaaggctgtccaaccccgtgggtgagagatgccggccaattgtcagctttccgtaaaagagtagattcccttttggggaggaaaaccgtttccgtatcggctgcctccaccagccagacaagttcatcgtcgggcattatcctcaaaaaaggaatgtcaggctctcatgtgaaaaagctgcaaacacgcttggtcgcggccggtttttcgctgcctaaatacggcgcggacggaagctatggagacgagacggtgcatgcggttgtttctttgcaaaagaaagcgggaattaaagccgacggcatttacggtccgtcaactgaaaaagccctctcggccgctgaagcgtcagcagccggcaagagcaagacgtggacccttcccgacggcatttataaggtgaaaaacccgctgatgaagggaacggccgtcacacaaatccagacagcccttgccgctctttattactaccctgataaaggggccaaaaacaacgggatcgacggatattacggaatgaagacggcaaatgcggtgaaacgttttcagctgatgtacggtttgggagcggacgggatatacggaccgaagacaaaagcgaaaatgttgtcccttttgaaataa

SEQ ID NO: 1503 - DNA, 678 bp, Bacillus licheniformis
atgaaaatgaaacaattaaacccgcgttctgtcagagatcaaatctatcaggtgctgaaggaagaaatcatgaagtttcggcttgttccgggtgagcagatatcggaaaaagagatttcagaacggtatgaagtcagccgcactccggtcagagaggcttttttgcagctgtcgaaggaagggcttctcgaagtctatccgcagaaaggaacccgcgtgtcgctgatcgatcttgacctggtggaggaagcgaggtttatgcgggaaaacctggaaaaggctgtagctgaactggcgtgtgaggacttcccgcaggaagctatgtttaagctggagcagaatgtgaagatgcaggaattatcgatcgcacagaaaaattatgaaagtttgtttgaattagatgaagcgtttcatcagacgatttttgaaggctgcggaaaagcgaatgtctgggctgcgattcagcagatgaacgttcccttccaaagaatccgctttttaaggcttgccgccgattttaactggaacaccatccatcagcagcacgcggcattaacagaagcgattcgaacaaaacagaaggcaaaagccaaggaaatcgccgaagagcatttgcagctggtcatcgtcgataaacagatgctcattgatgagtttcccggttatttcaaaaagtaa

SEQ ID NO: 1504 - DNA, 1017 bp, Bacillus licheniformis
gtgaaagctgcggtgatgacgaagccttattcgattgaatttcacgacataccgcgtcccgaaccggccagcggtgaagtccttgtcaagataaaggctgccgggatttgcggaagtgatgtgcatttttacgacggctcaaatccatatgcacagtaccctcagatctttggacatgagcttgcaggcatcattgaaaaaacgggggccggcgtgagggggcgatccgcaggcgaacgggtcgtaattgaaccggcgatcccgtgcggaggctgctacccttgtcggaaagggaggacaaacgcctgtatgaacatcgatatgatcgggtcggttcgcagaggagggttcgctgattttatcattgttccagaaacgcatgtccatccgattcctgagcaaatggattttgcaaccgctgctttgtgcgagccgttttcaatcggagcgcaggcggttcggcgggcagatattcaaacaggcgaaacgattgtcatattgggaatgggtccgatcgggttaacgattttggcgcaggtaaaaaagcgcttcgacgttcgtgtgatcgctgtcgatcctgtaagggaaaggcttgagcttgccgaggcattcggggcggatgccgttattcagcctggtgaagaggatgcagagcaaatgattctgaagctgacaggcggagaaggagcggggattgtgttcgaagcggccgggattcccgcgacgattgagcaatccgttcgtttggcggccgccgccgggcgcattgtcattgtcggcttaacggggaggaatgtgacgattccgggtcttcttctcacaaagaaagatattgaaatttatggaacaaaacacagcgtcaatcaatttcccggcgtcattcaatttttgaatgaaaaccctgaaatagcccgggcttttgtcactgagatcatgccttttatggaaatagaagaggcgttgaaaaaagcgaaaaactgtccccatcaggtcacaaagatcattttatcttattga

SEQ ID NO: 1505 - DNA, 1098 bp, Bacillus licheniformis
atgaaaatggttttcagatggtatggagaaggaaacgactccgtgacccttgagcagatcaggcagattcccggtgtggagggaatcgtttgggcgcttcatcatcagccgccgggtgaagagtggccattggaagaaattttagaagtgaagcggcagtgtgaacagcacggttttcacattgaagttgttgaaagcgttaacatccatgaggatataaagcttgggctgccgacgagagatctgtatattgaaaaatacaagcgaacgattgaaaatttggccaaagccggcgtaaaagtgatctgctataattttatgcctgtatttgactggctgcggaccgatttgtacaaaaaggctccagacggttccaccgctttgttctatgagcacgcaaaggtgcacacaatcgacccttttgcgcttgtcgatcaaatcgccaagcatcccgaattcacgatgcccggctgggaaccggagcggcttgagcatctgacaaggctgtttgaagcctatcaaaatgtgacggaggaggatctgtggagtcatcttcactattttcttgaacgcatcattccaaccgccgcacgctgcggaatcaaaatggcgatccatcccgatgatccgccgtggccggttttcggactcccgcgcatcatgacttcaggagaaagcatcgggcggctgctacagcttgtcgatcatccggcgaatggcgtgacactgtgcagcggttcattgggcgccaaccccgaaaatgatatttccgccatgatccatgcgtatgccgaccggattccatttgcccatatccgaaacgtcaaagtctacgaaaacggcgattttatcgaaacatcgcacagaacaaaagatggcacagttgacatttgcgggattgtcaaagcctatcatgaaacaggtttttcaggctatgtgcgtccggatcacggccgccacatttgggatgaaaagtgcaggcccggctacggtctgtatgacagggcgctcggtatcatgtatttatggggcatatgggattcgctcaatagagaaaaacaggaggcttcaaaatgcttgaaatccatgaaaatttag

SEQ ID NO: 1506 - DNA, 849 bp, Bacillus licheniformis
atgcttgaaatccatgaaaatttagcggggaaaactgcggtcatcacaggcggcagcggggtgctttgcggtgcgatggcgagagagctcggccggcagggtatgaatgttgccattcttaatcgaaccgttgaaaaaggggaactcgtggccgaagctatccgaaaagccggcggcgcagcgattgccgttgagtgtgatgtcatcagccaacggagcgttgaacaggcgaaacgcgttgtggccgaccgattcggcggctgtgatctattggtgaacggagccggcggcaatcaccccaatggcacgacatcagatgaaacattcaactccgagcacatcttccaggacaacatcaagacgttatttgatctgaactgcgatgatgtcggttctgttctcaatttaaacttcctcggttctttcattccaacacagcaatttgcaaaaatgatgctgaatcaaaaaggggcgtccgtgatcaatatttcttcaatgagcgctcaaaccccgatgacgaaagtgcctgcatacagcgcggcgaaagcgggcatcgacaattttacgaaatggctggccgtctatctggccgaaacgggaatcagggtcaacgccattgccccgggatttttcctaaccaatcaaaatgaaaggcttcttcttgatcaaaacggcgaatttacagatagagcaaagaagatcatctctcacaccccgatgaggcgtttcggcaaaccggaagatttgctggggacgctgctttggctggcggatgagaagatgtccggatttgttaccggcataacagtgccggtagatggcggatttacggcttatgccggtgtctaa

SEQ ID NO: 1507 - DNA, 1014 bp, Bacillus licheniformis
atgaagcagattgtgtgtgaaaagccttatcgttttaaaatgacggatgtgaaaatgccggaactaaaggatggggaagcattggtccgcatcaaacggatcggaatatgcgggacggattttcacgcttattgcggaagacagccatttttctcttatccaagagtgctcggacacgaactgtccggtgaaattgtcagcatcgataattccggcggaacgctcaagccgggcgatcaagtgtcaattattccttatttggaatgcggggcatgcatcgcctgccggaacggacgccccaactgctgcgtcaatctgaacgtcctcggtgtccatacagacgggggaatgcgggaatacataaacgtcccggcagaccacctgctaaaaacagaaggattgacgctcagcgaagctgctgttgttgaatgtttaagcatcggcgcccacgctgcagaaagggcaaatatcaaaaaaggggaaacggtgcttgttgttggagcggggcccatcgggctcagcgtgatgaaattcgcaaaattgaagggtgcaaaagtcatcgcgatggatgtcagaaaagagcgcctcacatttagccgcagatgggctgaagccgatgaagtcgtattagggggagaacatgcggctgataagatcaaacggttgacgaacggcgactttccgacggctgtctttgatgcgacagggcaccctgcatcgatgaacagcgcttatcagtacgccgcacacgggggacggctgatctatgtcggacttgtcaacgaccatctggctatgcccgatcctgaaatccacatgcgggagctgacgattttatccagccgcaacgcattaagaagagattttgagacggtgatgaaagccatcatggatgacggagcggatgcgaaccggtttgtgaccggacagatggcgtttcacgatgttgttgacggatttcaatcagcgcttgctccggaaaccaatcctgtgaaagtgttgatccatctgtaa

SEQ ID NO: 1508 - DNA, 1272 bp, Bacillus licheniformis
atgttttcaaacggccgcgggtttgtcatcgtgatgctttttttggcgggagtgattaattatttggatcgttcggcattgtctgtcgccgctccttttattcaggaagatttgaacatacgtccggcgcagatgggcatgctgttcagcagttttttcatcggatatgccgtctttaattttatcggcggctgggcatcagacaaatacggagcgaaacatacgctgtcggctgcaatggtcgtatggtcggttttcagcggcgctattgcactgacatataatttcgtttcactgtttatcatccgcgtcattttcggcatgggggaaggtccgctgtcagcggcaacgagcaagtcggtcaacaattggtttccgcaaaaagaaagggcaagagcgctcggcatgacaatgtgcggaacgccgctcggcggagccgtttcaggtccgatcgtcggattgatcgcgatccattgggggtggaaggcttcctttgtgttgatcatgatcatcgggcttgtttggacttgcttctggatgaaattcatgaaagataagccggctgattccggcagtttgtctcctgaaaaggaagcgcgtccgaaaaaggataccggcatcccgctgtctttttatttgaagcagccgaccgtgctgtttacggcgttcgcgttcttttcctacaactatattttgttctttttcttaacatggtttccgagctatttaacgacagcccgggggctgagcattcacgatatgagcgttgcaacgattataccgtgggttgtcggatttctcggtcttgcgcttgggggatttatttcagattatctgttcaagctgacgggcaaacagatgttttccagaaaagccgtgcttgtgtgctgccttttggctgcagcggtatgcattggatttgccgggcttgtcactaccgcgtttggagctgttgcacttgtcgcattatcggttttctttttgtatttgaccggcatcacatactgggcgattatacaggatatcgttcatccggacagggtcgggggcgtgagcggattcatgcattttcttgccaatacattcggcattatcggtccgacggttacagggtacatcgtcgagtacaccggagctttcacaagcgcctttttgcttgcgggagggctggcggtggcaggttctatttgcgtcgctttgtttgtgaaaccgatacgttctgaaaggctgcctcaatctgtaggagaaggcggacaggggcatcctttatga

SEQ ID NO: 1509 - DNA, 132 bp, Bacillus licheniformis
gtgaaaaaactgaaaaaacaagtcaaacacgtcgatttcgcaaaatttggcctgtcagactatacctctcttctcagaagaagaagcgaaaaaatcattaaaacgctgaacagaagaaaaaacaaaccgtga

SEQ ID NO: 1510 - DNA, 174 bp, Bacillus licheniformis
atggagcctgcttttcagcaagaccaggaaagcgtaaaaaagcgcctcgcctttaaaatgtttaaaaggcaatccaaaaccaatatcgcgaaatacgaagtcagcccccaaaccgaacggattttccggcaaaacgaacggctgatcggcgagtataaaagaaaaaaagcttaa

SEQ ID NO: 1511 - DNA, 746 bp, Bacillus licheniformis
atgctgctattttatcaattccttgtttggcttattgttttggcgctggctctgtacgtagctgccgtgtggcgttttgaaaaacagctcgccgaaaaaacggtcgccatcagaaaaacgtggtaccttctttatgtcatcggcgccgtgatatattggacgcacgatccgcagtcaattttcacaaacccgcttcattacctgatcgttgccgtttttttcacgttgacagacgcttttattttcttaaatgcctactttaaaaagctcggcagctctgaactcgcgacagatacaagaatgcttctcgaagaaaacaacgacctcctccacacgtatcaaaacaggctgaaaacgtttcaatacctattgaaaaacgaaccgatccacatctattatggaaatatagaagcgtatgcagaaggcatcgaaaagctcatcaaacggtttgccgaaaaaatgaatatatccgctgcactttgcgaatataattcagaagaaagcaaggatcatttgcttgagcatatggaaaaccggttcgatgttcaagaaagcttgaccgcaaagacgtttattatgaagaaaacggaaaaatggtcctcattcctttttccatccacgattttgactatgtcatgaagttaacctcagaagaccttgtcacagaatttgattatctcctgtttacttctttaacaagcatctatgatcttctgctaccaaacgaagaggaaggtgacgactga

SEQ ID NO: 1512 - DNA, 999 bp, Bacillus licheniformis
atggatcttttatttgtattaaccatattgattgtcatctttgctttggcatttgactttatcaacggctttcatgatacggcaaatgcgatcgccacctcggtatcgacaaaagcgttaaaaccaaggcatgccattattatggccgctgtcatgaacttcgccggcgccatgacgttcacaggcgtagccaaaacaattacaagcgacatcgccgaccctttcaagcttgaaaacggatcggtcgtgatccttgccgctcttatcgccggcattacatggaacctagtgacctggtatttcgggattcccagcagctcatcccatgcgatcatcggagcgattgccggagctgtcatcgcatcggaaggatttgccgcgattaaataccacggatttattaaaattattgaagcacttatattatcgcccattttggcgtttgttttaggatatttgatctacagcatcgtcaaagtcatttttaagaacagcaatctggcaaaaacgaataagcggtttcggcgcgttcaaatcgcgacagctgccattcagtcctatacgcacggcacgaacgatgcacagaaagcgatgggtatcattacgatggctttaatcgcgggtaacttgcacagtacaaccgacatcccgttctgggtgcagtttgcatgcgccatggccatgggactcggaacatctgtcggcggctggaaaatcatcaaaaccgtcggcggaaaaatcatgaagatccgtcccgtcaacggtgtctctgcagatttgacgggagccctcatcatctttggcgcgacgatcgtccatttgcctgtcagcacgacacacgtcatttcttcatccattttaggcgtgggcgcttcccaccgggtgaaaggcgtaaactggggcaccgcaaagcggatgctgatcacttgggtcattacccttcccatttcggcaaccatcggtgcatttgcctatttcatacttgatttattcttttaa

SEQ ID NO: 1513 - DNA, 618 bp, Bacillus licheniformis
atgttgaaaagaaaaaaagacaagttttccgtgcttttgacggaaattgcaaaaaatttagatgaaacagctgagtattttgttaactataaagtgacgaatcagacaacccttaaagaattcgcggataccttaaaagagtatgagacaaaaggagataactatgtacatacgatgattaaggagctgaacaaagcatttatcacgccgattgaacgcgaagacatccttcagcttacaaacagcctcgatgatgtactcgacggcatcgagcacttttcagccatgatggaaatattctcgatcacatcttcagatgagcatattgacaaattcagcggctatatcagagaatgcgcaaaagaaattctggtgacgatcgaattgctggcggaaaatcgcctgaaagaaattcagccgcacgccattaaaattaaagaatacgaacataactgcgataacctgcaccgcaaatcgctgaaaaaccttttcggtaaagagacagatccgattaaagtgatccagtacagagaaatctatgagacgcttgaagaaatcgcagattcatgccaaagtgtagcaaacaatttagaaaccatcataatgaaaaatgcgtaa

SEQ ID NO: 1514 - DNA, 1758 bp, Bacillus licheniformis
atgagacggttagctttcttagttgttgcgttttgcttggcggttggttgctttttcagtccggtgtctaaagcagaaggagtcatgagcgggggaggtggtgataaagtcgccgtcgggaaagacggtatggtggctacggcccatccgcttgcatcaaaaatcggagccgaagttttgaaaaagggcgggaatgccattgatgcagctattgcgatccagtacgcactgaatgtaacagagccgatgatgtcgggaatcggcggcggcggcttcatgatggtctacgacggcgagacgaaggaaacgtcgatcatcaacagcagggagcgtgctccggagggagccaaacctgacatgtttttggatggagacggaaaggtgattcctttttcagaaaggtcgagacacggaaatgcggtcggtgtgccgggaacgctgaaagggcttgaagcagcgcataagaagtggggaacaaagaaaatggaagacttgatttcgccttctataaagcttgcagaggaagggttcccaatcgactcggttttggctgacgcgataaaggatcatcaggacaagctgagcaaaacggccgcaaaggatattttccttccggacggtgaacctttgaaagaaggcgatatcctcgtacaaaaggatttggccaagacgtttaaattgatacggaaagaagggtcaaaagccttttatgatggagaaatcggccgggcgattgcagatgtcgtgcaggatttcgggggttcgatgacacctgatgacctgtcccgctacgaggtcacaacagataagccgatctggggcgagtaccacggctatgatatcgcaagcatgcctcctccaagctcaggcggagtgttcatgctgcagatgctgaaattgattgatgattttcatttatcgcaatacgatccaaagtcgtttgaaaaatatcatctgctcgcggaaacgatgcatctctcctatgcggacagggctgcatatgcgggcgatccggaatttgtcgatgttccgctcagagggctgctcgatcccgattatattaaggagcggcaaaagctgatcagccttgattcgatgaaccgcgatgtgaaagagggcgatccgtggaaatatgaggaaggcgagccgaattatgagatcgtgcctcagcctgaagataaaacgatcggggagacgacgcattttaccgtcacggatcagtggggcaatgttgtctcttatacgacaacgattgaacagctttttggaacggggattttagtgcccgggtacggactgtttttaaacaatgaactgaccgattttgatgcggttccaggcggcgccaacgaggtgcagccgaataaaaggccgctttcaagcatgacgccgacgatcgtattcaaagatgaaaaaccggtgctgactgtcggttcccctggcggaacgacgatcattgcttccgttttccagacgatcttgaattattttgagtacggcatgagccttcaggatgcgattgaagagccgagaatctatacgaacagcctgacttcgtaccgctatgaatccggaatgccggaggatgtcagacgaaagctcaatgacttcggccacaaattcggcgcgaatccggttgatatcggcaatgtccaaagcattttcattgaccgggagaacaaaacgtttatgggggttgccgattcaagcagaaatggaacggcggtcggggtcaacattaagacatcggctaaatag

SEQ ID NO: 1515 - DNA, 645 bp, Bacillus licheniformis
atgattcacacgttggcaaatggattttaccgcttttgcgagtgggtgatgcggctcgcctatttgaatctgctgtggatcggctttacgctggcgggagcggtcatcttcggtttagcgccggcgaccgccgcgatgttcgctgtgactagacagtggacgctgggaaaaacggatgtcccggtgtttcagacgttttttcgggcgtttaaaaagaaatgggccaaatcaagcgttctcggtttgatattgggtctggtcggcttattgctgtttgttgattttcagattgcggccgtctattttcacgatcagccagtgtttttaagcctgttcatcagtttgtttatcatttatgccatcatcctcttatacgctttttcaattgatgtccactacgatttaaaacggattgcagtgctgaaatacagcttcatcatcggcttttcccgtccgctcacctcgtttttcatgctgatcagcgcgtttggcatgattctgctcgctttatttcatgtcacatttcttctgtttttcagcggcagcgctttaagcttcattttgacgaagctttcgtttcaggcattccgtgcaatcgacgggcgccggacagacaagcaggctgccgccccacgcttgaaatga

SEQ ID NO: 1516 - DNA, 1737 bp, Bacillus licheniformis
gtgaaccggtatcagcatttaaaaattaaagatcaattgtttattttgatttcactgatcatggccgtttcgctcatcctgatcttgagcggcattcaatacgcgttccgggtatatgaccagcagatttacaggaagtcgtcacaggtgctgatgctatcatcaaaaagcattgaagatgaattgaaaaagattgaggatgtgtcatatcaaatcaccactgacgcagacatccaagcgaacctcctgaaagccggccgcggccagaacaaatacggacgctaccggataaaaagcaaaatttgggataagctggccgaatataccggctctaagcggtacattaaatcgattcatttgtttgatgcttccggcaccgagtactccgcaggggcgaatttaaccgaagcattgcgggagcaaaagaatgcgctgatcgaaagagcgtcgcgccaaaaaggcagcaacatgtgggagcccatgccgggtgaaaccggcgagctgttatccgtccgggaaatccgctcctatgagcgtttaaaccttgaccacctgggaacagtggtgattgtcgccgatttaaaacgggtgatcggcgatcttccgaaagactggggggaaggcgcgggcaagattgcgatgtcggacggacgggagctgtttttttctgaaatgcttttcagccaaaccgatggcctccgattgtcttctcatgctgaaaacggatatgacattgtggaggaaaacggccagcggtttttcgtttcatatgtcaaatcagcgtataagaattggacgtattggagcctgatcccctttgacgctatgttttcgaaaatttctgcgatgaagacgatcctgatttccctttttatcctcttttttctgattgctgttctctttggaagaaaaatggccaggggcattacgagcccgattgagaagctggtggcggccatgaaaaatgtccaaaacggcgattttaaactggcgccgctcactcgcgctcctttagaccggcaggatgaagtcagcgtcttaaaccgcaacttctttacaatggttgaacggatcaatgaactgattgccgagaactacaagaagcagctgatgctgaaggagacggaattcaaagcgcttcaagcgcaaatcaacccccattttttatacaacacgctcgagtcgatcaactggcttgcaaaaacgaaccggcagccgcaaatttcaaagatgacggaatctctagggtttttgctcagaaatgccatcaatatgaaaaccgacgtgctgacgatcgaggaagaagttgaaatcgtgcgccactattttacgattcagcggtttcgctttgaggagcggctcgtttttgagctcgacattgagccggctgtgaaaaaatgccgcgtacctaagcttgttctccagcctttggctgaaaacgcgattacatattgccttgagcccttcattgaaccttgccatattcaaatcaaagcatataaaaaagaagagcttgtctatttaacggttgccgacaacggccccggcatggatgaagactttttggaaaaggcgagaaaggagcttgtccggacaaccgggagaggaatcgggctgcaaaatatcgacgagcgcattcagctgatgtttggcaaagggtatggcttgacgatttcaagcgaaaagaataagggaaccgtgatgatgattaaaataccatttcaaagcggggtgtga

SEQ ID NO: 1517 - DNA, 1167 bp, Bacillus licheniformis
atgtataaagtgctgttggcggacgatgaacggattattcttgacggcatctccagcatgatcgagtggaattcgttcgggacgtctttgatcggggccgcacagaacgggattgatgcttaccgcctgattatggaaaagcggccggacattgtgatcagcgatattaaaatgcctgggatgggagggctcgaactgatcgaaaaagtgtcccgcgaccacccgtcaatccggtttattttgctgacgggcttcggccagtttgaatatgcaaaaaaagcgatgtcatacggagtcaggcattatttgctcaaaccctgcaatgagagccatattacagattcgcttcaaagcgtgatcggcgagctgaaaaaagaggaatcggcgcaaaaagtgaaaaccgatctggagatgatgaagccgcatcttatgaagcagatgttaaaagagctgatcaccggcggccgcatcgaggatgaagcgtgcctgcgctttttttcagagcaaaaggccatcaggctgatcctgttttccgtccgggacggggaggataaagattatgcacaaggcgttgaatccattgcggatgaggtgctgaacggtgctgtcatcgcctcggcccgggttcagcaattgcttgtctgtgcagtagacggaacattggcttctgctgtgcttgaggaaaaaatgaaaagcgtccaagagctttcacgccgcctgctccgatttgaaccagaagcatcactcagcgaaagcggcaatatcagcgaagcctccgagatgtacgaaaaggcatatagaaaaatcgtccaagatgatggggggacatcggttttaatcggaagggtgcttgatctcatcgaaaaggaggcctcaaacccgaagctttcgctaaagtgggcagcccgcaacatgctgtatatgaatccggattatctcggcaagctgtttaaacaggaaaccggtgagaagttttcaagctatgtcgcaaaggtgcgcatcgaaaaagcgatcgcgaagatgaagaagtctaaaaacacggccatcggcacgctggcagaggaactggggtttggccacaatccaaaatacttcagccttgtctttaaaaaatacacgggactcaccccgtcagaatttcgaaaaaaagaagacaacacgttttaa

SEQ ID NO: 1518 - DNA, 1296 bp, Bacillus licheniformis
atgagaagatttgtttttgtctctttgtgcattttgctgacgctcggcctgttcggatgcagttcaaacactgaagaggcggccggtgcggacggcaaaaagaaggttaccttaagggtcgcatggtggggcggacagcctcggcatgattatacatcaaaaatcattgagctatatgaaaaggaacatccgcatgtcaaaatcgaagcggagtttgcgaattgggacgattattggaaaaagcttgccccgatgtccgcggcagggcagctgcccgatgtgattcaaatggatatggcgtatttatcccaatacggcaagaaaggccagcttgaagatctgactccgtatgtcaaagacgggacgatcaacaccgaatcgattgatgaaaagacgatcaaaggcggaaaaatcggtgatcagctatacggcttcccgctcggtgtgaatgtactgtcggtgattaccaatgacgacttgctaaaagaagcgggcgtcgagattgacgatggcagctggacgtggaccgattttgaaaacctggcgctagaggtcgaagagaagacgggacaatacggttcaaacggcatgcatccgcccgatgtctttttcccgtactacctcaggacaaagggcgagcgcttctataaagaggacggcacaggccttgcttattcagacgacaagctgtttgtcgattacttcaagcggcaggtgaagctcgtcgatgaaaaagcttcgccgacgcctgatgaaagcgcgcaggtgaaggggatggaagacgattttatcgtcaaaggccgaaccgctgcaacatggaattattcaaatcagtttgcggcgttcgcgcagcttaccgatgcgcccctgtcattaaagctgcctcctgaacaggcgaaggaaaaggcgctgtttttaaggccgagcatgctgttttcaattccgaaaagctccgaacagaaaaaagaagcggctgcatttatcgacttctttattaacaatgaaaaagccaatgccctgatcaaaggagaaagaggcgtaccggtctcctccaaaatagcggaaacagtgaagtcagaactgagcgaagaggagaaaaagattttcgaatatgtcgaaagggctacagcgtacgcgggagaagcggaaccgcctgagccaatcggcagcgccgaagtcatcaagctgctaaaagacacgtcagaccaaattttgtttaaaaagatcacgcctgaagaaggagccgcgaagttcagaaaagaagcggacgccatactgaaaagaaatcaacaatga

SEQ ID NO: 1519 - DNA, 900 bp, Bacillus licheniformis
gtgaagcgaaaaaaaagaattgacaatttggcgggttatgcctttatttccccgtttattatcggatttttgtgctttaccgtcattccgatgggagcctcgctgtttctgtcttttacaagctacgatctgttcaccccgcccaaatgggtcggctttgacaactataaggcgatgctgaccgatgatgaaaaatactggggttcgctgaaagttacgttttattacgtgctcgccggtgtgccgctgcgcctcgcgtttgcgcttttcatcgcggtgattttgaacagagccgaaaagggtgtgggcatttaccggacgctcttttatctcccgtccatcatcggcggcagcgtggcggttgcgattatgtggcgcaatgtatttggcaatgacggtgtcatcaatgcgcttttgttcttccttggttttgacaagaagattttttggtatcaggacccgacaagcgcattgtggaccttgattcttttgtctgtgtggcagttcggctcttccatgctgatctttcttgccggattgaaaaatattccgccgatgtatcaggaagcggcaagcgttgatggtgcaaacaggtttcagcggttttttctcattacgctcccgcttctcagcccgatcatcttttttaatttggtgatgcagaccatttcagccttcatgacctttacgccggcctacattatttcaaaaggggaaggcggtccgcttgacgggacgcttctgtattccctctatttgttccagcgggcgttcaactttttccaaatgggctacgcttcggctatggcatgggtgatgctgatcctgatcggccttgtcacattcatattgttcaaaacttcatccttatgggtgcattacgaatcgaaggaggggtag

SEQ ID NO: 1520 - DNA, 894 bp, Bacillus licheniformis
gtgaagccggtaaaagatatttcgtggcgggccgcgcctgccccgcttcctgcgggaaatagaaagaaaagagccgggcgtctcgtgtttcatatcacgacggccggtcttgcgatcatccttttgtatcccgttatctggctgatcgcaagctcgtttaaagaaagtgcgagcatattcgccacatcccactcgctcattccggaccccttgatcctgtccaattatacggagggctggaaagggatcgccggacagccgttcatcacattcattaaaaattcgcttatcattgtcggcctttcgacggccggcgcggtcttgtcctcggcgttcatcgcttacggattcgcgcggattccgtttaaggggaaggcgttttggtttagctgcatgatggtgacgatgatgctgccgcacgaggtgctgatgattccgcagtacatcatttttgcaaagctggattggctgaattcattcaagccgatcgttgttccccaatttttcgggcacgcgttttttatctttctgatgattcagttcatcaggacgatcccggtagaactcgatgaagcggcaaagattgacggctgcagccgtctcggcatctttttcagaattattttgccattgatcgcaccggcgctcgcgacgtccgccatcttctcgttttactggaagtgggaggaactgatcaatccgcttctttacttgaacaagccggagctttacccggtttctctggcattaaagctgtttttagatacggaaacggcgtctaactggggggcgatgtttgcgatgtcagtcgtctcactcgtcccggtgatcctcgtgtttttcgtttttcaaaaatcgatcgtccaaggaatcagcatgagcggattaaaataa

SEQ ID NO: 1521 - DNA, 1035 bp, Bacillus licheniformis
atgacaaagcttgtttttgatgaagaaaaactcaatgaagtgatcgacagaatcgttaagcggacatttgagatggatttcgaatgggattggccgggcggcgtcgcgttttacggcgtggctgaggcgtatgaagcaaccgaaaatgacgaatacctcgagcttttgaaaaactggacggatgaaaagcttgaagacggcttgcctaagctgtcgatcaacggagtatccatcggccataccctcatatcgctctaccaggcgacaggagatgaccgttatctggacgccgcccggcaaatggcggactatgtgctccacgaagcgcctcggttcgcagacggggttttgcagcacaccgtcaactcagagaaacatgtattccctgaacaggcatgggtcgatacgatgatgatggcgggcttgttccttctccgaatcggaaagcttgtcggcagcgaggaatattttgaagacgggctgcgccagtatcacggccatgaagaatttttgcaggatatggagaccaatctttattatcacgcatgggaccatgtggccaaaaacaacctgtcaggcatattttggggaaggggaaacggatgggcagctttaacgatggcaaaagcgctccctttaatcgatgttacgcatccgtcttatatgatcattgacggttcgctccgggacttgctgagcgcgcttgtcaggcttcagcatccctcaggtttatggcacaccgtactgacggacccggattcataccttgaagtgtcaggctctgccgggattgcatccggtttgctgtcaagaggctcgctataccacaaatccgttcagaaggcgctctcagccattacggatgcggtcgcgcctgacggaagggtggagcgcgtttctgcgggtacagcagtgatgcgggatgcgcagggttacaaagacgttccgtataaacggattcaaggctggggacaggggcttgccctgacctttttggcagatgtcgtccgctccaagtcgcgcgcgttccaatag

SEQ ID NO: 1522 - DNA, 2283 bp, Bacillus licheniformis
atgaaaaagctgcatcaaagatatgtttcacggcgtaaagggaggttttttaaaaaaagctttgtgatgatcctgctgattgcgtgtattcccggcttattgacgggtgcaggagtctatttgttttcggctgcgaaaattgaaaaagagctccaacatctgcacgagaaccaggtgaaacgccaaatcagccaaatcgatgacaagctggaagggcttgagatcatgctctcccagcttgcatatgatccgcgcctgatgaacggtctggccgatgccgatctgcaaacggattttcaaacgacgtacaagctctcaaaatcgctgtttttgcttcaggatcaaaatccgctcattcacaaggttgaactgttcattcaagggaaggagccgattctcttaaatccagaatacagcggactgaccgaccggaaaatcttgaaggcttatcattcgctgcttgaaggcggtcaaaacgtctattggaaagacatgagcggcgcttcatccggaatggcccttgtccataaaattccgggaggcatctcagaaccgttcggcgcgctgattttgacgcttgacgaaagagaattgggccggttgcttgagagcctttcgccgtattcaaagggaacagcgctcctttttcatcataatcagaagcctgtttcttggagcaatcgcggcaaaaccaactttgaaagcgccttaaaagaaaggcttgagaaacaaaaaaatccacagggctcctttgttatggattggagcggaggtgcgtattccgtttcatacggacgaatggacagattgaaccaggaatggacctatgtttcggcttcaccgatgtcggccattacggctccggtgctgtttttatcgaagctcatcgcgtcggtcagcatcgccgggatcgttcttgccttcattctggcatggtatgcgtcacacaaaatttattcacctgtcgcaaggctgatcaagctctgctccggagagggaaaggcggcctattttccggatgaatttcattggctcgagaagcgctgggaagacctatctgaggaaagcggcagactgaaaaaggaactgccccatgctgcaaacgttttttttcagcgccttctgagcggatactttgcagatgaatcagagaggaatttgagagatcgtctgaaaaggtggggctgggaagcaaaagacaatgtgtttaccatcatcgatgtccagctgacgggactctacgaaggaaacggatcttttacaaaaaaggatgaaagtctggcgggctttctgttgggaaacattacgcgcgaactggctggaaggacattcaaccatatttatatgacagatgtccgttcgctatcgcttgcggtgctgctggcgagcggccggaatacagccttcaaggaagaaatcgcccaatttgtgcgtgagctgacagatgtgatctacagcatatccaaactgcacgtcacagtgacggtatcaaaaaccgctgacaagttaaaagacactcccggcatttatgaagaggtgaaagaaggcaggcattacagacagttcgaaaacgccagccaggtgatcgatttaagccggcgggaagacatgcctcccgctgaatcatactatccgttcgctcttgaaaaagaggtagtcagggcgttgcggcttgaagaaagggatgaagtcgaaagaaggatcaggctgtttatccgggagctgtccgaaaaaggaaaaacggaaatccgcatccagccgggcatgatgcagctgttcgcaaagatccaagaagagatctttcattccggccttcacccctatgaattgttcagccgaaaaaacctgcttcaggagctttcggagctgagggagccggaaagggctgtcggctggatgatggagcgttgcataagcccttatcttaaagagatggaaggaaggaaaaacagacagcaaaaacggcttgtcgaacaggtgcttgagatgattcatcaggattatatgaacgatatctcgcttgaaagctgcgctgatcgggccgggacgaattcgtataccctgagcaaagctttcaaacaagtaaccggcatcaattttatcgactatgttacccggctcagaatcgaaaaagcgaaagagctgcttcttgagacgaataaaaaaatccatgacgtttctgaagaggtcggctacagacacagctatttcaaccggattttcaagaagcaggtcggcattccgccgagccgctacaggcagattcatcaggaatcttcgtga

SEQ ID NO: 1523 - DNA, 717 bp, Bacillus licheniformis
atgaaacgaacagacaaaaaaccgaaagtgacagtatatttggccggggactcgaccgtcgcagactgtcccccgcatgaagcgccgatggccggctgggggcagatgcttccgctgtttttctcagatgaggctgcggtcgtgaatatggcaaaaggcggggccagttcgaacagcttcattgatgaaggccggctcgatgacattacggagcggcttgcgcctggtgattatgtgttgatccagttcggccacaacgatcaaaaaccgtacggaacagacccttatacaacctatcaggagcatcttgtccgctatgtggaagcggttcacgaaaaacaagcgacaccggttttgatcacttccgcagagcgcagacgttttgatcaaaacggaaagcccgccgacacactcggggattttccgaaagcgatgaaggcgctcgctgacagcttcgacgttccgctgatcgatttatggtccaaaacaaaagcgctctatgaatctctcggaatcgaaggttcaaaacggctgtttgtccactttcagcctcatgagcaccctcattatccaaatggaatcgaagacaatacccatttttccgaagcaggggcccgtcaagtcgccaggctggtgacagaaggaatcagagagcttggtctgcctctatcggcttatctgctttgtgaaaggagcgatttccgtgccggagtgtaa

SEQ ID NO: 1524 - DNA, 693 bp, Bacillus licheniformis
gtgccggagtgtaatggaagagaaggaagcctgatttatcaaaaccctttatcttctcctgaagatctccgcggctgggtgatggaagggaaaggaatcgttcgttttcagaacggccgcctgcatatggagaacgaacttgacgctgagcaatatggggacgatgctcattttgtttactggtgccctgagacattccctgatggaattgttgtgaagtgggatttctaccctgtgcgggagcctggcttatgcatgatattttttgcagccgccggcatgaatggcgaagatttatttgacgggcggctggcggagaggacggggaaatatccgcaatatcattccggggacatcaacacattgcacctgtcgtatttcagacataagcatgctgatgaaagagcattccgaacatgcaacctcaggaaaagccgcggctttcacctcgtctgtgaaggagccgatccgcttccgcccgctgcagacgctttgcctccctaccggatgaagctcataaaggacggggcatacgttcgtttttcaatcaacgagctgcccattttggaatggacggatgacggcaggcgtttcggccctgtttacggcgcaggaaagatcggcttcagacaaatggctccgctggaagcagcctacgccaactttgaagtgcgcaggctgctgcgcggctga

SEQ ID NO: 1525 - DNA, 612 bp, Bacillus licheniformis
atgcgggataaaggcgtaatggcgatgatgtacggcgcgtgtgaagcgatcatgaaaatcgcctggctgaacgggatctgggttttattcacgctgggaggaggcattgttttcggctgggcgccgagcacggctgcgatgttcacggtcgtgcgcaagtggctgctcggccggacggacgcaccgctgttcaaaacgttttatcaaacgtataaaaaagagtttttcaaagcaaacggacttgggctcatcctcattaccgccggaacaattttattcgtaaactatcaatttttccgcgtccgtgcggatttattttcgatcatgatcagctatgccacactggtggccgggctcatctatctcgtggttttcatttatatttttccgctttacgttcatgttcagctgccgtttgtccgctatttttcacaggctgcgctgatcggtctcgttcgccctttgacgacggccggaatggctgctgctggttgcttggtcgtgtatgtgctgttgacggttccgggtctgatcccattttatggtgtcagtttgtttgctcttgtatcgatgtttatcgcacatcgctgttttttgcgtctggaaggctag

SEQ ID NO: 1526 - DNA, 1869 bp, Bacillus licheniformis
atgaaaaaaggaaagaaaaggtggaagaacctgttggccgcgtcatctcttttattaatcacgctagtgaccggcttctcggagcaagctgaggcagacgggcggacggctgcgcaggcaaggcaaatggaatcgcttaacagggggcttgtcgctgttaaaacggggaacggtgtctttgtcagctggcggcttctgggaaccgagccgtcttctgtttcatttaatgtgtatcgaaacggaaagaagctgaacggttctccgattacatcgagcacaaactatcaggatgcaggcggggatttgaacgccgtttaccaggtgcgcgccgttttgaacggcagggagcaggctccttctgaatccgtcggcgtattgaataaacaatataaatctgttccgctgcaaaaaccggccggaggaaaaacgcctgatggggtgtcatacacatacagcgccaatgatgcgagcgtaggcgaccttgatggagacggccaatatgaaatcattctcaagtgggatccttccaattcaaaggataattcacaggacggatacacgggagatgtgctgattgacgcatacaagcttgacggcaccatgatgtggagaatcaaccttggcaaaaatattcgcgccggcgcccattatacgcagtttctcgtctatgactttgacggcgatggaaaagcggaaatcgccatgaagacggcagacgggacgaaggacggcaaagggaaggtgatcggcaatgcaaacgccgattaccgcaatgcccaaggccgaattttgtcagggcctgagtatttgacggtttttaaaggcgatacaggcgctgagcttacaacggtcaactacgaacctgcccggggaaatgtagccgattggggagacagctacggcaacagggttgaccgctttctggccggtgtcgcataccttgacggggagcggccgagttttgtcatggcacgcggttattacacgagaacagtgctagtcgcttacaacttcagaggcggaaagctgaccaagctgtggacgttcgattcggatgctcccggaaatggcgcctatgccggtcaaggcaaccacagtttgagcgtcgccgacgttgacggagatggaaaggacgagatcatatacggagcgatggctgtcgatcatgacggaaaaggcctctactcaaccggctggggacatggggatgccatgcatacagggaacctggacccgtcaaggcctggactggaagtcttccaagtccatgaaaacagcaattctccttatggcttgtccttccgcgatgcgaaaacaggaaagatcatctggggagttcacgcaggtaaagatgtcggacgcggaatggccgctgatatcgatccgcgctacgaaggagcggaagtatgggcgaacggcagtctttatacggcaaaaggcgtaaaaatcggaaacacattgccttcatcaacgaacttcggcatctggtgggacggcgatctccaaagagagcttctggacagcaacagaattgataaatgggattatcaaaattcgcgaaccgtcaacttgctgacagcgtccggagcttcggcaaataacggaacaaaagcgacgccgtccctgcaggcggacattctcggagactggcgcgaagaagtggtctggcgagcggaggacagcagcgaactgcgcatctacacgacgacagacgtgacggagcaccgcatgtatacgctgatgcatgatgcagtctatcgcctcggtatcgcctggcagaatgtcggctacaaccagcctccgcacaccggcttttatttaggcgaaggcatgcagacaccggagaagccgaacatttatacacgctga

SEQ ID NO: 1527 - DNA, 159 bp, Bacillus licheniformis
atgaagcgatatgttcgctgcttatgggtcatccccctccttttctttttcatcatgggaatgggggacctgcgcagccgaaagccgctgccgcgcatcacagtcaggatctttttctgttcgattttggaaaaggtcccgctgagaaggattatgtga

SEQ ID NO: 1528 - DNA, 309 bp, Bacillus licheniformis
gtgaacgagtcctccgtgtatcaaaatggtgctggctacggattttctcaggcaggaagcgctgtgtgcaaaaagacgcaaaaaaaagaagcgctcaaaaaagactattgtatcgtgaaccggacggcttttctggcagatctctcccccggcaaataccgcgtgaccgtttttgcatcatccagcggtgaattgaagctttatgccgaaggagaaaaaatggggacgatcccggccggagcaaagggaagctcagccgaaaaagcgttcaccgtttcggtggaagacgggcgcctcgatctggagtga

SEQ ID NO: 1529 - DNA, 1266 bp, Bacillus licheniformis
atgccgaaggagaaaaaatggggacgatcccggccggagcaaagggaagctcagccgaaaaagcgttcaccgtttcggtggaagacgggcgcctcgatctggagtgaaggggcctcagccaaaggtgtatgccatcgaaatttcgaggtgtatcagttcgatttcggtgacgggcctcttgcttcgggttttattccggtaggcgctgcttcggcctatacccctctaaaaggctacggatttgacgacgcggcaaaggtgtcctgcacggaccgaggtacggccgacccgcttcgttcagacttctgcattccggatgggacggcgtttactgtcgatttgcctgacggtcaatatcaagtccaaatcataaccggagatgcgcgggcaaagacgaacatggacgtacgggcaaacggcatgctccagctgtattcgtttggagcggaagcgggcggatacaacgaaaaaacgtttccgattcatatttccggcggccatctttcgatccaagccttaacggcgagaacaatgccgcgccttaatgcgttggtcattacgaagacggcttatcatgtgacggatgacaacacgacggtctttctggcgggcgattccacggtctccgattatgagcccggctatgcgccgatggcaggctgggggcaatttttaggcggctatttctcggatgaaatcgtcatcgacaaccaggcgaaacgcgcgagaagcgcgaaaagttttgtggatgaacggtcgctggctacgattttgaaccggatgaaacggggcgactatttgttgattcagttcggcattaatgacgcagggcaagatcctgcccgccatacagatccgtatacgacatttcaggaatacttgagaacatatattaacaaagcccgcgaaaaaggaggacgtcatgtgctcgtcacttctcaaagcaaacgtacctatgatgaaaagggcgttttctacaacagcatcggagaatatccgaacgcaatgagacagctgggacgggaaatgaacgttccggtgatcgatttaaacaaaaaaagcattgaatattacaacgagatcggcgttgaagcgactaaaaacgtatttatgtttctggaaccgggagaaagcccgaattatccggaaggcatccaggacagggtgcattttcacgagttcggcgccaaccaattggcaaggctcgtcacaggagaaatctccgatttgaatatatatccgctgaaacactcgctcaagaaataa

SEQ ID NO: 1530 - DNA, 1887 bp, Bacillus licheniformis
atgggagaaaaggacagacatgcagcagctgatcgcgttcgtccggtgaaaacggcggcaaaaccgaagcaaatggaacacttaaaccgcggccttgtggcggtaaaaacaaaaaagggggtttttctcagctggcggctcttaggaaccgatccggaagaaaccgcttttaatctataccgcaacggacaaagaatcaattcaacacccatttcatcatcgaccaactttcttgataaacacggaaatggaaaatcgctttattatgtgtccaaggttctcggagataaggaagtcgagacgtcgcccaaaacagctgtctggcagaagccttacttggaagttccgttaaacaagcctgacggcgggacaactcctgacggcgcaccgtatacgtacagtgcaaatgacgcgagcatcggagatctcgacggcgatggagaatacgaaattgtgctcaaatgggacccgtcaaattcgaaagataacgcgcacaacggctataccggagaagtcatcatcgatgcctataagcttgacgggacattcatgtggaggattcatctcgggaagaacatccgcgcgggcgcccattatacccaattgatggtctatgatcttgacggcgacgggaaagcggaaattgctatgaagacggctgacggaacagttgacggaaccggccgggtgatcggcgatcaggctgccgattacagaaatgaagatgggcgaattctggccggccctgaatatttgtcgatttttcacggggaaacgggaagggaattggcaaccgtggattacgatccgccgcgcggaaggcttgaggactggggagatggatacggcaaccgcatggatcggtttttggcaggcatcgcctatttggacggcgaaaggccgagccttgtcatggcccgcggctattacacaagaacggtgctagtcgcttacaacttccgagacggcaagctgaccaagctgtggacgtttgacagcgacaagcccggaaatgaaggctatgccgggcagggaaaccatagtctgagcgtcgctgatgtcgacggtgacgggaaagatgagatcatctacggcgcgatggccgttgatcatgacggaacagggctttatacgacagggcttggacacggtgatgccatgcacgtgagcgatcttgacccggaccggccggggctggaagtctttcaggtgcatgaagatccgcgccttccgtacggcctctcatttcgcgatgcgggtacaggggaaattctctggggagtgccggccgatacagatgttgggcggggaatagccgcgcatatcgatccccgctataaaggagcgcttgtctgggcgatcgatccaccgggcaatgaaggaaaatcgtacggcctctatatgagtaagggagaaaagctcagcgatgccgctccggcttcggccaattttgcgatttggtgggacggcgatcttctccgcgagctgcttgaccacgattggaaagaacccgcaggcatccccaaaattgataaatgggactatcacagcggcaggctggtcaatctgctcaccgctgacggaacgctgtctaacaattggacgaaagggacgccagtgcttcaggccaatttgttcggcgattggcgcgaagatgtcgtgttccgcacagtccgaagcgatgctctgcgaatttacacaacgaccgagccgactgaacaccgtttctatacgttcatgcacgatcccgtctaccgcctgggggtagcctggcaaaatgtcgcttacaatcagccgcctcatcccgggttttatgtgggaaccggaatggacaagccgccccggccgaatatttataccgttccttgtaagagaaatgaagaatga

SEQ ID NO: 1531 - DNA, 993 bp, Bacillus licheniformis
atggggtatcaggcgagtgatgtacgctatgaaaatatgaaatacaacctctgcgggcattcaggattaaaactgcctgctttgtctttagggctttggcacaatttcggagaagcggcttccttgcaaaatgccaaagcgctgttaagaaaagcatttgacctgggtatcacccactttgacttggcgaataattacggtccgccgcccggttctgccgaagaaacattcggaaaagcgctgaaaaccgattttgccggctaccgcgatgaaatggtcatcagcacgaaagccggctatacgatgtggcccggaccatacggcgattggggatcaaaaaagtatctcgtggcgagccttgatcaaagtttaaaacgaatgggcatcgattatgtcgatatattttattcacaccgccctgacccccatacaccgctggaagagacgatgggagcgctcgcccacatcgtcaggcaaggaaaagctttatatgtcggtttgtcgaactacagtgctgaacagaccgaaaaggcggctgatattttgcaagaatacgggattccgctcctcatccatcagcccaaatattcaatgttccacagagaaccggaaaaaggcctgctgcaagtgctgcagaaaaaaggagccggggcgatcgcgtttacacctcttgcccaagggcttttaacaacgaaatatttgacagggattcccgccgggtcaagagccgctgatgcgaacagtccgtttttgcaggccgagggcatcacagaagacgtgctcggcaaggtccgcaagctgaatcaagtggctgccgaacgcggccagtctcttccgcaaatggcgatagcctggctattaaaagacccgcgcgtcacctcggtgctgatcggcgcgagcaaaaccgaacagatcgaagaaaatgccgcggcgcttaagtccgctcgattctcagctgaagaactcgacacaattgataaaattctttcataa

SEQ ID NO: 1532 - DNA, 645 bp, Bacillus licheniformis
atgacaatcagcatctatttggccggcgattcgaccgtgcagcattataaggctgattcgcctcagggaggctggggcgaatttctccagtcttatttatccggaaatgtacaggtgatcaaccgggcaatcgggggccggagttcaaaaacgttcgttgaagaaggaagacttgcatctattttggatgtgatcaaacaggatgattggctgttcgttcagatggggcacaatgatgcgtcgaaagacaaaccagaacgctatacagagccgtatacgacgtataaacaatacttgaaaatgtacgttgacggcgcgcgtcaaaaaggggcatcgccgcttctcatcacacctgtcgcaaggctccattacaaagacggcgtctttttaaacgatttcccggactactgcattgcgatgaagcaggtcgcaagcgaagaaaacgtccgcttgatcgatttaatggacaaaagccttcagcattttgcggaaaaaggatacaacgaagtatttaaatattttatgatctcggaaaatgtcaacgactatacacattttacgaaaaaaggggcccgggaaatggcgaagctcgtctcggagggcattcgagagcttgggctgccgtttgtcaaagagacggtatga

SEQ ID NO: 1533 - DNA, 1998 bp, Bacillus licheniformis
atgaagatgaacggaaagctgtaccatggcgcttgcttttatcccgaattgtgggatgaggatgtgctggatgaagatatcaggatgatggagcgaatcgggatcaatgttgtcagaatcggggagtttgcctggtcaaggatggagcctgaaaaaggaaggatcgatgtcggattttttgcagacgtcatccgaaagctccgcgacaacaaaattgaaacggtcatgtgcacgccgactgcgacgccgccgatctggctgacccacgggcacccggaaagaatgcatgtgaatgaaaaaggggagacgatgggacacggttcgaggcagcatgcctgcacaaaccatccctatttcagagagcgggcccggctgatcatcaaacatatcgccaaagagatcggagaactgccgggattgatcggatggcagcttgacaatgaattcaaatgccatgtcgcagaatgcatatgtgaaacgtgccgcacattatggcacaaatggctggaagaccgctatcagacgattgaccgtctgaatgaggcatggggtacgggcgtatggagcgaaacgtatcagtgcttcgagcaagtcccgcagcccggaccgaccccgtttttgcataattcttctttaaggacaatgtatcagctgttttcgatggacaagatttctgaatttgcgcgtgaacaggctgaggtgatcagagcatactccgatgccccgatcacccataatagcagcgtcatgttcggcgttgatcatgaagaccttttcaagagccttgattttgcctcgtttgatacgtacgccagccaggaaaacagtcaagcctttttgtttaattgtgatttatggagaaacatcaaaaaaggacggccgttttggattatggagacgagcccttcctacagcgcttcgcttgaaagctatgcggcgcctcatcaaaacggctatttgaaagctgaagcggtttcttcttatgctcttggcggagccgcgttctgctattggctgtggcgccagcagagagccgggtctgaacagccgcacggatcagtgctcagcgcatggggggagcctgatgtgggatatgaaaatgtgctcgaagccgggcgggcaagacgagaggttgaacacatcatgctggctacggctcctttgcaggctgaaacagctgtcgtctattcggaccgtgcgaaggtgtttttgaaaacggagcctcatcggggtcttcattacagaacgctgatcaccgagttttatgaccgattattaaagatgggcattcacagggatgtcattcttgaagggagcccgctggacggctacaaactgctgtttacgccgtttattcattatcttccccctgcttttatcaaaaaagccgaagcatttgcacaaagcggcggcatttggattgcgggtccgctgacgggcggaagaacagagcaccatacgattcacactgattgcggattggggcctttagaaaaatgttctggtgttaaaacgctgtttacattcccgatggatgagcggaactcaagcggaacggcgtttggcgtaaaggcgccgctgagcttgtggagcgctgtttttgaagccggcggcaccaaggctgtcgggatgattgagaaaggcccggcgtcaggcaaagcgttcatcacggaacacaaatgcggaaaaggcaaaatcgtcatgctcgggtcgatgccggcaggcgaagcgggggacatcatgatgaaaaagctgatcagccattatgccgaagaagcgggcgttgagcagaaaaccgatgtcactcccggaacagtcgtcgcgccccggaaaggagcagacggtcttgtctgggtcgtgatcaatatggacggcaaaggaggcgcagtgacacttgacggcaacggaaccgatcttttatccggcaggcccgtaaccggacgcgtaacactcggcccgcacgactaccgcgtgattttgttatcagagaataaatga

SEQ ID NO: 1534 - DNA, 2592 bp, Bacillus licheniformis
gtgaaagcacaggctgaactaaaatggctgaatagagcgcctgcttcgttcggcggggtgacttggggagtgccttgggcaaaaggagtgctgcaaaaaggggagacggccgtcatcgcttcggaaaacgccccgcatttgcaaacatggccgcttgcatattggcctgacggctcgattaaatggacgggccatgccgcagtattcccagaagaaagcggacgccgatttacattgcaaaaaggaaagcccagcgcgccgaaaaccgtcgtccgtgtcagcgagcagaaagacgaaatcacggtgaatacgggcgcgatagtctgcaagctcggaaagtcggggccggcactgatccgttcgatttccatttccggggaaatgatggcgaaagaaggacggctcatcgctttaaaagaaaaaagaagcggttcagatacacaaagcatgtattatattgaacggtttgagagcttggtcaaacgtgcggcaatcgaacaaaacggtccggtcaagacagtcatcaagattgaaggcgtccaccgcggcggaggcatcgatgtttggctcccttttaccgtcaggctttctttctatgccggtgtcccgtccatccggatcgtgcacacgatcttcatcgactgtaacgcagaaacggaatggatcaaaggactcggtttagagatgagcgcggttttgagcggagcgccaagaaacaggcatattcgctatgcagccgacggaggaatttacggagaggcttctcagctgcttgtgacgagaagatttaatgaaacaaacgggttctatgaacgacagatagccggacagcctgtcccggaagagtcggaagtcgtgcgtgatgcagagaaaaacgccgtctggaacgatttcaagctcattcaggattcccctgttcactggcgcttaaaaaagcgaaccggcaaagactgcgcctgggtggacgcgattcatggggggagagcgaaagggctgatgtatgcaggcggggaaaatggcggcatcgcgctcggcctcagaaacttctttgaaaaatatccatcatcgctcgaagcgcaaggtcttgccagcggcgaaacaaaattgacggcatggttctggccccctgaagctgaagcgatggacttccgccattattcaaaaggcactcacgttgaaagcgcatatgaagggtttgccgaaatgaggtcgacggctgtcggcattgccaatacgagcgaagtcaacctcgcctgtttttcaaatccgccgagtaatgaagagctgaacagagcggcggacgaatggcaaaatcccccattgcttatttgtgagcctgactattattatgacacccgcgctttgggtgtttggagcctgaaagataaacggcgcccgctctcagctgtgcttgaagatcagctggacgaggctctcaagttttacatgaacgaagtcgaacagcggggctggtacggctattggcattacggtgatgtgatgcatacgtacgatgccgtccggcatgtatggcggtatgacctgggcggctatgcatggcaaaacacggaactcgtaccgaacctctggctttggcagtctttttttagatccgggagggaagacatcttcagaatggcagaagcgatgactcgtcacactagcgaaatcgactgctaccatttcggggattataaaggcctcggttcaaggcacaatgtcctccattggggctgcggctgcaaggaagcgagaatcagcatggccggcctccacaagccttattattttttgacggcggatgagagaacgggggaagtgttaaccgaggtgaaagatgccgatcgagcgcttgagatgcttgatccgatgagagcctattatccggaaaaagagttccctgcccacgcgagagttggccccgactgggcggcgttctgttccaattggctgacggaatgggagcggaccggtgatgaagcgtaccttgataaaatcaaccggggaatcggccggctcaaagcgctgcctcttcgtctgctgtccgggccgactttcggatacgatcctaaagcttcagatctgcttcatatgggtgacgggaatcatggcggctatcatatggtcatcgcctttggcgccccgcaaacatggatggagcttgcagaactgctggaggataacgaatggaaggagatgctcggcgaattcggcgaattttatttgctggctgatgaagaaaagcgcaagaggagcggcgggaagcttcacgatgatttatttcactggccgatgttctccgctgccatggccgcttatgctgcgaggcttcaccaagaccggaagcttgccgaaaaagcatggcggctgttgctggacgaaaaacaaagccatacaccgctgccgatcgctccaaaacaagtccatgcgtggaacacgatcacggaaatcccttgggtcacgacaaactgcgtctcacaatggtgcctcaacacaatagccgtgctggagctgctcaaggatatgccgcctgatcaggacatgcaagaaaagatcatcaaagcaatgaaagatcatcccgctcgcgtgtga

SEQ ID NO: 1535 - DNA, 1524 bp, Bacillus licheniformis
atggcaagactgaagctgaagggaaacaagtggctcgctgcacccgctgtctttttgctccttatcgggtgcagtgcaaatgagacgtcgaatcaagacgggaaaggaaaagagaaggatgctattcatattatggctccgctcctctcgccggaaagtccgggagaaaacagtccgtctttaaaagcgctcgaaaaatacacgaaaaaacaaattaaagtgacatgggttccgaactcttcctataatgataaattcaacatcgtcatggcctcgggggatttgccgcaagccattgtcgtcacggacaagtcgccgggttttatcaagtctgtcaaatcaggcgcgttctgggagctttcaccttatttaaaagactacccgaaccttggaaaggccgatgagaaagtgatgaagaacagttccattaacggcgagatttacggcatttacagggcgagggacctcatccgcgcttcgattatcatcagaacggactggctcgaaaatgtcggcctggagatgccgaaaacaatcgacgaattttacgacgtactgaaagcgtttaaagaaaaagaccccgacggaaacggaaaggacgatacgtacggcatggtagtcccgaaatggatggggctaggcaacgggagcccatgggatattatgcagacatggttcggtgctccaaaccgctacggagtagacgaaaaaggggaactcattccggacttcacaacagaagaatatatggaagcgctgcgttttttcaaaaagctgtatgatgaggggctgatcaataaagacttcgccgtaatggattcagcgaagtggaacgatccggtcgtcaaagggaaagctggtgtgatcgtcgataccggttcgcgggcatcgcagatacaaagcgcaatggaggaagcagatcccggaaacaaggatgtgatcgatgtcatcggaacggtcaaaggcccgaaaggaacgtatacattcccgacatcaggatacgccggaatgattgccatcccgaaagcgagcgtcaaaacggaaaaagaactaaaagaagtgctcggcttcttggacaaaatgaacgatgaagaggcacagatcattgccaataacggcgtaaaagggcgcaactataagcttgaaaacggtgcgtacacgtcccttgaaaaaaacaacaaaaaactgctttacgagcacgagggtcttgcgcagttcagcatgggcattccggaacaaagatactatgtggaaaagcaagaattaaagctgtttaaacaccgtgaacagattcgcaaagaaggggagaaaatcgccgtattcaacccggcagaatcgctcgtttcagatgtatacacccaaaaaggggcacagcttgacaacatcatcctcgatgccaaaacacagtttatcatcggcgacatcgatgaaaaaggctttcaagacgccgttgagctttggtataaaagcgggggcgaagatttgatgaaagaactgaacaaacgctacaaggagactaaatag

SEQ ID NO: 1536 - DNA, 954 bp, Bacillus licheniformis
atggaaatcaccgcaaaaacagggaagcccgctgttaagacagaaaagaaaccgactgggctagaggccgtaaaacgggataaatggctttatcttctgcttgttcccggtgttttatattttctcatatttaaatattggccgatgtggggcgtattaatcgccttcaaggattattcgccttatctcggattttggcagagcgaatgggtcggattcgagtattttaaagatttctttatgaatcctgacttcttccgtctgctccgaaacacgcttatgctggccgctctcgatttgatctttgcatttccggccccgctcattgtcgctcttttactgaatgaactgcggcacgccatctataaacggtgcattcagacgtttatatatgttccgcatttcgtctcatggacgatcgtcgtcagcataacgtttgtctttttcacggttgatacgggcgtgatgaataaagtgctgcaaagcataacgggccgagagattgcgtttctctcagatcccgaatggttcaggccgatgattgtgctgcaaagcatatggaaggagacgggctggggaacgatcctgtttctggcggcgctcgcttcggttgaccaagagcagtatgaagcggcagtgatggacggtgcaggaaggttgaggagaatgtggcacattacccttccggccatcagaagcacgatcgtcgtgcttctcatcttaagaatcggcagctttttgaacatcggcttcgaacagatttttttaatgaccaattccttaaaccggagcgtagctgaaatcttcgacacatatgtctatgttgtcggaatcacgcagggcgcatacagctacagtacggcagtcggtcttttcaaatcggttgtcgggatcatcctgatattctgcgccaactatatcgcgaaaaagtttgaccaggacggtctgttttaa

SEQ ID NO: 1537 - DNA, 885 bp, Bacillus licheniformis
atgtccggtgcggaaacgatccataacacaaaagcgggccgggtgttcgattggtttaatgtgatctttctcggctgctgcggactgataaccgtcttgccttttctgtatattatcgcggggtcatttgcgacggaggccgagctggcggaaaggagcttctttatctttcccgagacgttctcgcttgacgcgtaccgctatattttttcaacgccgacatttatcaggagcatgggggtgtctgtgcttataacggtcgtgggaacgatcgtccagctcttttttacatttacgatggcctatcctcttgcaaaacggcacatcaagggaaggaatctgcttttgaatctcgtcatttttgcgatgcttttcagcggaggaatgattccgacgtatatcgtcgtcaaatcactgggactgctcgattcctattgggcgctgattttgccgatggcgatcaacccgttcaatctcattattattaaaaacttttttcagcagcttccgaaagagcttgaggagtcggccaagattgacggctgttcagaaatcggcgtgttcttaaggatcgcactgccgctgtctaagccgattattgcgacttttgcgctgttttatgcggtcggcatttggaacgactttttccatgctttgctgtacatcaatgacagtgcgaaatggccgctgcaaatggtgctgcgccaagtgacgattctttcggatctgacggggacgacgaatgatatgatggaaacggtgccgcctgaacaatcgatcaaactggccgtcatcgtcattgcgacgcttccgattttagccgtgtacccgtttttgcagaagcattttgccaaaggcattctgatcgggtctgtgaagggataa

SEQ ID NO: 1538 - DNA, 1329 bp, Bacillus licheniformis
atgaatgcagaagcaaacggactaaaaaaagagataggcttgttatttgcgctatctcttgtgattggaacgatcatcggttccggcgtgtttatgaagcccggcagcgtgctttcctattccggaaacgcacaaatcgctcttttcgcctggcttctcggcggaatcttgacgcttgccggcgggctgaccatcgctgaactgggcgcacagattccgaaaacaggcggtctttacacatatcttgaagaaatttacggcgagttctggggcttcttatgcggctgggtgcagatcatcatctacggaccggccatcatcggcgcacttggattatatttcggctcgcttgtggccaacttgttttcctgggataaatcctggactgcactcatcggcatcatcaccgtcgcctttttatgcatcgtcaacatcgtcggaacaaaatacggcggagcggttcagacgatcacaacgatcggaaagctgattcccattgtatgtatcattgtgttcggtctatggcagggcgatgaatatattttcagttcggtcacggagagcatcgccagccaaaacttcggggcggcggtattggcgacgctattcgcgtatgacggctggatccttcttgcagcactcggcggagaaatgaagaatccggaaaaagtgcttccgaaagcgatgacaggcggcatactgatcgtcactgcctgctatctgttcattaacttggcgctgcttcacattcttcctgccgatcagattgtcaagctcggcgaaaatgcgacaagcacagccgcgaccatgctgttcgggccgctcggcggcaagctgatatccatcggaattatcgtcagcatcttcggctgcttaaacggaaaggttctgtcttttccgcgcgtgatctttgcgatggctgagaaaaaacagctgcctttctcccgctggatctcgcatgttcatccggcattccatacgccttggatcgcagtcatcgtccagatgattatcgctgtcattttaatgatcatcagcaatcctgaaaagctgtcagaggtttcgatttttatgatttacatcttctatgtcatggcgtttttcgcggtatttattttgcggagacggaagaacggccaaggaagatcttacagcgtgccgctctatccttacctgcctgtagcggcgattctcgggtcattgtttgtccttgtcagcacgctcatcacagacttctacagctgcctgtggtcgatcttgatcggtctcgtcggtctcccggtttatttttggatgaaaaaaagaaataaaaacggctcagctgcctga

SEQ ID NO: 1539 - DNA, 150 bp, Bacillus licheniformis
atgatttttgatatattgttagtttttataggagagggagggaggcccgaccgggaagacggtttggttgacttttcaaatcaaatcgcctattttggagaaagaataaatctcgaattcgagatatttaattgggagatgatagaatga

SEQ ID NO: 1540 - DNA, 954 bp, Bacillus licheniformis
atgaacgtaaatggcattcaccacgtatctgctttaacagcaaacgcccagcataacctggatttctatgtcaaagggcttggcatgaaactgataaagaaatcggtcaatcaggacgatccgaccatgtaccacttgttttacggggatgaagtcgcgtctccgggttcggatttgacatttttcgagattccgatgcttgcccggagacgggaagggacgaactgtatttcggccgtatcacttcgggttcccggtgaacaagcactcgaattttgggagaagcggcttcatgagctcggcacagagatttgcggcatcgagacgcgtgcggggcggagcattctccgctttttagatcatgaaggacagaacatgatgtttgtagctgatgaaaagggaaaagaccatggagtgcctgtgaaaaacggcgtcattcctgaggatgctgcaatcagggggctcggcccggtcgaactgactgtcagggacgccggtccgacggcggcggtgctgaccgatattctcggctttcataaaatcggtgaggaacaggctgacgaatccggccaaacgcttcacatatttgaatcgggtgaaggaggagcaggcacggaggtgcatgtgaaacagtcagatgacggcagaagagagcgtcccggaagaggaagcgtccatcatgtcgctttccgcgtcaaagatgaagaagaacttaagcagtggcatgagataatcagtgagaacggcttttcgaattcagggattgtggaacgctattattttaaggcgctgtatttcagagaaccgaacggcatactttttgaactgtcgactgacggtcctggctttgccgttgatgaatcaattgatgagctcggccaaagccttgcccttccgccgtatctcgagcatcggcggaaagagattgaagcgcggctgaaaccgatccgataa

SEQ ID NO: 1541 - DNA, 363 bp, Bacillus licheniformis
atgaatactgtcagccaagaaatccaagatttgtccattaaatctttggaatcaacttttaataaactaacaaatgcttataaaagcacgacagaaaaaggttcaaacacaactcttgtcaaaaagagactaaacgcagtgaaaattggtttagaaagcctaaaaggtacttggtatggagaagatttcggctataacgaagaaatcatattgactactaaaaaagttttaaaaggtatcattccatctattgaaaaacaaatagcaaaagcaaaagaaggcagtcctcaaaaaacattaaatgagcgtcgcctgactgcactaaaactggcaatcgaatctttggagaaccgtcttatataa

SEQ ID NO: 1542 - DNA, 1299 bp, Bacillus licheniformis
atggaatataatagagaagatcagcttgaaacaaaaaacgaactcatcgtctccgatcaaaagcccgaccaggcgataaaaaaagcagaacagcaaaagcggagactctcgtggatgacgccgattctcagcggcatcatcggaggaagcctcgttctcggcgtcacgacataccagcatagcatagacgaaacggccaatacatccgtccagacgcaaacaaacgagacgtcgaactcatcggcttcttccactaaagcgaataccgaaaaattgtccagcaccaattcgtccgacatttctacaatggttgaaaatgtatctcccgccatcgtcggtatttcaaactatcaaaaacaaacagagagcggtatgttcggttttgaaagcaacagcagcagctcaagcgaacaagaaacaggcacaggctcaggtgtcatctataaaaaagcaaacggcaaagcatatattattacaaataaccacgttgtcgaaggcgcgtctaaactgacggtttccctgtccaacggcaaagaagtggaaggtaaattgctgggcagcgattcgttgacagaccttgccgttgttgaaatttccgctgatcacgtggaaaaagtcgcctctttcggcgattcgtcaagcttgaaagcaggcgaatcggtgatcgctattggaaacccgctcggcaaagatctgtcccgcacggtgacacaaggcatcatcagcggtgttgatcggaccgtttccgtagatacatccgcaggccaaaccgagatgaacgtcattcaaaccgacgcggccatcaaccccggcaacagcggaggcgcccttttgaatacaaagggtgaagtgatcggcatcaacagcatgaaaatcagtgaaagcggagtagaaggcatcggatttgcgattccaagcaatgatgtcaaaccgattgcagaagagctgatgtctaaaggaaaaattgagcgcccgttcatcggaatcggaatgatggatcttgagcaggtgccggaaaactatcaaacaggcacgctcggattaagcggcagccagttaaacaaaggcgtctacatccgccaggtcgcttcaggctccccagctgaaaaagcgggccttaaagagaacgatgtcatcgtcagctttaacggaaaagaaaccgatacaggaagcgcgctgcgcaaccttctttacaacgatgcaaaaatcggggatacggtaaaggttaccctcattcgaaacggcaaaaccatgacaaaacaaatcacccttgaccagaaagaatccgcatcatcttaa

SEQ ID NO: 1543 - DNA, 813 bp, Bacillus licheniformis
ttgaacaagattggatttatcggatacggaagcatggcccggatgattgcggtgaaactgctagatcaggggaaaatcagggatgacatggtggtcgtcagctcaaggaatgacgggaaaacagaggagctgaaaaagctttatccgaatgtcgcctgtcaatcagctgatgagctcgccaaacagtgcggcctgatcttcatctgtgtaccgccgatggcggtaaaagaaacgcttgaaaaaatacagccgtttcttcaggaggatgtccacatcgtttcgattgccgcgggggtcgagcttgaccggcttcacgactggacaagcggacaggtgacgagatacattccgacactcacatctgaagccgggatcggcgtttcgcttgttgtccacggcgagcgggtcgctgaggcggacaaaagccggctggaagaatatctttccgccttcagcacagtcaaacagatcaatgagagagatattgacgctgcgagcaatttaacaagctcttcaccggggttcatcgcttcgatttttgaagaatttgctcaagccgccgtcagaaacagcagcctcacggaagaagaagcgtttcaatttctgattcattcattgctgggaacaggcaagctgttaatggaaaaagacatgacgtttgctcaaacgcttgatcgggtggcgacaaaaggcggcataaccgcagaaggtgcggaagtcattcaagatgccatgccggaagtctttgacgagctgtttgccagaacgatgaagaaatatgaagtcatcaaagacgctgtccgccggcagtga

SEQ ID NO: 1544 - DNA, 825 bp, Bacillus licheniformis
gtgaagctgtatatgtctgttgatatggaggggatttccgggcttccggatgatacgttcgtcgattcaagcaagccgaactatgagagaggccggaagatcatgacggacgaggccaatcatgtgattgacgaagcgttcaaaaatggatgcagagaggtgattgttaatgacagccactctaaaatgaacaacctgttaattgagaggctccatcctgaagcgcggcttatttcgggagatgtcaagccgttttcgatggttcaggggcttgatgatacatacgacggagccgtgttcgtcggctaccatgcgagagcgtcgatgagaggcgtgatgtcgcacagcatgattttcggcgtcagacatttttacatcaacgatcaggcggtcggcgagctggggttcaacgcctatgttgccggttattacggcgtcccggtcatcatggctgccggtgacagcgaggcggcagctgaggcggaggagctgattccgaacgtaacgacagcagccgtcaaagaaacggtctcccgttcggcggtcaaatgtctgacgccggagaaagcggggcggctattaagagaacggatggcatatgcgattcaaaaccgcggtcaagtcaagccgctcacacctccggacaggccggtgctgcggatagaatttgccaattacggccaagccgagtgggccagtctgatgccgggtgctgaaatcgaaccgcaaacgacgactgtccgctatcaagcgaaagacattcttgaagcctatcaagcgatgcttgtcatgaccgagcttgcgatgagaacgacattctcctag

SEQ ID NO: 1545 - DNA, 927 bp, Bacillus licheniformis
atggcgggttacatcatgaagcggctgctgtggatgctggcaaccattttggtgatcacgacattgacctttgtgatgatgaaagtgattccgggctctcccttcaatgaagaaagaaatacgaacgaagcggttcagcgcaaccttgaggcttactatcagctggatgagcctctctttgttcaatatttgtactatgtaaagtcgatcgttacctttgatttcgggccgtcgatcaagcagccttcgcaaagcgtgaacgacttgctgtcaagaggatttcccgtttcgtttgagctggggatgacggcgcttattgtggcggtcatttccggaatcgcactcggaatctttgctgcgctgcggcaaaacggcatcatcgactatatagcgatgaccattgccgtactcggcatttcggttcccaactttattatggcaaccttgctgatacagcaatttgccgttaattggaacatattccctccgtcgacatggacgagcccgcttcatatggtgcttccgactgcggctttggcgatggggccgctggcgattatcgcaaggctgacccgatccagcatgatcgaagtgctgacgcaggattatatccgaacagcccgggctaaagggctttccccttttaaaattgtcatgaagcacgccctgaaaaacgcccttatgcctgttgtaacgattctcgggacgcttaccgctgcgattttaacggggagcttcgtcatcgaaaaaatctttgcgattccgggcatgggaaaatattttgttgaaagcatcaactcccgcgattaccccgtgattatgggcaccaccgttttttacagcatcatcctcatcatcatgttgtttctcgttgacatggcctacggaatactggatccgcgtattaaactgcataagaaagggtga

SEQ ID NO: 1546 - DNA, 960 bp, Bacillus licheniformis
atgagccttccagtccgcacagaaaaagaagcgtcttcaggcagtgatatccctgttgaatggtttgccccgctgaaacagaagcaggatgagcgtgaatccgtcgcaaggccgagtctgtcatattggcagaacgcctggcggattttaaggaaaaacaagctggcgatggcgggattgggcgtgttaatcttcctgttcttcatggctgctctcggaccggttctttctccgcacagcgtcacccagcagacgctatccgagcaaaacctgcctccgtcgacggagcattggttcggaactgatgagctcggacgcgatgtgtttacaagaacgtggtacggagcgaggatttctctgtttgtcggtgttatggcggctttgatcgattttgcaatcggcgtcatctacggcggcatcgccggctataaaggcggcaaaacagaccacgccatgatgcgggtcatcgaagtgctgcacggactgccttatttattggtcgtcattcttctcatggtcatgatggggcctggactcgggacgatcctcgtcgcgctgactgtcaccggctgggtcggcatggcgcggatcgtcagggggcaggttttgaaggtgaagcatgatgagcatgttctcgcatccaaaaccttcggagcgaaaacggtaaggatcatcaggcggaatctgcttcctaacatgatgggagcgatcatcgtccagatgaccttgacggtgccgtcggccatttttgccgaggcatttctcagtttcctcggtttgggcattcaagccccgtttgcgagctggggtgtcatggcgaacgacggccttccggtgatcttgtcgggacactggtggcggctgttttctcccgctttctttatttcattaactatgttcgcctttaatgttgttggagacggactgcaggatgcgttagatccgaagctgaggaggtaa

SEQ ID NO: 1547 - DNA, 1032 bp, Bacillus licheniformis
ttgcggaaaaaagtattggaagtcgagaatttgcatgtttcatttacgacatacggcggaacggtcaaagccgtccgcggcgtgagctttgagttatatgagggggagacgtttgcgattgtcggcgagtcgggatgcggaaaaagcgtgacatcgcaaagcatcatgcggcttttgccgaagtttcggcaacggtcacaggacggtgcgatccgctttaagggaaaagacttgcgccacctgtccgaaaaagagatgagaaagatcagaggggccgaaatctcaatgatcttccaggatccgatgacggccctgaatccgaccttgaccgtcggagaccagctggcagaagcgctgttggaacatcggcccgtgtctaaaacagacgctcgaaaagcagtcatttcgatgcttgagctcgtcgggatcccgaatccgaaagagcgtttgaggcagtatccgcaccaattcagcggagggatgaggcagcggatcgtaatcgccatggcgctcatctgcgaaccggagattttgattgcggatgaaccgacgaccgcgcttgatgtcaccattcaggcgcaaattcttgagctttttaaagacattcagcggaaaaccggggtatccatcattttaatcacccatgatttgggcgtagtcgcacagacggcagacagaatcgccgtgatgtacgcagggaaaatagctgaaacgggagcgaggagggatattttttaccgtccgcagcacccgtatacaaaaggcttgctgcactccgttccgaggcttgaccttgaagatgcagacctcgttccgattgacggaacaccgccggatttgttttctccgcctgaaggatgtccctttacggcgcgctgttcccgcgcaatggaagtgtgcggcaaaatccatcctgccgttacagaagtctcggcgggtcaccgagtgtgctgctggcttcaggatgaaagggcaaaaagggctctgctgacacataatcataaaatcgatttttcaaatggggggatttga

SEQ ID NO: 1548 - DNA, 1626 bp, Bacillus licheniformis
atgaaaaggctgacgagcgtgttggcttccgcatttgcggtcatcctgctgttcggatgtacggcaaatgaacaggcggggcaggaaacgaagaagaaagcgaaagaaacggctggagaacaggttctgaggctgaacaacgaaaatgaaccgacatcttttgatccgccgatcggctttaataatgtctcatggcaggcgctgaacaatctgatggaaggtttgacaagacttggcgcagaccatgagcccgaagcggcgtccgccgaaaagtggaacatttccgacgacgggaagacatatacttttacaatccgtgatgatgccaaatggtcaaacggagaccctttaaccgccggggattttgaatatgcgtggaagcgtctgctcgatccgaaaacgggctcctctgccgcgtttttaggctactttatcgaaggcggtgaggcctttaacagcggaaaaggttcaaaagatgatgtcaaagtcaaagcggtggatgaaaagacgcttaaggtgacgcttgaaagtccgcagcagtcgtttttaagcattgtagccaatccggcctttttcccggttcctcagaaaatcgccgaagacaatccgaaatggcatgaagaagcagccacattcgtcggcaacggtccgtttaagctggcagaatggaagcacgatgaaagctttacgatggtaaagagcgatacgtattgggaccgggatactgtgaagcttgataaagtgacatgggcgatggtcgatgaccgaaataccgactaccaaatgttcgagtcgaatgaacttgatacggcttatgtcccggctgaaatgagcgagaagctgatgggctctgatgaggtgaaggtgtttgatcaggcgggtctttatttttacaggttcaatgtcaataaagagccgttccagaatgaaaaaatcagaaaagcgtttgcgatggccgtcgatcagcaggaaatcgtcgattacgtcacgaaaaacggtgaaaaaccggcacgcggatttgtgtctccgggaatcaaagggccgaacggcaaggattttcgcgaggaaggcggcgatttgctcaaatataacgccgatgaagcgaaacagctgctcgaaaaaggcatgaaggaggaaaactacgaaaagctgcccgccgttaccttgacatacagcacaaaaccggagcataaaaaaatggcggaagcggttcagcaaaaactgaaaagtacgctcggcgtcgatgtgaagctcgccaatatggaatggaacacattccttgaagaacagaaggcgctcaagttccagttttcccaaagctcttttctggctgattatgcggatcctatcaacttcctggaaagctttcaaacgggtaacgcaatgaacagaaccggctggggcaattcagagtatgacgagctgatcaaggcggcgaaaaatgaagctgatgaagaaaagcgcactgagctgctgcatcaggctgaagaactgctgtttgaagggatgccgatcataccgatccacttctataatcaagtccatttggaaaaggagaatgtgaaaggcatcgtccgtcatcctgtcggctacattgaactgaaatgggccgaaaaaacgtcatga

SEQ ID NO: 1549 - DNA, 924 bp, Bacillus licheniformis
ttgaatattgcgcctcaaagattaatgaagggagatacggttggtgtgattgcgccggccagtccgcccgttcctgaaaagcttgaccgggccgtccggtttttaaaagagcttggacttgaagtcaaagtgggacgctcagccgccgaaagacacggctatttggcggggagcgatgaagagcgtctgggggatctgcacgacatgtttgaagaccgttcggttaaggctgtcatctgtgcctgcggaggttacggaacggcacggattgccgggaaaattgactaccggctcatcaaaagccgcccgaaaattttttggggctattcagatatcacttttttacatacagcgatcaggcaaaataccggacttattacatttcacggaccgatgctcagttctgacatcggcaaagatgacgtgcatccgcttacccgccgctcctttcagcagctgtttcaaaaaatgacgctctcttatacagaggaactgtcgcctttggaaacgctcgtacacggcgcggcggaaggggagctcgtcggcggaaacctcgctcttctggtgacgacgctcggtacgccttatgaaattgatacgaaaggaaagcttttgtttatcgaggatgtcgatgaagagccttatcgaatcgaccggatgctgaatcaattaaaaatggccgggaaattatcggacgccgccggcatcctgctgtgcgattttcataactgcatcccgaaaaaacgcgataagtcgctcacattaaaagaggttttccaagattatatcgcctctgaaggaaaaccggcgctgtccggctttaaaatcggccattgttcaccgaatatcgccgtaccggtaggagtgaaagccgtccttgacgccggcaaaaaacggctcaccatcgaaccgggaatttcttaa

SEQ ID NO: 1550 - DNA, 1098 bp, Bacillus licheniformis
atgaagattgccgagattacgacaaaccgcatcgccgttccgctgaaaaaaccttttaaaacagcgcttcgaaccgtccgcaccgcagaagccgtcattgtcaaagtaacggctgaaaacgggatgacaggctggggagaagcgcctccgactgctgttattaccggtgagacgcttgacagtattgagggggcagtcaacacgattctcgcacccgccctcaccgggtgcaacttgcgaatggctgaggcgatatttcatgatatcgacaagctgattgttggaaatacaagcgcaaaggccgctgtagaaacagccgtctacgattgcttggcgcagctttgcggtcttcccctgtatcaattgctgggaggatacagacgggagatcgagacggattttaccgtcagcgtcaatgacccggaagaaatggggaaagacgcggcccgctatgtacaggaagggtttcgcacgctcaaaattaaggttggaaaaaacgacatggcaacagacctcgaacggatcagggaaatccgcaaacaagcgggtcccgctgtccgaatccgcgtggacgccaatcaaggctggacggcgaaacaggcggtcaaagccattcggaaaatggaggatgaggggctttcgatcgagcttgtcgaacagccggtccaccggctcgatctcgaaggcttgaaacaggtgacagatgccgtcgatacgccgattatggcggacgaaagcgtgtttaccccaagggatgcttttcacgtgctgaaaacgagaagcgccgatctcatcaatattaaactgatgaaggcaggcggcatccgccaggcgctgaaaatcaacgccatggcagaagcgtgcggagtggaatgcatggccggaagcatgatcgagacaaggctcggcatcacagcggccgtccacttcgcagcaagccagaaaaatgtgacaaaattcgattttgatgcgccgctcatgctgaaggaggatatcgttgaaggcggcatccgctatcatgcaggaacgatcacgataccggatgctcccggactcggaatcacgaaagtctgccatgaggggggagaggacaaatga

SEQ ID NO: 1551 - DNA, 888 bp, Bacillus licheniformis
atgagcctttatacgacagccgtctcagtcgccaatgtctggaccagtccggaagcgccgcgcacaattgaccggatgatgctgtcaaaccctgtacatgtgagaagctggcttgacgaattgtcctacgaggagcgccttgagctatgtacggcaaaccttgttcaaacgcaagtgcttttcggcgaagatgtccaacttataaaggagcggggagactgggcgttcgtcatcattccgggacagccgtctgcaaaagacaaacgcggctacccgggctggattccaaaggactgcctggtcgaaaaaagcccggcgaagtctgagacaagcgccgttattcaaaaaccgacggctttcttatatgatgacaagaaaacgaaagttattgagctgagctttctcaccaagctgcccgtcttgtcttccggcggcgtctggtttgaggtcgatacaccgcttggccgcaaatggctgaaaaaagaagatgcggatctcgaaacacctgtaaaaggcagcggagacgatatcgttcaaaccggtcaggcgtttttgaacctgccctatctttggggagggatgagcgggtttggctacgactgctcaggatttgtcttcaatatgctgaaggcgaacggccgctccgcgccgcgcgatgccggcgaccaggcgaaaggcggaaaagaggtatccttcagcagcccgaagcggggcgatttactgtttttcgcatatgaagaaggcagaggacgggttcaccacgtcggcatttactgcggaaacggagagatgcttcactctccaaaaacgggcaaatcgatcgaggtcatatctcttaaaggtacaatttatgaaaaagagctgtgtgccatcaggcgctatttttaa

SEQ ID NO: 1552 - DNA, 1014 bp, Bacillus licheniformis
atgcaaaccggcgctttattgaaagtcagccgtctgaaaatgcactttgacgccggaaggggcaaaacggtcaaagcggtcgacggcatttcatttgatattaaagaaggagagacgttcgggctcgtcggagaatcgggctgcggcaagtcgacatccggaagagtgctgatgcgtctttatcagccgacagaaggcgaggttacatatcgggggaaaaacatccaccatttgagcgatgatgaatcattccagtacaaccgcaaaattcaaatgatttttcaagacccgtatgcttcattaaatccgaggttaaccgtcagggagattatgacagaacctatggaaatccacggcctctacggagggaaaaaggcgcgtcttgaaaaggcggacgagcttctggaagcagtcggtctgcacaaaagctttgccaatcgctatcctcatgaattcagcggcggacagaggcaaagaatcggcatcgccagagcgcttgcgcttgaacctgaattcatcgtcgccgatgagccgatatcggcacttgacgtctccgtgcaagcgcaggtcgtcaaccttttaaaaaagctgcaaaaggaaaaagggctcacgtttttatttatcgcccacgatctttccatggtgaagcacatcagcgaccggatcggcgtcatgtatctcgggcacatggtcgagatcaccgacagcggccggctttatcaagaacctctgcatccttacacccaggcgcttttatcagctatcccgattcccgatccggatgtggaagacaagcggagacgaatcatactgaaaggcgagctgccaagtccgatcgatccgccgagcggctgcgttttcagaacgaggtgtcctgccgcgatggacatttgcgccgccaaaaagccgatgttaaaagaagccgacgacggtcattttgtcgcctgccatctgtatgacggagacgcaaggaaagaggaggccggcttgaaggtgacgctgcaggcgaggtga

SEQ ID NO: 1553 - DNA, 888 bp, Bacillus licheniformis
atggactcagcattatcgaaaaaaaaccgcggggcgggctgtacaagcgaatacgacgtcttaaaaaaagtcgtgttatgcagaccggagtatatggagatcgcagaagtgatcaatgaaacacagaagtattttcaaaaggataatatcgataaaacgctggccgtccgccagcataatacattgataaaagaattggagagccggggtattgaagtcgtgattctgcctgctttaagccaatttccggaacaggttttcacgcgcgatatcgggtttacgatcggaggcactgtgttttccgcgcagctttcagccgacatccgccagggcgaagaaaatgtcctgcaggaatggctggcaaaagaacaaatctcctggaccgcatttaatgaaggctatcaaatcgaaggcggcgacatcctcgtcgaccaaaataccatatatgccggcatcagccacagaacgacgttctcggccgtccaagagctgaagcgcaggcttccctcttatgaagtcataccggttccgtttgaagaaacgttccttcatctggattgcgtcttcaacattctttcgccgacagaagcgcttgtctatccaaaagccttaggagaaagtgaatacgacgtcttgaaaaagcgctatgagatgatcgaaattacggatgatgaacagttccaactcggtacaaacgttctgtccatcggcaataaaaccgtgatcagcctgcctgttaaccgccacgtgaatcaggagctcagaaaaaggggctatacggtcatcgaaatcgacttatccgagatcataaaatcaggcggatcattcagatgctgtactctgccgattgagcgtacttccactgaatgttacaaaggcggcgcctga

SEQ ID NO: 1554 - DNA, 519 bp, Bacillus licheniformis
atgaatggacctgaaaagagatactgcaaagaatcaaaagttgtcaaaacaagcagggtatttccgcttgatacgaacaatcacaacaccttgttcggcggcaagctgatgagctatatcgacgatatcgcttcgatttcggcagcgagacactcgaggtgtgaaaccgtgacagcttcaatggattccgtcgattttctcgaaccgatccgccaggaggattcagtctgccttgaatcttatgtgacatgggtcggcagaacgtcaatggaggtattcgtcaaagtcattaaagagcatttgctgacaggcgaacgaaagcttgcggcgacatcctttttaacctttgtggcgcttgatcaggacggcaatcctcaggccgttccccaagttgtaccgcagtctgaagaagaaatcatgctgcacgagaccgcccggcagcgcgccgaagaacggaaaaaccatcgcaaacacagcaaagcgctggcccaggcgctggctgttgacaaaccttggtaa

SEQ ID NO: 1555 - DNA, 735 bp, Bacillus licheniformis
atgcttgaatttgtatggacttttttagccaagcctgctttagtgttctctatagcttatattcttttccgaatcgcagggaagaaagccgtttcgcaaatgacgaacttcgaccttttgctgacatttgcgattggaacgatcatcagcgaaccgattcttacttctaaaatttcaatgtccatttattacgcgcttacctttctgatcttctatttgttgattgaaaagctgtcattacacaataaatggcgatggtttcttgtcgtcagtccgaccgtgctgatccgaaacggcaatattgataaaggaggattaaaaagagagcggctgactgtcaatgaactgctcggcaaattgcgcgaaaaaggctatgccgacccaaaagatatcgacctcgccctgattgaagaatcgggccagatcagcgtgattcccaaatcggaagcaaggcctgtacagccgcgggacctcaacttggagacgaagcggaatttcgtgccgattccgctcattttagacggcgaaattatcgaacacaatttaaaatacttgaaaaaaacgaaagaatggctgtttcaaaaattagaggataaagggattgagcaagcgatgctgccaaccattacgctcggcaccttgaacgaaaaaaatgaaattataattgatacggaagatcccggcagcccgttaacccatgacccgtatctctataaaccggggcaagaccattaa

SEQ ID NO: 1556 - DNA, 114 bp, Bacillus licheniformis
atggtgtcacaaaaaataggaggaaaatatgttgttttctgtatttttatagcatatattagtttttgtgaaaaaattttgatggtaggtgcaattgatgaaaaggttttttag

SEQ ID NO: 1557 - DNA, 1308 bp, Bacillus licheniformis
atgaaaaggttttttagtgtaataattttaggcgccctgctgctgctcgggacatctgcgccaatcgaagcggcagactacggacgcgacgtcctcggctcaaaagacggctggggcgcttatggaaaaggaacgaccggaggcgctgacgcttcttctgatcaggtatatacggtcaaaaaccgcaagcagcttgttgaggcattagggggagacaataaaaagaacagcgaaaatgatacgccgaagatcatctatgtgaagggaacaatcaatcttagtgttgatgatgacaacaatcctttaggctatgaagattataaagaccccgaatattcgatcgaagcgtatctcaaagcttatgatccgaagaaatgggggaaaaaggagccgacaggaaagcttgaagaggcaaggctccgctcgaaagataatcaaaaggaacgggtcttgatcagagtcggttcgaacacaacgattatcgggctcggagatgatgcgaaaatcgtcggcggaggcctttatgtcaaaaacgcggaaaacgtcattatccgcaatatcgaattcgaaaacgcgtacgatttcttccctggctgggatccgacggatgggagcagcggtaactggaattcagaatatgacaacctgctgatcgaaatgtccaaaaatatttggatcgaccactgctcattcaatgacggagatcagcctgatgagctgactgaaacgcatttcgggcgcgaattccagcatcacgacggactgcttgatatcaaaaagcagtcggatttcattacggtgtcatacagcatattttcaggacattctaaaaacacgattatcggatcaagcgacagctacaaagcagacaacgggcatttaagggtgacattccaccacaatctctacgaaaatataaaagagcgggcaccgcgcgtccgctacggaaaagtgcacatttacaacaactattttaaaagcacgaaagacagctacaattattcatggggcgtaggctattcttcaaaaatttatgctgaggacaactactttgacctgccggaaggaacgaagcctcaaaaactgatgaaggtctttaaaggtgacgctttatatgaaaaagatacgatcgtaaacaaccaaaaaagcgtcgcaaaaattgatgttgtcagcacatacaacaaagcaaacaatgcgtctattaaaaaatcggccggctggaagccgacgctgtttgaaaaaatcgacgacgcagaagatgtgccggcaatcgttgaagcgcacgcaggcgcaggaaaactgaagtaa

SEQ ID NO: 1558 - DNA, 333 bp, Bacillus licheniformis
atgagttcaacgcaaatgctgaaagggattttagaaggatgtctgcttgccgttatatcagaaggggagatatacggctatgaaatgacaaaggtgcttgcgggatacggtttttcggatatcagcgaaggaagcatctatccgattctcctccgcatgcaaaaggaaaaatgggtggagaccgaactaaaacggtcggcgagcggcccgaagagaaaatattacagacttacaccccttggagaagcggagcttcaatcgttcatcgaccgttggaaagcattatccgggaacgtcaatgcactgctcgaaaaaaaactgaaggagaagtga

SEQ ID NO: 1559 - DNA, 750 bp, Bacillus licheniformis
gtgctatcaaaggacatgcaaaacgtattggacgagatgagaatctacttaatgtcttcaggaaaaagcgacaaagaaatcgaaggaatcatgaatgagctaaccgttcatgcctgggaaggagaaaaggacggaaaaaccgtccggcaaatttttggggattctcccaagtcatatgttcaagcgctgtcaaaagagctttcatcaaggccaggggagatcgccaagttgttctttgccattttaatcggcgcaatatcctattttatattcagcgacgccgtgaacgacagcctcgattattctgtctatacgctggcaggctatccgctttatattttgctggcagcggctatgttgccgcttttgggccggattacagcatttaaagggaagaatacggccttcatgtatacgatggtgtacgccgctttgacgttttttccgattttggccattatttttattgaccggcaattcgggacaccggttttttcgtttgatgggggaagccgctggctgattatggccctgtcgtttcttgtgatcgtatgtttgtctttcaggttgaaagccggagccttgtccatattgccgctgcttttagccggaacgcattttttgtttcagtatatgaactgggattcagcaggagccatgatggcagaaacttatattccctatatcgggctgcttctcgtcatgtttattgaaacaaagcgtgccagaaatacggctcaatatgaatga

SEQ ID NO: 1560 - DNA, 501 bp, Bacillus licheniformis
atggatatgatgtggggctatgtactcgtctttattttggctgcgattccgtggtttgaagtgatcggtgtcgtgccgctagcgatcattgccgggcttaaacctgttccgtccgctattatcgcgctattaggaaatctattaaccgtactgctgcttatttttttaattgacaaagtgaaggtatggctagaaagaagacgcggggagcggagagcggagacggataagttctcaaaaaggaaaagcagggcgaaaaaaatatggctgacctacggcattccgggcctttctttcgtcgggcctttctttatcggctcccacttaaccgcgtttatgtgcatgggctttggggccaagcgcagacaaacggcgctgtggatgacggggagtctcgcagtatggacaacggcgtcggctgtcgctgcctactatggtttcagtttcctcgctcctgaaaatgaagggctgctgaaaaatatctttaaacaggaggagtga

SEQ ID NO: 1561 - DNA, 522 bp, Bacillus licheniformis
atgccgtttttgaaagatttatctccagatgaagagatggcgccgacagtcgggctgcttttttcggcggtcaatgaaaacatcgaacggctgaaatcaatcgtctccggcatcagccgggaagagctggaatataagggtgagcatggcgacaaaaacagcatcgcccagctgatctatcatttaatcaatgtcgatgtccgctgggtttacaggctgaaggaaagcgaaattccaagagagctggaagagaaatacggaccgatgacggatgaaaacggacgtttgccggaggtgacaggcgtccctttgaccgtgttaatcgagtggcatgaagaggtgctggagatgttgaaacacaccgctaaaggcttttcggaaaaagacttgctgaagaaggttccgtatgagggagggttttcgacgatccgctgggggatctggcatatgtctgatcataaccgctatcaccaggcgcatattcaggcttgcttaaaagagttccgcatgcaaaacagttga

SEQ ID NO: 1562 - DNA, 330 bp, Bacillus licheniformis
atgagatggggcagtgtcatacttgcagccttgtttgaaattggctgggtcatggggctgaaacacgccgattcggcacttgaatggatctgcacggcggccgccgtcgtgatgagcttctatatactggtgaaagcgggggagaagctgccggtcggaaccgtgtatgccgtatttaccggtctcgggacggcgggaacggtcgtctgcgaaatcgccttgttcaatgagccggcaaatatcgccaagcttgctctgatcggtgttttgctatgcggcgtgatcggtttgaagcttgtaacaaatgaagagaaaggggaggcgtcataa

SEQ ID NO: 1563 - DNA, 315 bp, Bacillus licheniformis
atggaatggatctgcctaatcgctgccggcctgctggagatgctcggcgtgacgatgatgaaccagtttcataaagacaagcgggtgagatggatctttttgttgatcatcgggtttgccgcttcttttttcttgctttcccttgcgatggagacgctgccgatgggaaccgcgtacgcagtgtggacagggatcggcacggtcggaggtgcgcttgtcggcatcctgttttacggagagccgaaagacggaaaacgcatctttttcatcgcgctcattttgggatctgccgtcgggctgaaacttattagctag

SEQ ID NO: 1564 - DNA, 903 bp, Bacillus licheniformis
atgaacgcatatatgaaacagcagttatcgcaatatcaggaaatcaataacgataaggcccgccttctggtcagctgtccggatcagcctggaatcgtcgccgccgtttcttcatttttatttgagaacggtgcgaatattattgaatcgaaccagtatacgacagaccctgaaggaggccggttctttctgcggattgagtttgaagttcaaggcatccgcgaaaagatcgaacagatgaaagcggcattcgcctctgtggcggagtccttccaaatgacgtggagcatgaatttggcgagcgaactgaaacgcgtcgctatcttcgtttcaaaagagcttcactgcctgcatgaactgctatgggaatggcagagcggcaatttgatggcggagattgcagcggttatcagcaatcatgaagatgcaagagaaactgttgaatccctgaatattccgttcctttacatgaaagcgaacaaagacattcgtcaggaagtggaaaaacagcagctgaaatggcttgaagagtatcgtgcggatgtcatcgttctcgcccgatatatgcagattttaacgcctgattttgtctcggctcatccgaacaaaatcattaatattcaccactccttcctgccggcttttatcggggcgaatccgtataaacgggcatatgaaagaggcgttaaactgatcggagcaacatcgcattatgtgacaaacgaattggatgaagggccgatcatcgaacaggatatcgaacgggtcgaccacagagacaatgtggaagcattgaaaaacatcggccgcacgattgagagaagcgttttggcaagagcggtcaaatggcacttggaagaccggattatcgtgcatggaaacaagacgatcgtctttaattaa

SEQ ID NO: 1565 - DNA, 138 bp, Bacillus licheniformis
gtgaaatggcatgctgaaacatttcaccacatgaaacctgccgaacctgcctcggagtcccagggggaaaacctgggcgcataccctggcgttaaaggggaaagaggagtgcgctttattttctcgcgcattcaatga

SEQ ID NO: 1566 - DNA, 1098 bp, Bacillus licheniformis
gtgaaaaaacaacggattgtcattaaaatcggaagcagttcattaaccaactcgaagggcagcatcgatgaggagaagatcaatgaccatgttcgggcgatagctgctctgaaaaaagaaggccatgaagtcatcttcatttcgtcgggggctgtcgctgcgggatttttacagctcggctatcccgcaaggcctgtgacgctaaagggaaaacaggctgcagcggccgtcggccagagcttgttaatgcaaacatacatcgagcattttgcagaccacgatatcaagcctgcgcagatcttattgacgagaaacgattttgccaaacgggagcgctatcgaaatgcatatgcgaccattatggaactgattgaacgggggcttgtcccgattattaatgaaaatgattcggtatctgttgaagaattgacgtttggggacaacgacatgctttccgcccttgtaagcggactgattcatgccgacaaactcatcattttaacggatattaacggcctctatgactcgaatccggctgaacatcccgatgcccgccgttttgattacattcccgaaattacggacgaacttttgggctgcgccgcttccgccggatcaaaagtcgggacgggcgggatgaagtcgaagcttttggcggcaaaaaccgctctttcactcggcgtcaatgttttcataggcgccggagagggagatgataagctgatccagattttaaaaggaaacggggacggcacctatatcggccaatccgacctgtcttccgtcaacaatcataggcagtggatcgcctttcattcacctgtttcagggaagattaccgttgatgaaggggctgagctggcgattaccgaaaacggcgggagcctgctgccggccggcgtaacagcgatatccggagattttccgaaaggggcggttgtcgaagtttacggaccgaacggcctggccgggaaaggccaaacgctgtactccgccgcagagcttgaagaggtaaaagggaagcgaagcgatgagttccatcatgaagaagggatagaagtcatccatcgaaatgattgggtaagcattaaagaataa

SEQ ID NO: 1567 - DNA, 1248 bp, Bacillus licheniformis
atgagcgaagtgattgaaaaagcaaaaaaggccaaagtcgcaaaggaagaactggttcatcagccgactgaaaggaaaaatgaggcgctttcctttatcgccgaggccatccgctttaagcaggatgagatattggcagaaaacgagaaagatatcgtccgcggcaaagaaaaaggcttttcgcctgcgctgcttgaccgccttgccttaacgccggagaggctgaatgatatagcagacgccgtcatgctgctcacaaagcttgaagaccctgtgggggaaacgcttgaaacgatccgcaaagacaacgggcttttcattgaaaatgtcagggtcccgctcggagtcgtcggaatgatctatgaggctcgtccgaatgtaacggtcgacgccgcaaccctttgtttgaaaacgggaaatgccgtcatcctgcggggcagttcgtcagccatcaacagcaataaagcgctcgtccgcgtgatcagggaagcgctcgtccgctcggcgcttccagaggatgccgttcagctcattgaagatacaagcaaagaaacggcaaaacagctgttcactttaaacgacggcttggatgtgctcatcccgagaggagggaaaaacctcatcgatatggtggtgcgggaatccacagtgcctgtgcttgaaacaggcgcggggaactgccacatattcattgatgaatcggctcagccagacatggctgagcaggttgtaatcaatgccaaaacgcagcgcccttctgtctgcaatgcgattgaaacggtgctcatccataaaggctgggcggaagagcatacgaaagcgcttcttcaaaagcttgaagaagcgggcgttgaaatcaggggagacgaagccgtatgcacgatgctgccttctgcggttccagctcgcgagaccgactggggaaccgagtttcttgcgccggttgtcagcatcaaaaccgttgccggaatcgatgaagccatccggcacatcagacagtacggcacacgtcattcggaagcgattctgactgaaaatcaggaaaacgcccggtatttcttaacgtctgttgacgctgcagctgtttaccacaatgcttcaacacgttttacagacggctttgaattcggctacggcgccgaaatcggcatcagcacgcaaaagcttcacgcacgggggccgatgggccttaaagcgctgacttcttctaaatatatcattaaaggaaacggacaaatccggatatga

SEQ ID NO: 1568 - DNA, 423 bp, Bacillus licheniformis
atgaaaccgctatttacctcgcaagccactgccaatggtggcagagacggacaagtcacctcatctgaccgcgtccttgagctggagctggccatgccgggaacgccaaaagccaaggaaaacgaaaatgccaccaacccggagcagctgtttgccgccggatacgcggcatgctttgacagcgcattgcaattgaccgcccaaaaggcgcgtcttcgaatggagacagaggtgacggcgaacgtcagccttctgaaagatgaagcagatggaggctataagctcagtgtcacactgcaagtaaaaggaaccggcgttgaacagagggagctcgaaaaactcgtccatcatgctcataccgtttgcccgtattcaaaagcaatttccggaaatgttgatgtcaaccttgaagtgatttcttaa

SEQ ID NO: 1569 - DNA, 453 bp, Bacillus licheniformis
atggcaaacgaatttgaacatatgaggcttgacagacagctttgctttctcctttatgcaagctcgcgtgaaatgacgaagctttacaagcctctgcttgatgaactcaatattacgtatccgcagtacctcgcgctccttttattatgggaacacggggaattaagcgtcaaaacaatgggcaagctcctttatctcgattccggcacactgacgccgatgctgaagagaatggagcagcacgggcttttaacaagagagcggtcacctgaagatgaacggtctgtaattgtcagactgacagcaggcggccaggcactccaagaaaaagcaagcagcattccgcagcacatgatcgcccagaccgatctgtcggctggcgaactgaaaaacttgaagcaaacgcttgaatcccttcttgcttcattgacgaaaaaaacagatgtgctgtaa

SEQ ID NO: 1570 - DNA, 213 bp, Bacillus licheniformis
gtgacttttgctgtaaacaatgcagtcatcctgattcctccttacgttttttcctctactctttatatttcacaaaatgagttttttaaacatccgtttttgttttttcgggttttcagccgatcaatgggaaaagaacgcaaaatcttatacaataaaaaggaacataaaaaagagttggtgaaacgatggcaaacgaatttgaacatatga

SEQ ID NO: 1571 - DNA, 414 bp, Bacillus licheniformis
atgactgcattgtttacagcaaaagtcacggcaaaaggcggaagatccggacatgtcaaatcagatgacggggttttggaccataacattgttatgccaaatgaaaaaaaagaaggcgaatcagggacaaatcctgaacagctctttgcggcgggatacgcggcgtgcttcggcggcgcattggaacatgtcgcaaaacaaaaaggcattgacatcgattctgaggtcgaaggccatgtgagcttgctgaaggatgagagtgacggcggttttaaaatcggcgtcaagctgatcgtcacagcaggcggggtagaaaaagaaaaagcgaaagagctggtcgaagccgctcatgacttttgcccttattcaaaagcgacgagaggaaatatcgacgtcaatcttgaagtaaaataa

SEQ ID NO: 1572 - DNA, 666 bp, Bacillus licheniformis
atggcatatcttaaaaaagcgcttgtgttctccgtgctttctctcgctattgtccttgcaggatgcggaaccggagcggcggagaagaacaacggcaatcaatccccggctgatacggccaagcagaaagcacctgatttgaaaacatattcccttgacaaaaatatccggtctgaagaagattttgatttgataggcaagtatgttcatgctgaagatgaccaaatcacgctcgaaataaaggataaggaactgattgttccgaaaagcagccgctttcacagcgaagaagaccatgatgacttaatcgggaagcttgtgaaggtagaggtggatggaaaaacgcaagaagcggaagaagccgagcttatgccgcagtcaaaagccgaccaaaatggcgtatatgaggaggagaaagacggcagccgaaaaatcatcgccacgtttgtcagcgagtcggagcaaaacattacaatcaaaacaaaagcaggggaaaaaacttatcagaaaacagccgattttgagagggatgtcgccgaagcacctgaaaaactgaaagggaaaattgtcaggcttgaaattgaaaaggatggaaaagcagaaagccttgatttggaatcggaagatcaaaagcttgaatggtatgagccgtctgcttcaaaataa

SEQ ID NO: 1573 - DNA, 471 bp, Bacillus licheniformis
atgaatcatgaagcatttttgcagcgcgccatcgaccttgcggtggagagcgtgaaaagcggcacaggcggaccttttggcgctgtgatagtcaaagacggccaaattatcgccgagggaaaaaacaatgtcacaacaagcaatgatccaaccgcgcacgcggaagtaacggctattcggctcgcctgtgaagcacttggcgattatcagctgaacgactgcattctttatacaagctgtgaaccgtgccccatgtgcctgggagccatctactgggcgagaccgaaggaagtttacttcgccgctcagcattcggatgccgcatcggccggttttgacgactcttttatttatgaagaaatcaccaaaacgaaaagcgaacggaaaattcctttttataaaatggaccttcaagcaaagcttgaaccttttctcacatgggaaaagaccgatcaaaaagtggaatattaa

SEQ ID NO: 1574 - DNA, 633 bp, Bacillus licheniformis
ttgcttacattgtatattgcaagacacggtcagacggaatggaatattgaaaaaagaatgcaaggctgggaagactccaatttaacggctttgggactggcaaacgcaaatgccctcggcgaacggctgaaagatgttcaattccaagccgcatattccagtccaagcggccgggccgttgattctgcgcgggctatgctgcagaaccgcagcattccctttataacagacgacagattaaaagaaatctcgatcggccgctgggaagggaaaacgtatgatgagatcaaacaaagtgatcctgacttgctggaagcgtattttaatacgcctgaaacatatatgcccgatgaaagcgagagcttttacgattttgaaaggcgggtcagtcaggcgtatcaattcattctccgccgccatcgggaaggcaatgtcctcattgtcagccattccgtgtttatattgatgctcttgaatcttataaaaaagaggccggtcggtgaactatggaactcaagctatgttcatgacacagctcttgcggttgtaacggtttccgaggatggaagcgccgcgattgaaagagaaggagacggtgaacatagagtagaagcaaagaatgccacctggtag

SEQ ID NO: 1575 - DNA, 714 bp, Bacillus licheniformis
atgacgatccggctgaacatcaatgatctgcacgccctcgcccgccaatttcgctattcccaccagcgaatcagcgatttaatacgccttttgaaccgtcattttcatgttcttttctccagcgtgaaaacagcaagaacatgcggcatcgatcaggcgcaatccgaaatggaacatgaactcaaaggatttttacacacgctcgatgatttgcagcatctcctgcactttacagaaatccgcatgaaaaagaccgatcagatgcttgcggagaagctctttcacagcggcgggcatttggccggctacctgccgatcatgtcttctttggctgcagccaaatgttcccctgacagctataaactgaccgcaccgccgctgtctgaaccgctcgctctcatgaagcagatcaaacaaaacggtctgtcaggactcattacaaaaaaacgagccgcagcatatattcagtttgatgaagagggacagcagcagctgtggtcggcgcgccgcatgatcagccgcacaatcgccgacaacctttgcattctggcatatcagcaaatcgcaaaaggcccgctttctcttacagtcttacttttcggaaaaaaagcggaagcagatgcggcagatgtcaaaaccgtttgtctttcaaaaaacaaaacgattaccgccgacacgcttcacagcttcagtgccaaaatatattccggctag

SEQ ID NO: 1576 - DNA, 315 bp, Bacillus licheniformis
ttgattgacgatggaatagcgttagaacgaaaaatcaagcgaaaaatatatcaggaagacattcactctcttcagctatacgtaaaagatgtgaatgccgccattgatgagctgaggcaggaaagttcttctattttaaaagcacaccaaacgtatatcaacggatggcgcggacaggcgcgcgaaatgtatgacgcgcttttggacgatctcgaccgggcggaatcgcgcgtgtatgacaagctgaggaccattaaagagcaggcggacgaagaaattgaacggcttcagctgaaagccgaggagctgatatga

SEQ ID NO: 1577 - DNA, 2289 bp, Bacillus licheniformis
atgactaatgtaaaaacgagcagcttgggctttccaagaatcggcttgaacagagaatggaaaaaatcgcttgaggcttattggaaaggaaacacggaccgcgagacctttttgaaagaaatggatgaacaatttttagcagcgctccagactcagcttgatcagcaaatcgatatcataccggtttccgactttacaatgtacgaccatgttcttgacacggcggtgatgttcaactggattccagatcgattcaaggatataaacgatccgttagatacttatttcgcaatggcgagaggcacgaaagatgctgtatcgagtgaaatgacaaaatggtttaatacaaactaccattatattgtgcctgaatatgaaaaaggtgcacaataccgcgtgacgagaaacaaaccgcttcaagattaccaaagagcaaaagcagcattgggaacagaaacgaagcccgtcatactcggcctttacactttcgtagcccttgcaaaaggctatgaacaacaggatattaaagatatttataaccaaatgacacctctttatatccaggttttgaaagagcttgagcaggaaggcgtcaaatgggtgcaaattgacgagcctgctcttgtgacggcttcacctgaagaagcggctgctgtcaaagaaatctatcagacgattacagaagaagtctctgaactgaacatccttctgcaaacctactttgactcggttgatgcttatgaagagctgatatcgtttcctgtcgcaggaattggtcttgattttgttcatgataaagggaaaaacttcgaacacctgaaagcgcacggttttcctaaagacaaagtccttgccgccggcattttagacggacgcaacatttggaaagccaatctcgaagagcgcctcgacctgacgcttgaactgatccagagagcgggtgttgacgaagtctggattcagccttcaaacagcctgcttcatgtccctgtcgcaaaacacccgggcgaacatcttgccgacgatctcttgaacggtttatctttcgcaaaagagaaacttctggagcttacactgctgaagaacggacttgtttccggaaaagcggccatccaagcggaaatcgatgaagcgcacggacaccttcaagatctcaaacagtacggtgcagcgacaaattcggcctttgccgaagaaagaggcaagctgaccgaggaagactttaaacgcccgacagcttttgaagaaaggctgcggattcaaaatgactctctcggacttcccctattgccgacaacaacgatcggcagcttcccgcagacggcggatgtgcggagcgcgcggcaaaaatggcggaaaaaagaatggtccgacgatcagtatgaagcatttattcaggaagaaacaaagaaatggattgatattcaggaagatctcggacttgacgttctcgttcacggagaattcgaacggacagacatggttgagtatttcggcgaaaagctcggaggattcgcctttactaaatacgcctgggttcagtcatacggttcccgctgcgtccggccgccggtcatctacggagatgtcgagtttaaagagccgatgacggtaaaagaaacggtttacgcccaatccttgacctcgaagaaagtcaagggcatgctgacagggcctgttaccattttaaactggtcctttgcccgctatgacctgccgagaaaagagatcgccttccaaatcgcctgcgccctccgcaaagaggttgaagcgcttgaaaaagcaggaattcaaatcattcaggtcgatgaacctgccttgagagaaggcctgccgcttaaagaacgggattgggacgagtatctcaaatgggctgcagaagcgttcagactgtccacttcatctgtggaagatacgacgcaaatccatacgcatatgtgctacagcaactttgaagatatcgtagacgcgatcgaagatcttgacgcagacgtcattacgatcgagcacagcagaagccacggcggatttcttgattatctggaacagcacccttacctgaaagggcttggtcttggcgtatatgatattcacagccctcgcgtcccttccagcgatgaaatgctcacgatcatagaagacgcgctgaaagtctgcccggctgatcgcttctgggtaaaccctgactgcgggttaaaaacgagacagccagaggaaacgatcgcagcgcttaagaatatggttgaagcagccaaacaagcaagaggcaaactggctcaaactgtttaa

SEQ ID NO: 1578 - DNA, 954 bp, Bacillus licheniformis
atgcaaatgcgattaattccttatgtcactgacacaaagctgatggacgtgaatgaactgccggaaggaatcgatgcgattaaggcaccggagctgtggtcacaaggttttaaaggaaaagatatcactgtcgcagtgcttgatacaggctgtgacgcaacccatccagatttggcagaccgaatcatcggaggcagaaacttcactgatgatgacaacggaaaagaagatcagtttcatgattataatggacatggcacccatgtggcgggtacgattgccgcaaacgatcaaaacggaggcatttccggcgtagcacccgaagcgaacctattaatcgtcaaggtgctcggcggtgaagacggcagcggggattatgaatggatcatcaacgggatcaactacgccgttgagcaaaaagccgacattatttcaatgtcgctcggcggtcctgccgacgttccggagttgaaggaagcggtgacaaacgccgtgaagagcggagtgctcgtcgtctgcgccgcaggaaacgaaggcgacggcaatgaccgtacagaggagtactcataccctgctgcatacaacgaagtcatcgccgtcggatccgtgtcattgacgcgtgagtcttccgaattttcaaatgcgaacaaagaaattgaccttgttgcacctggagaagaaatcctctctacattgcccgaccatcaatacggaaagctgacgggaacatcgatggctacaccgcacgtcagcggcgcgctcgctctcatcaagtcagctgaagaagaggcgtttaaacggaaactgacagaacccgaactgtatgctcagttaatccgccgcacccttcctcttgattactcaaaagcgctgatcggcaacggattcttatatttgtcagcgccggaggtactggcggaaaaagccggcgaagcaaaacttctttccctttaa

SEQ ID NO: 1579 - DNA, 156 bp, Bacillus licheniformis
gtgaaagaacaagaagacgaaaaaagagacgaattatcaatcgagcaggcggagtttgtgccgcatccaaaatatgaaggagaatacgcgcttttactgcacgaaaactatcacctgctgtcaaaggacgaccttgagcaggaaagcgaaaaataa

SEQ ID NO: 1580 - DNA, 1356 bp, Bacillus licheniformis
atggtaaaaaacatgacatatgatgaactgattttacgcattattattttgctgagagacggaaaacgaaaagagttccaaagcgttttagaagaactgcagccttatgatatggcgattctgtttaaggaaatgcccgaaaagcaccgcggccggtatctgtcttttttaacggtagaagacattaccgatctcatgggcgaacttgacagagaagagcagctagtcgttctgaacaaggtcggcaaagaaaaggcgatccatgtgatgaataaaatggacaacgacgaccttgccgcgctcttcgaggaaatggaccctgagctgaaagaccagcttctatccagcatggaagcggaagaatccgaagcggtccgcgttttgatgaactacccgcctgaaacagcgggaagaattatgacaaaccgctatgtctggattccgcagcattacacggtaaaagaagcggtcgtcaagctgaaaagctttgcggaaatcgcggagtccatcaactatttatacgtcatcaacgaacaaaaacagcttgtcggggttatctcataccgtgatctcattttggcagaacccgatgagaaggttcaggaattaatgtttacaagggtcatatcggcggacgctcttcaagatcaggaagaagtcgcaaggctcatcgagcggtacgactttctggcgattcccgttgtagaaaaaaatcatgagcttgtcgggatcgtaacggttgatgacattatcgacatcgtcatccaggaagcgaatgaagactatgaaaaattcgcagcatcaggtaaggcgatcacgtttgatacaaaatcgtatgtcgccgcataccgccgtctgccgtggctgatcttgcttttgttcatcggtttgatctctggcagcatcatgagctattttgaagacacgctgcagcaggttgtcgcattggccttttttatgccgatgatcgcgggaatgacgggtaacactggaacacagtccctcgctgtcgtcatcagagggctgtcaaaagaagagctcaataaaaaaacgattttccgcttgattttccgggagcttagagccgggattattattggcgtcgtgtgtgcgatcgtgattacgggaatcgcgatagtatggcaggggaatctgctgctcggatttgtggtagggacttcgctttttgccactctgatcatcggaacgatggcgggaacgatcgtcccgatcatccttcacaagtgcaatgtcgaccctgcgattgcatcgggtccgctgattacaacattaaatgacattttgtcgctgttgatctacttcggtattgcaactgcattcattcattcgctgtaa

SEQ ID NO: 1581 - DNA, 357 bp, Bacillus licheniformis
atgagaaggattgcagctgtgctgatttgtttagccgttgcattgattgttgccggctgtcagaatgaagatgaaggaaaagacaggcggctcgtcgcagttgaggatatgcttgaggcgatattggacgatgatttatcaaagatgaagcgcttgtacgtggagggcgcaaacccttctccggaaacaatcttgaaagacaagcagaaatggggaatttccgggcttcatgctgatgatttcaaatttctgaagcgagcatccatgtgtttcatgccgcttacaagatggaaaataccggtcagcccggaacgattgcgtttcggatacgcaatgatcccgataaaggcgttatga

SEQ ID NO: 1582 - DNA, 333 bp, Bacillus licheniformis
atgacagtcgaagatctttcttataaagataaaaaagtgatttcaattggcattgtcagcgagctgacgggtctgtcggtcaggcagatccgctattacgaagaacgcaagctgatctatccgcagcgctctacaagaggcacgcgcaaatattcctttgctgacgtcgaacggctgatggaaatcgcaaacaagcgggaagacggtgttcagaccgcagaaatcctcaaagatatgcgcaaaaaagaacaaaggctaaaaaacgaccagcagctcagaaagaaaatgctcgaaggccagcttaacgctcattttaaatacaaaaaccgttaa

SEQ ID NO: 1583 - DNA, 156 bp, Bacillus licheniformis
atgaaggaacacaaagcagtcttactcgccaaagaaatcgttgccttagacaataagagagacgaattgctcgagacattgatgaaccttgccggcaaggatgcgtttccgctgctgagggcggtgcagaacggcttttatcaaaagtcctcttaa

SEQ ID NO: 1584 - DNA, 180 bp, Bacillus licheniformis
atgagcagattgttaaaaaacgctttggaaaaggaaagaaaccattacttgaaaaaactgatctcactcggtgagcataatcgggaagttttgcagaggatgacgattacggagctcagaaatgaatatttttattttttccggaaaaataaagcccgtgttcaaaatcggccattttga

SEQ ID NO: 1585 - DNA, 462 bp, Bacillus licheniformis
atgagactttcgtttaatgaggaagaagttcaccgtgctatgtcgctgtacaaggtttttgccagggcttttaaaagcgtttcagaacatagtattcgggacagcaaggaacacggctttaatcctacagaatttgctgtattggagcttttgtatacgaggggagcccaaaagctgcagcaaatcggctcgaggctgctccttgtaagcgggaacgtaacctatgtgatcgacaaactggaaaaaaacggtttcatcaaacgagagcaggacccgaaagataaacggtctgtctatgcgaatttgacggagaagggaaaggcatatctcgatgagatttatccgatccactccctgagaattgcgagggctttttcaggcttgacaaaggaggaacaggagcagctgatggtccttctgaaaaaagccggaatccacagccagcacctattgtttcgctga

SEQ ID NO: 1586 - DNA, 1839 bp, Bacillus licheniformis
atgcagcctgtattgactacatcagctccctcaggcggcaattggcggtatgaagtcaaatatgacgggtatcggggtcttttaaagattgctgcgaccggcgaagtttcgctcatcagcagaaactcacagccgctcgaaaacacatttccggaaatttcggaatttgcaaaaagcatgatcgaaactctcaaagaacacttgccgatcacgattgacggggaaattgtgtcgttgacaaaccgttttcgttcccgatttgaatatgtccaaaaaaggggtttgagcaaaaaggccgagttgattgcacaagcagccgcaaagaaaccgtgccagtacttggcttttgatttactggtttttaacggagaaagtttaacctcgctcccctataccgaacgaaaacgcatgcttttcgacctgatgaaagagctcggcctgccgatggctcccgatccgatggctcacgctcgaattcaatacatccctgacacttctgatttccacgacctttggaaggctgttaaaaggtttgacggcgagggaattgtcgcgaagaaaaaagacagccgctgggctgaaaataaaaaaacggccgaatggctcaaactcaaaaactacaaaaaagctgctgtatttatgacaggctacaacatggcaaaccgttatttgacaatcgccgtctatgaccgcggtcaaatcaaggaagtcggttcggtttcccacggactcggagaacaggaaagaaacgccattctttcgatcgtcaagcaatacggaaccgaaacaaaacccggtgaatataccattgatccgtcgatttgcatgacggtccattacttaacgattcattacgggacattgcgcgaggtgtcgtttgtttcatttgaatttgacatggcatgggaaaattgcacttacaaccgcctgctgcttcattcaagaaacgtccatcccgatttgcagctgacaagccttgataaagtcatctttcctaaaagcgataaaacaaaagcggattacatcggataccttaatgaaatcggcgattttctgcttccgtttctcgacaatcgggcgcttaccgttatccgttatccgcacggttccggcggagagtctttttttcaaaaaaacaagcccgactacgcacccgaatttatcacgtccattcgggatgacgagcacgagcatatcatctgcagcgattattcggttctgctgtggcttgccaatcagcttgcgttggagttccatatcccttttcaaacggtggatacggcccatccgaccgaaatcgttttcgatcttgatccgccttcaaagtcggagtttccgttggccgtcagagccgcgaaagagctgcaccgtttatttgatcagctcggcctcttatcttttccaaagctgtcgggaaataaagggatacaaatctatattccgatttcaaaaaacgcctttacttatgaagaaacccgccttttcacaagctttgcggcttcttattgcgtctcgctttttcccgatctgttcacaaccgaacgcctgatcaaaaacaggggcggaaagctctatattgactatgtgcagcatgccccgggaaaaacgatcatctgcccgtattccacaagaggcaatgagcttggcacagtggccgcaccgctgttttgggatgaagtccattcagacttgtcacccttaaattttacgatggaggctgtcgtcaaacgcacaaaggaactcggatgccctttcgaaagcttcttcagacagccccaggacaaacagatcaaagctattctcgatcacttaaaagaaaacaaccgttcggaaaactga

SEQ ID NO: 1587 - DNA, 873 bp, Bacillus licheniformis
atgcatacgatgtggaaaggctctatcagctttggccttgtcaatatccccattaaactgtttgcagcgacagaggataaggatattaaattaaggtcgcttcataaagaatgccgcgccccgattcagtatgaaaaaaagtgcacaaactgccatcaggaaatcgcgcccgacgacatcgtcaagggctacgaatatgttaaaggcaaatacgtcgtcttatcggacgatgagctgaagcagctcaaagaagagcaggaagacaaggccgtcgaaattgttgattttgtgcagctaaaggaaatcgatcccatctatttcaaccgttcatatttcgtcggaccgggagataacggtgtaaaagcgtactcacttttgcgcgaagcgctcagaaaaacagaaaagatcgggatcgcccatatgaccatccgctcaaaaaaacagctcgccattcttcgcgtctacgaaaactgcattttaatggagtccatccactaccctgatgaggtccgaaacgcagcccacgtacccggtgttccggaagaaaccgcagtcaacgaaaaagagctgcaaaccgcgatttcattaatagacgagctgacaacgacatttgcgcctgaacaatatgaagatacgtacagaatcgcgctgatggataaaatcaaagagaaaatcgaccataatgaaggtgtcacgccaaatgccggggccgccgctccgcgcgaggatgtaatcgatctcgtgagcgctctccaagccagcatcgaacggacaaaagggcctgaccgggaagcggcgaaagcgcctgcagcaaaaggaacagctgagaaaaagaaaaaaacgtcgcgcaaaaaagcttcagaggcaaaataa

SEQ ID NO: 1588 - DNA, 1653 bp, Bacillus licheniformis
gtgacagaagttcttggtgaatataatggatggctcgtcctattatcctatttcactgcagttttggcagcttatacagcccttgatttatctgaacgggtcgtacatacaaaaggcaggaaaaatatcggatggcttttggccggttccctcacgatggggcttggcatctggtctatgcactttatcgggatggtgtcatttcagacagcagaagaaatgaaatacgatttgaaattcgtcttgttgtcgattgttgccgctttcgcaggctcgctcatctcattttatgtggtgaatgaaaaaaaaccgacgaatggaagactggcggccgggtcacttgcaatgggatgcgcaattgcctccatgcattttatcgggatggaagcaatggaaaatatgacaatcgtctatcatcccgttctttatgccgcctcttttgcaatcgccatttttgcctccttcgctgccttaaaactgtcagttgtattcgccaaaaaaaccggttcttttcggatattgttcattaaaatcggaagcgcgcttttaatgggcggagcgatttccggcatgcactatacaggaatggcagcagctacgcttttcatggctgacagcgttgacacaggctatgaaggaatcgatactgttgaactgggcattatgatcgtgcttgtcagcctgatgcttcaatgcttcttgattttcggcgccttcaatgacaaacgcctgctgcttcatatcgaaaaagtcaaagataacgaggagcggttccagtccttgatcaaccacaacattgatccgatctatgttttttcgcttgaaggcaagctgctttccgccaattcatcgggatacagccttcttgaaaaaatgggaattgaacccgagcgcctgtcttccgtttttcggcaggaggatcatgacaggctgctcggctggttccttcaagtccaaaatgaaaaacaggccatcaaccgcgatacggcaatcgcgatagctgaaaagcgctttgatttaaatgtgacgctgataccggtgtatgtcagaaagcagcttgacagcatttatgtcatatgcaaagatatgacaaaccagcgtgaagcagaacgcaaaatccatagaatggcccactatgacgcgttgacggatttgccaaacagaaggtatgcagtcgaccgtctggcaaatgttctaaagcggcaggagacagggacggccgtgttgtttttggatttaaaccgtttcaaagtgtttaatgacgccctaggccacgacgtcggggacctgctgctggtggctgctgcacagcgtttggcgcactgtgtgcccaatgaaggctttatcgcccggctgggcggcgatgaatttatcattgtcgctcctttacaagggatcgatcagctgaccaggcaattgatcagtcagtttgaaacgccttttcgcattaaagagcatcgcctcaaaacatccgtcagcatcggaatcgccgtttctccggacgatggaacagacggcgatgagctgatgagaaaagccgacatggctatgtacgccgcaaagcacaagagcgtaagcagatatcggtacttctcgtcttccctcgccagaaagaacagaccgtctttccagaaggaaatcgagctgaactaa

SEQ ID NO: 1589 - DNA, 132 bp, Bacillus licheniformis
atgattttaacacaattcgagaaaattgaagagcaaaatgggaagtcctccttaaaaagaacaggaggatatcattttttattggcgaatttcattatatatagtataattcacgaattataccggaattag

SEQ ID NO: 1590 - DNA, 642 bp, Bacillus licheniformis
gtggtcgatatcgaagagtttattttatcaatggctgaggcatttaaaagcctctcgtatttaggcattttcctggcgctgtgcatcgaattcgtgccggctgagatcgttctgccgcttgccggatactgggtgtatcaaggagatatgtcgatgttcggggtcgttgcagcaggttcactgggaggtgtcgcaggccctctgacgctttactggctcgggaggtacggggggcggccgtttttggaacgctacggcaaatacttctttatcaagcctgaagcgcttgaaaaatcggacaggttttttgaaaagcacggcgggtttgtcgcattcagcggccgttttatacctggaatcagaacgctcatttccattccgtgcggactcgcgaaaatgaatgtgtgggtattttgtatttatacattcctcgcgatcacgccgattacgttcgtctatgtctatttaggcttttacctcggcgaaaactggagcaaggtcggcagcctattggacggataccttcttccggtcggcatcgggttcatcgttttgttcgttctttacctttggttgaagggcaggcggaacaaaatcaaatcgcaaagcgtttcagcctttataaataaaaataaggattga

SEQ ID NO: 1591 - DNA, 768 bp, Bacillus licheniformis
atggatgcagcattattacttgaatatggttgggttcttctcatcctagtcgggctggaaggcattttggccgcggacaatgccctcgtcatggcggtcatggttaaacacttgcctgaaaaagacagaaaaaaagcgctcttctacgggttggccggcgcgtttgtgatgaggttcggcgctttgtttgcgatctctttccttgtcaatgtctggcagttgcaggcgatcggcgccgtttatctgctttacatttccgtccatcatattttgaaaacccacgttttcaaaaaggacgaaaaagtgaaggagacgaagcaaagcggtttttggccgacggttatcaaagttgaactggcagacatcgcttttgccgtcgactcgattttagctgcggtggcgctggctgtcacacttccggcgacaaacctgccgcaaatcggcgggcttgacggcggacagttcatggtaattttagccggcgggatcatcggattgattattatgcgctttgctgcaagtcaatttgtgaacttgttaaagaaacgtccgagcctggaaacggctgcttttctgattgtcggctgggttggtgtgaaactgacgctctatacgctcgcacacccgcaaatcaatatcgtctctgaacattttattcattcaggtacttggaagttcatcttctgggcggtgctgatcgccattgcgctcgggggatggtttatgacaaatccgaacaaacacgagaataaagctgctgaggagtaa

SEQ ID NO: 1592 - DNA, 756 bp, Bacillus licheniformis
gtgaaaccagtgcttagccttttgtttaagacaggaaaaaggaaacaatcattagaagagtctgtaataagcatacaaaaaggaaatcagcagttgcaaaacgagcttatcgatcaatataagccttttgtggctaaaacggtttcatccgtgtgcaaacgatatatagatgaaaaagatgatgaattcagcatcggcttgattgcattcaatgaagccattgaaaaatattcttcagataaaggaaattctctgcttgcatttgcagagctgatcattaagcgcaaagtcattgattatatcagaaaagaagcgagaaatgcccagaacatcaatatggacatgcaagaaggagaagaacaggaatcctcccaaagcatgattgaagcggagctttccattcatgaattcaaccgcatgctcgaacaggagcaaaggcgggaggagattctccattttaaagaaaggcttaaaagttttggcctgtctttttccgatttgctggagcattccccgaaacatacggatgcaaggcaaaacgccatcaaagtggcatatacgcttgtcgaacatgaagaattaaaaaagatcttgtttgaaaagaagcagcttcccgtcaaacagcttgaaaagcttgtggctgtcagcagaaaaaccgtagagagaaaccgcaaatatatcatcgctatggcgatcattataacgggcgattatgtttaccttaaagattatctaaaaggggtgctcaattcatga

SEQ ID NO: 1593 - DNA, 1092 bp, Bacillus licheniformis
atgagaagaggaattattgtagaaaaaaataaaaaattcgtcacattgctaacccctgacggacaatttttaaaagcaaagagcacagaggaagattatgaaatcggtcaggaaattgcttttcccgcggagacgagaatgtcgagaaggcgtgcgggcttttttgatctgctttcgctccgtccgctgaaagccggcgttttttcaatcgccgcgatcatgctgctcgctttcatgatcatccctgatgttttaaacaataaagcatacgcctacatgacgatcgatatcaacccaagctttgaattgacgctcaacaaaaactgtgaagttatcgatttggtgccgctgaacgaggatgggaaggccttaatggatagtataaaaaattgggaaaagtctgactttaaagaagtgatcagtgaaattgtcgaagacagcgataagagcggttatgtcaccgaatcaaaagaagtgcttatcgccacagtatacgaaaacaatgaagatgacacgtataaggcgacggtaaaaagcgaaatcgatgatgtagcgaaaaaatacgagcagcagaattataagatggaagcggtggaatcagaccttgatacgcgtgcaaaagcccaaaaagaaggcatctcaacaggccgttatatccgttcccacaaagatgaattagaagacaaaaacaaagatgatgacaatgaaaataaaaaagatgatcaaaatcaggaagaaaacacaggagaaaaggagaaagctgtgaaagaagaagatcagccggaacagcatacggatgataaagaagcagatacggaagatcatccggacggcgaaaaaccttcagatgaagatcagtctcaacctgatcaagaaatggaaaaagaaaaggagtcaaattcccctaataccaaaaaccctcaggaacataaccataatgacaaagacggtcagcagacggaggaaggaacgccaaaaagcggttccggttcaaatcaagagagctctaaatcacctccttaccaaaaggagaaaaagccttctgaccaaacgaataaacaagaatatccgccgagcgggcccggcgaataa

SEQ ID NO: 1594 - DNA, 198 bp, Bacillus licheniformis
atggcaagaacgaataagctcctcgttcccggggcagagcaggttttagaccagttcaaatacgaaatcgcccaagagttcggcgtccagctcggctcggactcggtcgctcgctcaaacggatctgtaggcggggaaatgacaaaacgacttgtacagcaggcacaagctcaattgaatgggcataatgacaaataa

SEQ ID NO: 1595 - DNA, 720 bp, Bacillus licheniformis
atgaaaccttttaaactgactcgcctggaaatggccaaactgatgtacgctttaaaagggcagctggatgtcagtccgctagcgattcttttgagatcggccgatttggcgcccgatgagccggaagacaatttagacatccccgaattcattgcccggtacgaacggaaaaaacaaaaaacggaacacggactttccacaaatgaaattgttgaacttggaaatttgtgcgaactgacatccttaaaatcgacagccatccaaaactggatcaaacgcgatataaaagatttgatggggcatccggaactcggcaaaaaatattccatcgaccaagccgtcatccttctcattgtacgagacttaaaatcggtttatgacttcgaaacgatccgtccgatcttaacaacgatttttaatacgattacagaccgctccgatgatgtagtgagtccgctgcgcttttatgaagggtatgcgcgggtccttgatcatgtgtaccagatcaaagactatacgctcaataaatcggcgcttgaaaaaatcgtcattgagcagactggacagctccgcgatttttataaagatctggccgatcccgaatggaacaaagcgagagacatcaccgcagtcactgtgctgtccgtcatcgcttcgcacattcaggcgaccgcacattccattattgacagcgtcttcttaaaatatgaaatgaaataa

SEQ ID NO: 1596 - DNA, 894 bp, Bacillus licheniformis
atgggaaaaagaatctttctctttcttttatcgaacatcttagtcattacgacgatcggtatcgtgctttcgattatcggttcgctgacaggggtaggcacgtatttcacggctaacggcggcatcgatattgttgcgcttctcgtatttagtgcagttgtcggttttgtcggctcctttatgtcgctcttgatgtcaagatggatggcgaaaatggcgatgggcgttcaggtgctgaatcctgataagcaaacgctcagctatgaagaacagcagctcgttgaccgggtatataagctgtcccgcgctgccggactgacaaagatgcctgaagtcggcatctacaattcacgcgaagtgaatgcctttgcgaccgggccgtctaaaaaccgctcgcttgtcgctgtatcgacgggccttcttcaggaaatggatgacgacgcagtggaaggcgtacttgcccacgaagtggcgcatattgcaaacggcgatatggtgacgatgacgctccttcaaggaatcgtcaatacgttcgttgttttcttcgcaaggattgcggcatgggctgtttcacgcgttgtccgtgaagagctggcgccgatcgttcactttatcgcggtcatcgtattccaaattgtgttctctattctcggaagccttgtcgtgtttgcgtactcccgccaccgcgaatatcatgcggatagaggaggagcagaccttgcaggcaaggataagatgattcacgcgctccgctcgcttgagcagtacacttcaagagtcaaagaagaacaggcatctgttgcaactttaaaaatcaacgggaaaaagcatacatcgcttttctcaacacaccctgatttaagcgacagaatccgccgtctggaagcaaaataa

SEQ ID NO: 1597 - DNA, 1350 bp, Bacillus licheniformis
atgaaggttttattgagaaaactactgcgcgtgctgtctcctgtacagctgatcgcgctctattattttttagcggtgacagtttcggttgttttattgagtctgcccgttgcacacaaaaataatgttgaatggtcttttatcgacgccctttttaccgcggtgagcgcagtgagtgtaaccggtttgacggttgttgatacagccgatacattcagcacggccggaatttggattttggcgtttgttctgcaatttggcgggatcggcgtgatggctttgggtacattcgtctggctgattttcggcaagcggatcggtttgaaagagcgccgtctgattatgaccgatcaaaatcaatccaacttatcgggcctcgtcaagctgatgaagcacgtgctcggcttaatcctgctgatcgagctgtttggcgggctgattctcggcacttatttcttaaagtactttgagacacctggagaagcctttatgcacggattttttacaagcatcagtgcaacgaccaacggaggtttcgacattacaggcaactcgctgattccgtttcagcatgattatttcgttcagtttatcgtgatgatgctgatcattcttggagcgatcggttttccggtcctcatcgaggtaaaggattttctgctcagcaaagagcgtaaattctctttcagcctgtttactaaattgacatcagtaacttttttccttttagtaattggaggtgcgatcggcatatttgccatggaagcgcgctttgctttttcagggaaatcgtggcacgaggtatttttcttttctctgtttcagtcgacgacgaccaggagcggcggactcgcgacgatcgatatcagccaattcacgcatacgaccattttgtttatgtgtatgcttatgtttatcggcgcttcgccaagctctgtcggagggggcatccggacaacgacctttgccttaaacctgttggccctgttccacttcgcgaggggaaataaatcggtgaaggttttcaaaagggaactgcaccaagcggacttgatgaaatcattgattgtaacgctgatggcggttattcttgttttcgtctcgacactcattttgacagtgacagaaaagcattctttgcttgaactgctgtttgaagtgtgttcggccttcggtacgacgggcttgtcgatgggcatcaccccagatttgagcacgattggcaaaagcgtcatcatccttctgatgttcattggccgaatcggcattgtcacgctgctttatttattcggcagaaaagaaatcgaagcgaattaccattacccgaaggaaaggatcattatcggataa

SEQ ID NO: 1598 - DNA, 2001 bp, Bacillus licheniformis
atgaaaaagagagtcatccatttgtttatagccgccggatttctattgctcgccggagcctgttctaacgagccgacagcaaaagaaagcatggaccaatatgtagacaaatggaacgagcaaaaatttgaagaaatgtatgaacagctgtcggctgaagcgcaaaaatcgatttcaaaagacgatttcatcaagcgtaatcaatctatttatgaacagattggagtttccgatttgaaggtttcaaccgtcgacaacgatgaagatgaaaaaaataaagagaaaaatgattcggtgacgataccgtataaagtcagcatgaagacattggccggtccggtttcttttcaaggcaaggcaaagcttgtcaaagaaaaaaaagacggagacacttcatggaaggtcaactggaaccaatcctttattttttcacagctgaagaaaggggagaccatccggattaccgccaaggagccaactagaggcatcatttatgacagaaacggaaaggcgctcgctacgaatgcgacagtgcctgaaatcggcgtcgttccggggcagctcggagatgataaagacggtgtcatcaaaaagctcgcgaacatgcttgatatggaaaaagaagacatagaaaaacagctgtccgcaagctgggtgacggacgattcattcgttcccctgaaaaaagtgaagcctggcagcaccgagcttctcaaaaaagcgacctctctccccggggttttgaagcaggatacgcagtcaagatactatccttacggtgaaaaagccgcacatcttaccggttacatacggccgattaccgaagaggaattaaaacagaataaagaaggctacagcgagcattcactgctcggaatcgtcggtctcgaacatatttatgaaaaagagctcagaggagaaatcggctggacgatttcgatccctgaatcaggcgcgacggttgcgtcaaaggatgcaaaagacggaaaagacatccacaccacgatcgacattaagaaacaggaagaactgtacagccagttaaaagatgactccggcgctgccgttgctttagaaccgcagactggagaaacgctggcgcttgtcagcgcgccttcatatgatccgaacgggtttttgttcggctggaaaaaaggagaatgggaaaagctcaacaaagatgcgtctgcgccattcacctctaaatttaataaaacttatgctccgggttcaacgatcaaaccgatcaccgcttcaatcggtctgaaaaatgatgcgatcaaagcggatgaacctaagaagatcgaagggaaggaatggcagaaagattcgtcatggggcggatataaagtcacacgggtttccgatcgactaagcgacgtcaacttggaaaacgcgctgatcacatccgacaacatttatttcgcccagactgcccttgatacaggcaaggatcaatttgtcgaaggcctgaaatcattcggctttgaggaaaagcttgattatgaattcccgacgaagtcttcctccatatcaaacgaaggaatcgactcggatattctccttgccgattcaggatacggacaggggcaaatgctgatgtcgccgatacaccttgcggcaagctatacgcctttcttgaatgacggtaatctgatcaagccgcacctgatcaaaaaggacggcgaagagaaagaaatatggcataaaaacgtactgcccacaggcggagcagaagcgattacaaaagggttaaaaggcgttgtagaagacccgcgcggctcggcttacaagccggttgtcaaagggcttacgatcgcagggaaaacgggaacggccgaactgaaaacgaaaaaagacgaaaaaggcaaagaaaacggctggttcaccgcctatgattacaaaaacaaaaaccttttaatcacgatgatgatcgaggatgtttcagaccgcggcggcagctcatacgtcgttaataaagtgaaaaaagtgtttaaataa

SEQ ID NO: 1599 - DNA, 162 bp, Bacillus licheniformis
atgaaaagaaaagttgccaggaatgaagcggctcttaacaataaaacgcctgctgaaagcatgcatgatcatcaatacatgacccaatatgacgccgaaaacggagacaggggagccaaccgcaactcgaaacacgggaagcagggagaatcgcaccaatga

SEQ ID NO: 1600 - DNA, 189 bp, Bacillus licheniformis
atgaaaaaacaccaaaaaagcaaggatatgcaaaaccataaaaaaccgatgaatcccgatgtgcttcaggaggaattttcgaacgaactgggcgatgtcaacgcctttaaatttatcgatgtgatcgagaacaataaaaagaagaacaaaaaggcggacggacagaagcgggataaagataaagaatga

SEQ ID NO: 1601 - DNA, 1026 bp, Bacillus licheniformis
atggcgaattcacgcgacagctatttcgacaacgcaaaattcctattgatttttctcgtcgtcttcggacatataatcaggtcctatattcatgacaatgatgcactgcttcatatttataaatttatttacacgtttcatatgcctgcttttattctcatatcaggctattttgcaaaagggttcaatcggcccggatatgtcaaaaaaatcgcctggaagctgatcgttccctatttgattttccagggaatctatacgctgttttattcctttatcgatgatcaaagcttaactgccgcaaatccgtttgaaccgcaatggtcgctttggtttttgctgagcttgtttttttggaatctcctgttgtttccgttcacaaaactgccggcgaaatgggcgtttgccgcaagctttgcgattgccgttcttgtcgggtatatcgacatgatcagcaacacgctcagcctgtcccgcacgtttgttttctttccggtctttttggcgggctattatttgcaaaaagaccattttaaaatgctgaaaggctggaaaggaaagcaagcggctctagccgttttatcagcaacgttcgttttctacttttttgcagacttcgattactcctggctgttcggttccaagccttattcggaattcggcgatgtcgggataaaaagcgggttaaaccgggtggcgcttctcgttataacatttgcctcaaccttcgcgttcatggcgctggtgcctgaaaggcggtatttctttaccctctggggaacgcgcacattctatgtctacctgctgcacggctttatcatcaagtcgttcagaaagacgggcgcggaagaatggcttgccgattatcagagtctgacgctattgttcatcgccacggcaattttaaccttctgcttatcaagcggatttgtgaaaacggtcgcccagccgttcatcgaattaaaaatgacgaatttaataaggctgttgaaaaaagacaacggatataacccttatttaaaataa

SEQ ID NO: 1602 - DNA, 2211 bp, Bacillus licheniformis
atggaggaaactcttgatttgaatgaatccttaaatctgcaaaaccagctgaacagactgaagaaagaaaacgccaagctgaaagcggatttgtatcagtatgagctgctgtttaacgggacgctggacgctatttttatattggataaacagatgaacatcattaaggcgaatgatgccgcctgcaagatcctgcaaagccaaaaaaagaatttgctgaaccggtcggcgctcgacttcctgcacgccgttccgccggatgaactaaaccagaacattcaccgcttcttggagcggggatatgcgaaaaaagaagtggccatcaggcttgacaacggatctgtcaaatatatcgaatttaccgcaagcaaaggaatcggtgaggactgcttttttgtcgtcatgagagacatttcgtctaaaaaaatattggagcgggagcgcaccatcaatgaaaagctgtttaaagatttgtttcaccgcgcggttgaaggaatcgtcatctttgataaacaaggctgtttcatcgatgcaaaccattcgttttgccagagcttcgaaattgaaaaatcagagctctcaaaactgaagctgtctcaattcgtatcgcctgaaaacaaggggcggctcgataaaatctggaacgctcttttcagaagagggaaggcaaaaggggagcttcctgtccgcctcagatcaggagaagacaggctgtttgagctgacgataacctcgaatattttaaatggcttttacatgtcgattatgagggatattaccgaaaagcgctcaatggaaaaacagctgtttaagagcgaagaacgctttagggaagtctttgaaaatgcgatggatgccatcattctgatgaataacgacggccgcatcgtcaaagcgaaccagtcggcctgcaaaatcttcgaactgccgatggaccagctgctcaacaagaagatgactgattttatagatcgaaccgatcagcggtatcatgccattcaaaagcagtacgatcaaaaaggggaaatccgggcggaactgctgtttcgtatggcaaacggacaatataaggagcttgagttcacatcaaaacggattatgttcgacagccaggacttaaccattttgagaaatgtcagcgacagaaaacgaatggaacaagaattgcgggaaagcgaattgaagttcagaaaagtattcaacggatcaatggacggaatcgttcttttcaacaaccagtacgatattatcgatgcgaacccccttgccggaaaaattctcagcatccctcttgaacagctgaaaacgtccaatcttcttgatgtcatctccggctatcacatcgaaaacgcggcttctcccgctaaaacgatttcctttgaagaaatggacaatgatatcccattcctgctgagcgaccaaaaacggatacttgaattttcatttaagcgaaacatcattcaaaatatgaatctggcgatgctcagagacgtgacggaacgaaaagagcttgaagagcggctccgcaagtctaataccctccatgtcgtcggagaactcgcagccggaattgctcatgaaatccgcaacccgatgacggcattaaaaggatttatccagctgctgaaaggcagcatccaaaatgaggatcacgcgctttactttaatgtcatcacatcagagctcaaaaggattgaatccattattacggagtttctcatccttgcaaaaccgcaggcgattatgtatgaagaaaaaaacatcgtcaaaatcatgcaggacacaatggatctgctgcatgcgcaggcaaaccttgacaacgtccagatgcatctgaagtgcgaagacggcattccgctgatctactgcgagccgaatcagctgaagcaggtatttatcaacattttgaaaaatgcgatcgaagtaatgcccgacggaggcaatgtatatgtgtcgatcaaaccgaaaggagacgaccatatcattgtctcgcttgctgacgaaggaatcggcatgacagaagacaaattgaagaggctcggcgaacctttttacacgacaaaagaacggggcactggactcgggctgatggtcagttataaaattattgaagaacataaaggaaaaatcgaagttgaaagtgaagaagggagaggcacgacattccacctgactctcccgatcagacagcagcatgaggaggaggcttaa

SEQ ID NO: 1603 - DNA, 498 bp, Bacillus licheniformis
gtgggcttttatattgaaatgacctcgccttttggacaagcctacatcgtcgaggaaaataaccatattacacatttgctatttgaaaaagaagaactaaaacagcttcaacaagacggcctggagcttcgcccggccgaaacggaattgttgaaggaggcaaagcgccagctcgaagaatatttccagggggagcggaaaacgttcacccttcctctccgccaggatggaaccccgtttcagaaaaaggtgtgggaggcgctgcagtcgatcccgtacggtgaatcacggagctatttagacatcgcatgcgccgtcgggaatccgaaagcggtgcgcgcaatcggccaagccaataaaagaaatgcgctgccgattttgatcccgtgccaccgtgtcatcggcaaaaatcgttcattgacggggtattccggaaatgaaacggataaaaaagcggtgctgctcgacatcgaaaatattgcgtataaaggaaaataa

SEQ ID NO: 1604 - DNA, 114 bp, Bacillus licheniformis
gtgaaaacaaaccgcccgaaaaaaatagcaggatacgcggaattgttcgtcaagctgcacgttttgaccgaagagcaaaagaaagacatcatcaaatcgattaaaatccgctaa

SEQ ID NO: 1605 - DNA, 1062 bp, Bacillus licheniformis
atgccggaacaatttgcggtgccccgttctgtcgaatgggaagaaacatcggtaaaaatcctgaaccagcaaaagcttcccgaaaagacggagtacctgcatctcacaactaaagaagacatctatgatgcgatccaaacgctaaaagtgaggggagcgcctgccatcggcataacagccgccttcggactcgccctttgcgcacaaagcatcgatacatttgatgtttccgcttttctgcgggagctccgcaaaatcaaagatgaactcaatcaggcaaggccgacagccgtcaatttatcctgggccctcaatcggctgttaaaaagcgcagagggcgcaaaatcggtcaatgaggcaaaaacaaacctcgtccacgaagcgattcagatccaggttgaagacgaagaaacatgccggcagatcggacagaatgctctgcatttgttcaaatcgggcgacagcatcatgaccatctgcaacgccggctcgatcgcgacaagcaggtacggaacggccctttccccgttttaccttgccaaaacaaaggatctcgaccttcatatttacgcctgtgaaacaaggcctgttcttcagggggcgcgcctgacggcgtgggagcttatgcagggggggattgacgtgacgctgattacagacagcatggctgcccatacgatgaaggaaaagaacatttcagccgtcattgtcggagcggacaggatcgcaagaaacggagatacagccaataaaatcggaacgttcggcttggcaatcctcgccaaagcctttcaaatcccgttttttatcgctgctcccctgtcaacttttgatgtctcgatttcatgcggcgacgacattccgattgaagaacgcgatccggatgaagtcagacggataaacggaacgcaaatagcgccgcaagaggtgcctgtgttcaatcctgcttttgatatcacgccgcacgatttaatctctggaatcatcacggaaaaagggattatcacagatagatttgaagaagaaatcgaagcgctgttttccgctgaagcccttacttag

SEQ ID NO: 1606 - DNA, 1197 bp, Bacillus licheniformis
atgaccgtaacaaaaaccgcagcatacgaaactttgactgaaagctccgcggccgcgcttgccgtccgtctcgggctttttccaagcaaaagcaccctgacatgccgagagatcggggacggaaacctgaatctggtcttccgcgtttatgacaaagagcagcaaagaggattggtcatcaagcaggcggtgccttatgcaaaagtcgtcggcgaaagctggccgctgacgcttgacagggcaagaatcgaaagcagtgcgctgatccgccaggctgagcacgttccgcaccttgttccgaaagtgtactattctgacaccgagcttgccgtcaccgtattggaagacctttctcacttggaaatcgccagaaacggactgattgacgggaaggattacccgcatctgtcggaagatatcggagaattccttggaaaaacgcatttttactcatcagaatatgcgcttgacccaacggttaaagagcggcttgtgaagcagtttacgaatccggatctgtgcgatattacagaaagccttgtgttcacagaccctttctttgaccatgagacgaacaatttcgaagaagagcttcgcgatgaagcagaagttctttggggcaatgaagcgctaaaaattgaagcggcaaaactgaagcagcgctttttatcagcggaggaaacgctgatccacggagacctgcatacaggcagcattttcgccggcgaagatggcgaaacgaaaatcatcgaccctgagtttgcgtttttcggcccgatcgggtttgacatcggacagtttatcgccaacctgctgttaaacgcgctttctcgcgaagaaaacaggcgggctcctttataccgccatgtcgagaccgtctggaatacgttcagccggacattcagcgaagcatgggaaaacgatgctgttgagacttgcaaacatgagaatgggcgccttgagtcagtcctgagacaggcgtttgaagacgcagcaggcttcgccggctgcgaaatgatccgccggacgatcggcctcgcccatgttgcggaccttgatacaatcgttccattttcccggagaatcagccaaaaaaagctcgcccttaaaataggcgcagcattcatagaaaaacgcagcggtttccggacgccaaaagacatgattgaagcgtttcgaaacgcgcttaaggagtga

SEQ ID NO: 1607 - DNA, 780 bp, Bacillus licheniformis
gtgaagctgacaatttcatgcctgcaattcgatatcgcgtacggcaaaccttctgaaaatttcaaaaaagcggagcagctgatcgagcaggaaagccggaaggcggatatccttctccttcctgagctgtggacgacgggttatgatttaaaaaatctcggctccatcgcggatgaagaaggcaggcaaacgaagagatggctgcaggaaacggcaaaagcaaaccgcatccatatcgtatgcggctcagtcgcagtcaagaaaaaaagcggtgtgtacaatatcatgtacatcgcagacaaaaacggacatttgatcaaagaatacagcaaagctcacctttttcagctgatggacgaacacctctatttgtcagcgggctcaggcgacgggcgcttcgagcttgaagggatgccggctgcggggttcatctgctacgacatccgtttcccggaatggatcagaaaacatacgagcgaaggtgcgggcatcatctttgtatcggcggagtggccgctcgcccgcctcgatcactggcaaagccttttaaaagccagagcgattgaaaatcagtgctttgtcgcagcctgcaatcgttcgggaaaagacccggcaaacgaatttgcgggccacagcacagtcattgatccgctcggctgcacccttgctgaagcaggacgcggagaagcggtcatcagggccgaaatcgacctaagggacattgaaaaagcgcgggggcaaattccggtttttgaggacattcgcaaagatttatattaa

SEQ ID NO: 1608 - DNA, 1191 bp, Bacillus licheniformis
atgaaatttgagcattcagatgtactgaagcagctgccggagcagtttttcgcttccttggtcaaaaaggtgaatgaaaaaattgccgccggccatgatgtcatcaatctcggtcaggggaatccggatcagccgacaccggaacatatcgttgatacaatggcgcaagccgtccgcaaccctgaaaaccaccggtattcttcctttcgcggcagccgttcactcaaggaggcggcggccgcgttctatcaaagggaatacggcgtagagctcgatcctgaacgcgaagtcgctgtattgttcggcggaaaagccggtcttgtcgaacttccgcaatgtttgttaaatccgggggatacagtgctcgttcccgatcccggctatcccgactactggtcgggcgttgaactggcaagagcgaacatggaaacgatgccgcttacagcggacaatcagtttctgcctgactacagccggattccgaaggaagtgaaagaaaaagcgaagctcatgtatttaaattatccgaacaacccgaccggtgcccaagccacatctgcttttttcgaagagaccgtccggtttgccaagtcgaacggaatttgcgtcgtccatgattttgcctacggcgcgatcggctacgactgcaagaggcctgtcagctttctcgaaacggcgggagcaaaagacgcaggaatcgaaatttacacgctttccaaaacgtataatatggctggatggcgggtcgggtttgcagttggcaacgcctctgtgatcgaagcgctgaacctttaccaggaccatatgtatgtcagcctctttaaagcaatccaagacgccgcggcggccgcgctcctatcagatcaagcgtgtgtccaggagcaaaatgagcgctacgaaaaaaggcggaatgtatggatccgcgcggtcagcgatatcggctggcatgcggatgctccgcaaggatcttttttcgcctggatgcctgttcccgacggctatacatctgaggctttttccgatctgcttctcgaaaaagcgaatgtcgtcaccgcgcccggcatcggcttcggcaaacacggggaaggctatgtgagagtcggcctcttgacaagcgaagagcggctccgggaagcggcttcgcgtattgccgagctgaatatattcaaaaagaccggccacagtcattga

SEQ ID NO: 1609 - DNA, 1218 bp, Bacillus licheniformis
atgagtgaacttttggcaacatatatcttggccgatccaggctgtgacgcagaaaagcgggccgagcaaatcgcgatcgggctgacggtcggatcgtggacagatctgccgctcttaaagcaggagcagctgaaaaagcataaaggacgcgtcgtcaacgtcgaagaaacagaaagcgagctgggggaaaaacaggcaacggtcaccatcgcctatccggaagccaattttacaaacgacattcccgctgtgctgacgaccgtttttggaaagctgtctctcgacggaaaaatcaaattggcggatttggagttttcgcggtcttttaagcaatctttgccgggtccaaaattcggcgtatacgggatccggaaaaaaatcggcgaatttgaaaggccgctgttgatgagcatttttaaaggcgtcatcggccgcgatatggaagacttgaaggaacagctgaggcagcaggctcttggcggagtggatttgatcaaggacgatgaaatcctattcgaaacaggcagtgccccctttgaaaaacgaatcacggaaggaaaaaaagtgcttgaggaagcctttgaagaaacagggcgcaaaacgctgtatgccgtcaacctgacgggcaggacaatggagctgaaagcgaaagcgagaaaagcagccgagctcggagctgatgttttgctgcttaatgtgtttgcctacgggctcgatgttttgcaaagccttgcagaagacgatgacatcccgctgccgatcatggcgcacccggcagtaagcggcgcacttacttcatcgccgcattacggtttttcccattcgctcttgctcggcaaactgaaccggtatgcgggtgccgatttcagcctgttcccttctccgtacggaagcgtcgctctgccgaagcgagatgcgcttgccatatacgatgaatgcacgaaggaagacgtctttaaaccgacattcgcggtgccgtcggccggcattcaccccggcatggtcccgctcttgatgaaagactttggcattgaccacatcatcaatgcaggcggggggattcacggccatccaaacggggcggcaggcggaggaagagcgtttcgggcggtcattgatgccgtcttagaagcggagcctgtcgaagagaaagcaaagcgctctcccgatttgaagctcgcccttgaaaaatggggaagggttgaggtctctgtatga

SEQ ID NO: 1610 - DNA, 1284 bp, Bacillus licheniformis
atgagaaatccgcttatcatttgcgattttgacggaacgatcacaacaaacgacaacatcatcagcattatgaaacaatttgctccagaagaatggaccgctctaaaagacggggttctgtccaaggacatatcgattcgggacggagtcggcagaatgtttaatttgcttccggccagcctgaaagaagacattacggcatatgtactgaaacaagccgagacccgccccggatttaaagaatttgtttctttcctggatgagaagggtcttccgttttacgttgtgagcggagggatggattttttcgtctatcctctgcttgaaggaattgtcggaaaggaccgcatttattgcaacgaggccgctttcaccggccgcaatattgagatccgctggccgtatccgtgtgacggcggctgcggaaatgaatgcggctgctgcaagccttccatcatccgccggctgaaaggccgggacgatttcgttgtcatgatcggggactctgttacagatgttgaagctgccaaatgttccgatttatgcatcgcgcgcgactatttgctgcgggaatgtgaagagctcggcttgaagcatgcggcattcggcgatttccacgatgtaaggcgaatactcgaagagaccgcggaggtgaaagaatggatgtctgagcaaaaacggcaggaactagccgaggtaaaaaaagagcttgcggaaagggattggttcccggcgacaagcggtaatctgtcaatcaaagtatcagaagacccgctgcggtttctcatcacagcaagcggaaaagataaaagaaaagagaccgaggaggattttctcctggcggacgaagaggggaggccggcggagaccggacacgcgctgaagccgtcggcggagacgctgctgcacacctatgtctatcaacacacaaacgccggctgctgtcttcacgtccacacggttgacaacaatgtcatctcagagctttatgcaaaagaaaagcaagtgacattcaggggccaggaaatcataaaggcgctcggactttgggaggagcacgcggaggtcacggtcccgattatcgaaaacagcgctcatattcctgatttggcggcggattttgccgggcacctttcaggcgattcaggcgcagtgctgattcgcagccacggcattactgtctggggaaaaacggcatttgaggcaaagcggatgcttgaagcatatgaattcttgttcagctggcatttaaagctgaaaactttgcaggcttatcacgtttaa

SEQ ID NO: 1611 - DNA, 540 bp, Bacillus licheniformis
atggcgacaattcggatccatgatgaacaaaacacgagcattgaaaaccaggaagaagtagaacaatttctaaagcggcaggaggtcatttatgaaaagtgggatatcacaaaactgccggccggtttaaaggaaaaatacgatttgaccgatgaagagaaacaggagattttagacgtctttgccgctgaaatcaaagacatttcagaacgccgcggctataaagcgagcgatgtcatctcgctttccgaccaaaatccgaaactcgatgagcttttgaaaaacttcaaacaggagcatcatcatacagacgatgaagtcaggtttatcgtcagcggccacggcatctttgcgatagaaggaaaagacggcacattttttgatgtccttttaaatccgggggatttgatctctgttcctgaaaacacccgccattatttcacgcttcaggaagaccggaaagtcgtggctgtcagaatctttgtgacgacagagggctgggtgccgatttatgaaaaagagagtgtgaaccagtcataa

SEQ ID NO: 1612 - DNA, 330 bp, Bacillus licheniformis
atgcgccaaatgatgaaaaaaccagtttcaaagctccgaaccgtctttgccgtgaaagaagcatattcaggcctcttattgtttttcagggcatttagagcctggagaaagggagactaccccttattcccgaaaaaaacaattttgctggccgcgctggcatttatctatgtgctgtcaccgatcgatttgatccccgatgttctcgcaggcgtcggctggcttgatgatgcggctgtgctcgcttttctcttcaggcaaatcaccaaagagctggacgggtttgaaacacatctaacagggagagtaaattacaatggaaaacaataa

SEQ ID NO: 1613 - DNA, 243 bp, Bacillus licheniformis
atgcaaaggtatattgaaaaagaagcattgctcgtttccatcagcaagaagcggcaaatgatggttgaagccgctgaaatctatggatatacaggggatgaaacgatcaggcggagccaggagctggatcaattaatttatgaatatcaaaaattgtctatgaatgaaaacgcgccagacaatctgctgcaagattttttaggctgcatcgactgtctgcccgttgaaaaatatacggcatag

SEQ ID NO: 1614 - DNA, 1512 bp, Bacillus licheniformis
atgcgcaatttgaaaagtatatggaagaaaatcaggctttatttgatcttggtgatgatccccgccttcattataagcttttttgtatacgaacaagaacgagaaaatatcactgaaaagcaccgtcagactgcgactctcatgctcaatattcaccgcaaccaaatcaattacctgatcggcgaaacagaagcaaggctcagctcccttgccacggccctcaaccaccctgttaatgagcagcatatcaaacgaatcctgacggaaacgtataaaaaagaaccgcgtttttcggctttataccttttaaatgaagacggcgatgtcatggtgagcacgtctcccgccaaagaaaaaaaggcgctttcttacaagagcattctgcaaaaagcggaaaaatcaaagaaatccgtgatcacagacgatatacatacagtgtcggacgggctggagctgaatatttttactccggtctttgacagcgaagggagaacaacaaattttctgctcgcttcgatccgcgtcgattatctgaaaaatatcatgaacgtcttgagccctgagctttatatcaaaattctcaatcagaagaatcagatcgtctttacggcaggccattctcctcctgagaagccggacggcggtaccgtcgacgcttttttggaccagatcgactggaagcttgaagtctatccggaaccggtccagcttgatgaaatcgttcacagtcttctgctgtcatttttgagtattttcattctgctgaatattatgttcctcctgctccagtatgtcctgctgaagcggcggaccaagcaggagcgcgcccaaaatgaagcgcagaagctcgaattaatcggcaccttggcggcgagcaccgctcatgaaatcagaaacccgctgacaggcatcagcggctttatccagctccttcaaaaaaaatatcaatcaaaagaagatcaaatgtatttctcaatcatcgaccaggaaatccggaggatcaaccagattgtcagcgagtttctcgtgctcggaaagccgacggcagagcagtggcagctcaactccatgaatgaaatgattgacgagatcatgccgattattcattctgaggcaaatttatataatgtggaagtggaatttcaagactgcggagaagatccggcttatgtgtattgtaaaaaggatcatattaagcaggttgtcttgaacgtcgccaaaaatgctcttgaatcgatgaaaaacggcggaaagctggtcattcaaatcgaacatgatcaagagaaggcgcaaattattgtgaaggatatcggagaaggcattccacaagaaatgatggaaagtattttccagccttttgttacatcaaaagaaaaaggaaccggactcggccttgtcgtgtgcaagcgcatcatttccatgtacgggggaaccattcatatcgaaagcgaacggcataaaggaacgactgtaacgattacgctgccgacttcaaaggaacaggacgactga

SEQ ID NO: 1615 - DNA, 456 bp, Bacillus licheniformis
atgagtaatagagaacaggaacagtccttgaagttatttattgtattatctcgagcgtacagatccattaatgatcatatgaataaacatattcatcatcatggtctgaatccaaccgagtttgccgttttagaactcctctatcataaaggggatcagccccttcagcaaataggggataagattcttctggcgagcgggagtattacatatgtggttgacaagcttgagcaaaagcagctgatcacgagaagagcctgtacgacagaccgcagggtgacctatgcgcaaattacagataaaggcaccgagctcctcgagaagatttttccgggtcatgcagaagagctgcacaacatgatcagcgtattaagcgatgaggagaaagaagcctgcatcgaaatgctgaaaaaagtcggactgaatgcaagaaatatttataagggcaaagagtaa

SEQ ID NO: 1616 - DNA, 780 bp, Bacillus licheniformis
atggctagaaaaaagaagcacaaaaaagaccatgaagaacacgtggatgagtcttggctcatcccatatgcagacttgctgacactgcttttggccctgttcatcgtactgtttgccatgagctcgatcgacgccaagaagttcgatatgctgtcaaaatcatttaatgccgtatttaccggcggaacaggaatgatggattattccagcttcaccgagccgaaaacgagcacaaccgaagatggaaaaagccctgaccaggcaaaagatctctccgaagctcaaaaagaaaaagacaagcagtcgctgaaaaaaattcaggagcaggtcaaccggtttattaaagagaagaatcttcaaaaacaggtcaatacgaagctgacagacgagggcctcctcctttccatcgaggataatatctttttcgattccggaaaagcggagatccgccagcaggacattccgctggccaaggaagtatccgaccttctcgtattgaacccgccccgcaatatcgtaatcagcgggcatacggacaatgtgccgattcgaaattctcaatttaaatcaaattggcatttaagcgtgatgcgggctgtcaatttcatggggcttttaatcgaaaatccaaagcttgacgccaagatcttcagcgcgaaaggctacggggaatttaaaccgatcgcttcaaatgacaccgaagaaggaagaagaaaaaacagacgcgttgaaatccttatcctgccgatcggccaggaaaatctgaataaaaaagaataa

SEQ ID NO: 1617 - DNA, 804 bp, Bacillus licheniformis
atggacaaaacatcgttaattggaatcatcttagctatcatcggagtaggtgtcggcatggtcatgaaaggtgtcagcccttccgttctcgtcaatcccgcggcatggctgatcatccttgtcgggacaatcgcagcagttgtgatcgcttttccaatccgcgagctcaaaaaggttcccaaactcttcggcatcttgttcaaagagaagaagatgatcgaaatcaacgaactgatcccgatgttttccgagtgggcgcaaatcgcaagacgcgaaggacttctcgctttggaagcaaatttgaatgagatcgatgatgaatttttgaaaaacggcatgagcatggcggttgacggtcaaagtgccgattttatcagggacgttttaactgaagaagttgaagcaatggaagaaaggcatcaagtcggagcgggtatttttacccaggcaggcacatatgcgccgacactcggcgttttgggcgctgttgtcggactgatcgccgcacttgcggatatgagcgacacagaagcgcttggacatgcgatcagcgccgcctttgtcgccacccttctcgggatcttcaccggatatgtactatggcatccttttgccaataaattaaagcggaaatccaaacaggaagtcaaagtccgcgaagttatgattgaaggcatcctttcgatcttggaaggccaggctccaaaagtcattgaacaaaagcttttgatgtacgtttctccaagcgaacgctccagcatcgtcatcccagatggagacaaaggggacagcagcaatggctag

SEQ ID NO: 1618 - DNA, 2097 bp, Bacillus licheniformis
atgcgttgtcaacattgtcaaaaaaatgaggcgacgattcgcctaaacatgcaaatcaactttacaaaaaaacaaatggatttatgtgaagactgctataaagagctgactcagccttctatgttttcaggaaatcacttttttggcggcggaggttctttcttcagccagccatcacaagcgcagacgcaaaccgctgccaaaaaaggcttgctcgatgaacttgccgtcaatttaacaaatgcagcaaagaccggcttgatcgatccggtgatcggccgcgatgatgaagtagcccgtgtgatcgagatcttaaaccgcagaaataaaaacaatccggtcttaatcggtgaaccgggcgtcggtaaaacagccgtcgctgaaggacttgctctcaaaatcgccgaaggcgatgttccaaataaattgaaaaacaaagagctctacctgcttgatgtcgcttccctcgtggcaaacaccggcatcagagggcaatttgaagaaagaatgaaacagctgatgaaagagctgaaagaacgcaaaaacgcaatcttgtttattgacgaaattcaccttcttgtcggggccggctctgcagaaggctccatggatgcgggcaacattttaaaacctgcacttgccagaggcgagctgcaagttatcggcgctacgacgttgaaggaatatcgccaaattgaaaaagatgcggcgttagagcggcgcttccagccgatcatggtgcacgaaccgacaattgagcaggccgcagcgattttaaacggtctcaaggaaaaatacgaagcatatcacgatgtgacttactcggatgaagcgatcaaagcctgcgtcattctgtcaagccgctatattcaggaccgccatcttcccgataaggcgattgaccttttggatgaagccggttcaaaagcgaacttgaaaatcgacacggtcagcggtgaacaagcttcccaacgcctgcaagaaatcgaagcggaaaaagccaaagcgcttcaagaagaaaactacgagcttgcagcaaaactccgcgacgaagaagaagcgctgcataaaaaaatggaaagccatgaggaagaaaaacgggcaacagttgaagcggaagacattcaagcgatcatcgaacaaaaaaccggcattccggtcggcaagcttcagcacgacgatcagaagaaaatgaaagagcttgaagcaaacctttcaagccgcgtgatcggtcaaaaagaagcggtgaaaaaagtggcaaaagccgtcagaagaagccgcgccggcctgaaatcaaaaaacaggcctgtcggttcattcctgttcgtcggcccgacaggtgtcggtaaaacagaactttctaaaaggcttgcggaagaactgttcggcacgaaggatgccatcatccgcctcgatatgagcgaatacatggaaaaacacgccgtatcaaagctgatcggttcacctcctggatatgtcggccacgaagaagccggacagcttaccgaaaaagtccggaggaacccgtacagcatcgttttgctcgatgaaatcgaaaaagcccatcccgatgtccagcacatgttcctgcaaatcatggaagacggacgtctgacagacagccaagggcggacggtcagctttaaagataccgtcattattatgacaagcaatgccggtgtatctgaaaagcggacaaccgtcggttttaaccgggaagagcaagtaatgggcgaacaatcaatgatcgattcattaagcggctactttaagccggaattcctgaacagatttgacagcatcatcgaattccagccgctcgaaaaagaagatctggtcaagatcgccgccctcttgctgaaagagcttgaagaaacgttaaaagagcaaaacatgacgctcgaagtttcagatgaggcaaaagaaaaaatcgctgaaatcggataccatccggcctttggcgcccgcccattaagaagaaccattcaaacagcggtcgaagatcaaatgaccgatctgctgcttgaagaagaacacatcaaaggttttgcggttatcgttgaaaacgatgaaatccgggtgaaaacaaccagataa

SEQ ID NO: 1619 - DNA, 105 bp, Bacillus licheniformis
atggtcaaactgcagaccattttttctaagtcaattggtcaaaaaaggtcaaattcaataaagggggttttggcaaatgcgttgtcaacattgtcaaaaaaatga

SEQ ID NO: 1620 - DNA, 1035 bp, Bacillus licheniformis
atgagtcaatcacaaggatcagcctttcagctggcatttgtttatgtaggaacggttgtcggagccggatttgcaactggaagagaaatcgtcgagttttttttaagattcggctggccgggattggccggaattttgatcagcggactgatgtttacgtttctcggtgcaaaaatgatgctgattgcggtcagaatcaatgccaagtcttatcaggagctgaataaatatttattcggccatacgcttgggaaatttgtcaatgtcttcatgctcgtggttttgctcggcgtgacgtccgtcatgctgtccggagcgggggcgatatttgaagaacagctcggcttttcaaaccaagcggggatgattgcgacgattgccttgagtctgtttgtcatgatgaagggcgttaaagggatattcggcgtcaatgtcattgtcgttccgctgctgcttctgttcacagttgtcgtcctgtttgactcgtttattttcagagggccggagatacacaatttggcggcattttcggcaaaccccgattggattttatccgctgtctcgtacggcgcttttaatttgtcgctcgcacaggctgttctcgtgccgatcgcttctgaactgaaatccgaacgcctgattataaaaggagcattaatcggaggggttctgcttacccttgtgttggtcgcaagctttctgtctctttcaacattgcctgatgcccttttatatgaagtcccgatggcacaggtcgtattcatagtccagcattctgtccatatcatctatctgtttatcattttcggggaagtcttcacatcagtcatcggcaatttatacggtcttgaaaagcagattaatgaatatattcatataaaaagcctgtatgtgtttatcttcatcctgctgacaatctacttgacgggacaaatcggctacggaaagctgatatcgaccatttatcctttgttcggccagctgagcctcgtctttattttctttctgatcgtcaaaagggtgcctgagcgatga

SEQ ID NO: 1621 - DNA, 660 bp, Bacillus licheniformis
atgaaacaggaaaaagcgatcgtcgtattcagcggcggtcaggacagtacgacttgcctattgtgggcgcttcggcaatttcaggaggtggaggcggtcacgtttcaatataatcagcggcacaagcaggaaatcgaagtcgcgaaaaagatcgctgcaaagcttggcgtcaagcatcaccttcttgatatggaactgttaaatcagctcgcgccgaatgctttgacaagggatgatatcgagattgaggcgaaagaaggcgagcttccgtccacttttgttccgggacgcaacctcgtgtttttatcgttcgcttcgatcctggcctaccaggtcggcgcgcggcacatcattacaggcgtatgcgagacagacttcagcgggtatccggattgccgtgatgagttcgtcaaatcctgcaatgtcactgtcaacttggcgatggagcgcccgtttgtcatccatacgccgcttatgtggctgaacaaggcggaaacgtgggagctcgccgatgagcttgatgcgcttgatttcgtgaaaaacgagacgctgacgtgctacaacggaatcattgccgacggctgcggcgaatgcccggcctgcaagcttcgcgcaaacggctacaatgaatatatgaaaatgaaaaaggagcgagcttaa

SEQ ID NO: 1622 - DNA, 441 bp, Bacillus licheniformis
gtgcttacacaaatttatccgcaaccaagccatccttactcttttgaattaaataaagatatgcaaatgtcagctgcacattttattccgagagaggatgcaggcgcatgcagcagagtccatgggcatacgtatacaatcaatattacgattgccggggatgagttgaatgcatcaggtttccttgtcaacttcagcaccattaaaaaattgatccacggagaatacgatcatacgcttttaaatgatcatcaggaattttcaggtgaaagcgcggatcggatcccttcgacagaagtcgtggccaaaacgatttacgataaagtagaggcttatttgaaagatctcaacaaccgtccgcattgcgtccaggtgtttgtcagggaaacgccgacaagctatgtcgtgtaccgtccgaaaccgggtgttcagcatggctaa

SEQ ID NO: 1623 - DNA, 732 bp, Bacillus licheniformis
atggctaagccgattcccgtacttgaaattttcggtccgacggttcagggagaggggatggtcatcggccaaaagacgatgtttgtcagaacagccggctgtgactattcgtgcagctggtgcgattcagcttttacctgggacggttcggcgaaaaaagacatcaaatggatgaccgcggaagaagtgtacgaatctcttaaagacatcggcggaaacgcattctcgcacgttacgatttcaggaggcaacccggcgcttttaaaacagctggacggactgatttcccttttaaaagaaaacggtatacggacagcgcttgagacgcaaggaacgttttatcaagactggtttaccggaatcgatgatttaacaatttcgccaaagccgccgagctccaatatgaaaaccgattttaacaggcttgatcatattgttgacaggctgaaggaacacggccgggcggctgcggcaagtttgaaggtcgtcattttcacggcggacgaccttcaatttgcaaaacaagttcaccagcgttatcccgatatcccgttttttcttcaggtcggaaatgatgacgttcatacagaagaccaagagcggctcgtcgaacggctgctccaaaaatatgaacagctggtagaagcggtcacgcgcgaccctgaattgaaccgcgtccgcgttctcccgcagctccacaccctgatctggggaaacaaacggggtgtttga

SEQ ID NO: 1624 - DNA, 498 bp, Bacillus licheniformis
atgacgacaagaaaagattcagaactggaaggcgtaacccttcttggaaatcaaggcaccaattatttgtttgactattctccggaagtgcttgagtctttcccgaataaacacgaaaacagggactatttcgtgaaattcaactgccctgaattcacatcgctgtgcccgaaaaccggacagcccgattttgccacgatctacatcagctacatccctgataaaaaaatggtagaaagcaagtctttgaaactgtatctcttcagtttccgaaaccacggcgattttcacgaagactgcatgaacatcatcatgaacgatttaattgagctgatggacccgcgctacatcgaagtctggggcaaattcacgccgaggggcggaatctcgatcgacccgtacaccaactacggcaagcccggcacaaagtatgaaaaaatggccgagtatcggatgatgaaccatgatctgtatccggagacgattgataatcggtga

SEQ ID NO: 1625 - DNA, 1059 bp, Bacillus licheniformis
atgtatatgcgggggagacgaagaccggcgattaaacatagtgagaaaaatacatacgaaagtaagactctgtctgatgtgtgtaaacaaatttgtaacgtaaaaatgtctgaaggacttacgaaagaaacaattgatcgctatcgccgggtttgtgagagtgtggaagaattcgcggaaattaaaggactgtccaccagtgttgaatctatagatgtcgagtttgcgaggcagtacatgacctatatactgcacgagaagaaaacgtttaagggacaccgttataaaccggaaagtgtgaaaactccagggtgttctccgaaatatgcaaatgaccacctgaaaactatgagagcagtttttactttctgtataaaggaaaatatgatttcggaaaatccatttcaaaaaataaataaagtcaagcagccggaacctgtaattcaaatattatctgtagaggagatgaagcagcttttaaaaacaccgaataagcgaaagttctctgagtttagagattacgtggttatgatgtgtttaattaactctatgtgtagaatcggagaaatcgtcactttagagatcgaaaatataaattttgagttgagctacattattcttgaagctcaaaaaacaaaaacgagaaaaggccgtatgattccattagataaaaatacaatgcggctgcttaaaaagttattgttaagaaatacgcgatttaagcctagcaagtatgtcttcattacggaggaagggacaagactaacgaccgacaattttagaaaacggcttgcggattacgctcatcaggcaggaataaataaaagagtccatccgcatttatttagacacactgcggcgagcatgtttttgcaggcaggaggggatcttaggcacctccagacgatcatcggccataaagatttacgtatggtattacgatatactcatctgtcgttagaatccctcgcaaggcaacagagtgaatattcgctaataaaccaagtggtagatgggttaaataagccaaggaagacaaaaagaaaatacggaaggtag

SEQ ID NO: 1626 - DNA, 978 bp, Bacillus licheniformis
gtgactcaaaagaaaaaaattttctcggtagaagaaagtcttcctgatctctctggaatgtttaataatatctcggcatcgccaaacccaaagcaaattacaattgaaaaagcacttacaattattctccgacagatggaagtaagcgggaatagggtgcggacaattagcgattaccatcttcatgtatcacattttaaggaatcagaagaattaacatatctacatgaaattacatataagtcgattcattcatggcttggaaacatggatgtcagtgcacaaacaaggctcacgcgtttgaaatgtctcaaagcatttttatcgcgttgtttcgataatggatggttcgaatcgaagttttggaagaacgtaaaggtgaaggtcgacaataacgttaaagagggggcgacggatcaggaaatcaaaatcttactttcgttattagatttaaccgactttgtacagctacgtgatgcgacagcattgcttcttatgtataaaacaggtatgcgtgtagggacgctcgcaaacttaaaagaagaacatgtcgattttaatggagaattacttcggttaagtggtgaaatcgttaaaaatcgagaacctttactactgccctttgatgagactctcgctcaacttctctctgtactggtgaataaaaacgccgaaatccgccgagcatataagaaggacaataaatttgtttttttaacaaagtacggcaatcaaatagcaacagggccgtcgaataacaatattcaaaaacggttgaacaggtatgcgcgcgagtacggattaaagaatataaatccgcacgcattaagaaggggctttgcgaaatccttgcttgaaaaaggcgcaaatttaactgacatttcaagagcgctgggacatagtgatctttcggtaacgactaaatatttatatttagataagaatgaagtggccgagaatttgcggaggtttttgtga

SEQ ID NO: 1627 - DNA, 333 bp, Bacillus licheniformis
atggaaaatttcaataaactcgcctcactcaacaacttaaacggtgatcaagaagatacgctcctcatacggcgcaatcagcttcaaatgctgaaaacgggcatgagagtaacggccgcaactaagcttgaaggcattaaaacgacactaagaccgaagtttaaaatagacgatatacaaaaagaaatgaacagcgtttattcatcgcttctctacagctttgaaggaaaagcgcaagaggcgctcgctcagcgaatcagtcaaagcgcccagcagcttattgcgacagataaggatggagaaagttttgtgaatggatttaagacaagatga

SEQ ID NO: 1628 - DNA, 1431 bp, Bacillus licheniformis
atgagtgataagataaaagttccaaaaataacagataaaacttattatacgctaagtcaggaatcttacaaccgcgaaagattagatgataaattgaaaacgggaaaaccgatacagacagaccaaaaaacttattggtatgtcgaaaaaattaaaagagactctgatacgggacttgatgccgttgttttttctcagggtcaaaaaacaaaagacggcaagtgggtcaaatctaatagccccaaaaacgttgtcgtagccttcgctggaacaaatcctaaagaacagttttttcaagatgttattgacgctgacggcgggaacgttgtaatgggaattgacccgaaaaagaaggaacactacatagtcgaaaaagatgcgaaagatacttctaaaacactcggaaaatataacggaactccttcacaagacgcaaggcttagcaccggcgattataaattggttacgaaaacatcgcaaatcgatcaagccgatcaacttgtgcgggaagttaaacaaaagtataaaggtacctcgacagttatttcaacaaccggacactcgcttggcggcgctgaggctgaatatagtgcggtcaacaataatgtctatgccgtcgcatttaacagcccctcaattgttaagctgcattctgaggagcaacaaaagaaaattaataacggcgagtatgaccgatccataaaatcgattatcaatccggatgacatggtcggggccggctggtggaacgaatatgaccggcacaacggaacaacaatttatacgaaggaccctgaattatcaaatgcggtgcgcgaggcgagaatgcagggcgatgtattccaacaaatcgggcaaaacgctgggtatttctttcagaccgcaatcttaggaatgcctgatacgcattgggtcgggagtaataatttcaccttcgacaaaaacggaaacgttcaaaatatagagggcgatgaactcgtttatgacaaaaatttaaaagcgatgctcccaccggaagttgcatccggaagtggcgcaattaaagtaacacccgaagtcgctaagcagctcgcgcaaaaagtaaatgcgattatcaacgatctgcggacgatgaaacgggaagccgaaaacgcttatcaggaacacgacgccgagatcaacgacctgaagcacgatacctaccgtcaagtcggccacggtttatacgacaagctgacactcgaggatgtaaacaatacgctgaaaaacctggcgcagtcgtttgacaaaaaaggcaatccgctcttttacgatgttcatgccgaaaaagcgtacatcgcctcattaaaaaatacgatttcagatttagaagacatcagcgggtaccttgcgcagatcgcaaaagattttaaatcgaaagataaaatgctggcaaactggcttaagctttag

SEQ ID NO: 1629 - DNA, 345 bp, Bacillus licheniformis
ttgaaaaagaaaaagtacataattatccttattttaataattatagcagttggaggactttttatgaagcatcagcacgatcaaaaggaaaaagagattgctttattcgaagaagcacagaatcatatggaaaaatttttaacaactaactataaagatgtgaaagatatccatttttctgaggattactatattaatccaatgggtggtattactgtgaagggttatactaacggagaaaaagagtttgaaggtctatatgatccagccaataaagaaatattgtcatatacggttgatgccgaacccaaagaagaatgtaaagataagctttgtacaagataa

SEQ ID NO: 1630 - DNA, 174 bp, Bacillus licheniformis
atggattacgaaacaaaaggatatgatacgacgattgtatacgattataaggagtacccggacgttcattacgggcgctgcgataactgcgattatacgctgtttaaaagttcggtgaaggacggcattttcctacgtgagtgccgcagatgcggtatgaagaagagcatataa

SEQ ID NO: 1631 - DNA, 150 bp, Bacillus licheniformis
gtgatcaattcaacgccattcatgaaacgacggaagccgcagcaggccgtttttcgtcttgaaccggtgcttgccagctgccttacgaacgatacgctttctgaccgttcctttcttgaccgcgttcacatcgccaagcaagcgagataa

SEQ ID NO: 1632 - DNA, 333 bp, Bacillus licheniformis
atgaataaaacgaaacttttaacggtcgtactcggcctatcaatcgcaggcaacgcggctctcggcctttataccgccaaactaaacgaagatgttgacgttgcttatcgcgtggctgacgacatggctgcggaagctgaggacgcccaggaaacgatcgagcgcgaatatattgtcgaaggcaaagactacgcggtatcagcggacgacggcggcttctctttcgatccgcaagccacagacgcaaagccgggcgatcggattagcgtgacttttacgaaggatcaatacaaaaatggcagcggatttaaggcgattaaggttatcgaataa

SEQ ID NO: 1633 - DNA, 201 bp, Bacillus licheniformis
atgacgctttatataaaacgcttgtggtccgacacaccgccgctgaagccgcagcaggccgatcagcttctcgatctatatcagcgccctgttacgtcatttaaagacgcaggcaaagcgtatcagatcggctttaatacggcgcttacgtgtctcggctatttaatcgcaaacaaatacggaggtaatgacgatgaataa

SEQ ID NO: 1634 - DNA, 135 bp, Bacillus licheniformis
ttgttaatcgtcgtcttgctcgcctggattgcggatatgaacttcggccggctttccgtcctggactgcgtcggtctcggctcggctgtcgtttttatcgcgcttctattctttaaatcgaggaggaatcggtaa

SEQ ID NO: 1635 - DNA, 219 bp, Bacillus licheniformis
atgaaaataacggtaagaccgcgactgtcggaagtaatgaacgcgaaaggatggaggcaaattccgttgtctgaagcgtcaggagttccgcaaggcagcattagccggttcgataaaaacgaaaggcatctcgattggcacgtatttgcccttgcgagaacactcggagtgaatgtcgaagagttattcgaggtgaagatcgaagacgctgacgaatga

SEQ ID NO: 1636 - DNA, 360 bp, Bacillus licheniformis
atgaaaattaaaaaaattgattggctatcgaaagaagctttagaggcggaagtagtagtaactgatggtgagtctgaaataatttgtttcgcccacccattaaattataatgtagatagtaggttagaaggtccgatttactgctttgatgttgctgaacttgttaagatggacaaaaaatcctttatcatcgagaagttagatggacattttgaatatagattcacaggacaattaatcgacaagcaactcgaaacagtgaaagtaggacaatttctattagaactggatactgattggccgggagatataaaagatggtgattttgtatcctttatttctaaaagactagacataatg

SEQ ID NO: 1637 - DNA, 1524 bp, Bacillus licheniformis
atgaaaactctggatgttcagtcgttgcacaatgcaattgatcaaacgctggaacaattaaaacatcaatcagacgaattcgccaaggtcaaaaaagccattgaggggatcacatcacttgatgatgctttaaaaggaaaaggcggcgacgcgatccgcgccttttacgaggaatgtcacaccccttttctacagttctatgatactttcatagaggaatacagttccgcgctgaagaaaatgaaaagcgcgctgaattccctggaaccaaaccagaacggatttatttcccagtcctttctcgaacaccaactcgagaacggcttaaatgccgctgatcgcacaacgaaacatttggtttctaaaaccaacgccacgatcgcaaaagtcagccatatcgtcgacttaccggatttgaacgacagcggttttcatgaacagtatcacaaagcattaaaggaaatcagcacgacacttgaaaagctgcatgcatttgaccgcgagcaaacaaacgcgctcacaatggctgaaaacgaccttgagacgatgcagagatacatcgcaaggctcgaaaaaatgtataccggccccaaaattgaaatcaccggttatcaaaaaggcgcgattctaaagccggatgagatggataccttgagtggaaatcaagaaacagcgatgggtgccatgctgaaaaaagtcggagacaaagaagatgctgacgtaaacactctcgccgatccagatcgattaaaaaaattggcgacacaaaaggtttccaaaaaagagtacactcaagaggaattgaataaactgaaaaaagattatagggtatttaacgatacgctttaccgggcatacatagatggtgatacaatcgtcaagatagaacccgcctacacccttccagagaatgtggaaaaaagcgactttgctgaatatttcgatacagcgatggaatttacaggtgtgtatgatgcagtaagagtagcgtttggatacgaccttgcgacaggcaaaatcgttaaaggtaatggtgaccgtttgatggccggattgagtgtcacacctttcggaaaggcatttaaatacggaaagcgcggcttcaagttatttaaaggtgaagaagtgggaaagaaagttgcgaaggtagataaaagcacaaaagcagctaaggatgttgaaaaagttgagcaaggtgctaaaaattctaagctaattaaatttaagggtgacgaagatatacggcacttcgaaaaacacgcccaagaagtcaaggatgctatgggtaaaaaacaatataacttaaaaaattatctcgaagatgctaactacgttattaaaaacgggaaatatgttcctgagttaaatggctatgtaaaactaattggcggaaaagggagcgcaaagtacggctttgtgggacttaatagaaatacaggacatattactacattccatgtcaaaactgttaaagaactagcaaaaaaagcgcctagtttaggtctcaaaacaaagaaaaagtaa

SEQ ID NO: 1638 - DNA, 222 bp, Bacillus licheniformis
ttgaaaaagctaatagttcgatctaggttaaatgaggttatgaaagaaaaaggaattcaaagtcaaaaggaattggctgagttggtgggtactacagaggccacgataagcagatttaaaacaaataccagatatgacatcacaacattatttattattagtagaggattaaacgtgcctatagaggacttattttatgttgaggaaatagatgaaggaaaa

SEQ ID NO: 1639 - DNA, 351 bp, Bacillus licheniformis
atgaaagctttaaaagatcaaattatcaaaaaccgtcattttgaattactaatcgtggattacgtcctgtacgatccgaaaacgggggccgtcgattatcgagagcctaccgaagtattgcatctgggagacgatatcgcgcttgaagtgaacgaagcgcatctcacgctttataggatgcgcggcaaagagggcgaatgggaaatcggtgaaaagtgcgaagtcctgtacgatctgccgctcgaatttcctgtcgggtttaatttcggtttaacaaccgaagagatcgcgaaaatgtctgtactcgatttcatgttattcttggcgcagaaaaaggaggagacgttatga

SEQ ID NO: 1640 - DNA, 336 bp, Bacillus licheniformis
atgagcaaattaacgtgggttgacgcaggggagcagccgaagaaaatgtccgtggatttcgttgtcatatattcggacaccggtgaagaaagccgcgaacgggtagaggtgttaaatgtaggtcgcgactatgtactttatatagacgaggagtggcttaatctttatcgactatatcacggtcctcacggtttagaaatcggtcagcgtgcggaattgatttacgatctaccgtacgtctctgactcggagatggatctcgaaactattgcgaatatgaacacgatcgagcttttagcgcatcttggcggacaattaaaggaggtagtcggagta

SEQ ID NO: 1641 - DNA, 198 bp, Bacillus licheniformis
atgaacgtttactatagaaagactgttgttggttggtggaatgtctatcccgcaggctcagacgaatatataaacttaaacccggaagaattcactgcactcttgccgcaagtgtcccggagagcattcgcaggctgcgccgaaatcagcgtcacggcagcgcgagaactattcggtgaggaggtgcagtcggcatga

SEQ ID NO: 1642 - DNA, 348 bp, Bacillus licheniformis
atgatggatacatttcaaccgcaagcagtaaagctgcattatcacggggaaacgttcgatacaaaacaggaaatacacgaaatctctgacgcctggttaattgcggccgatgttattggaacatgctcggatgacgggctggtgttttacgatactgaccgattagaaaaaaggagcgacggataccatctttatgaaaacaactatcctcggttttttatggtagacacgtcaaaagtcgacgcagacctccgcaaaatcgatgtttctgaactcgcaaacatgtcgtttactgatttcgttcgaattggatttaaattagggaggtcttcatatgagtcgtattga

SEQ ID NO: 1643 - DNA, 393 bp, Bacillus licheniformis
atgagtcgtattgaacacttgttccgaaaagaagaggataaccggtctttggccgagattcatttcgagcgtctaaccgcagttgccgccgacatagagcgcgattttgatagattgcgaggggcacagtcggaaattgatcgagaactgtccgacaagtaccacgagatcgaaaagggtaacttcgatgtggttcgcggttattatctggcaaaagggcttcagaacatactacagcgtcgcagaacgataaagggcgagctttgccggcttaattcacttaaagattcgctagagcttgatcgagtaggtgagcgattacaggcgaaaataaaacaagacgaacggttgcgggaacaactcaattcgtctttaagattatcggatattatt

SEQ ID NO: 1644 - DNA, 228 bp, Bacillus licheniformis
atggtgtacatttctaaagaattatttgtgattatacgcatctataaagggatgactcaggagcagttttctaagtttttgggaatcagcaagcaaacagtaagtgcaattgagagaggagaaaggccggtttcaaaaagaacgcaccgtatggttattgaaaaggttgaaatcacagatgagtttttaaggttcaaagaaaaacacgaaaagttaattaaaatttaa

SEQ ID NO: 1645 - DNA, 372 bp, Bacillus licheniformis
atggggtcagcgacaaatagaccggaccaacaccgacgctatgatgcggaatataaactaaatgatgcagaaggtattcgcaccttattgcgggattatgacaagctttttcaaaggcggtttgaaggtgatactgcggcgtctgacatcttactagacttagaggatgctatcgatgctgccgagctaacagcgcttcagaacgaggctatacgccttatttatatggaagatttaacgcaacaaatggcggctgaacgcttggggatcgagagaagtgtggtgtcaaagcatttaacagccggcgttaacaaaatcgtgaaaatttatgcttattgggcgaatcgaggcgaggggtactgcgccagttaa

SEQ ID NO: 1646 - DNA, 336 bp, Bacillus licheniformis
atgaaaaagtttactgagcttgagcgcaatctaattacggttatcttagacggacgtcgcagcgattttaaaaaggaacaggatttcgaaagggtctttggaagaaacgcgaacattgatctcgtagagggccgcaactacttattagaggaggcattgtttggggaagtcgcagaggttccggatattatcggtgatcttctctacgaaacagaagctggaaacattcactatgacgtcatgattgacgctctcgaagccgcggtaaacggagattgggccaatgttccgagcgaagaaggagcgattgagatgtccgaaggtttaaagaagtaa

SEQ ID NO: 1647 - DNA, 273 bp, Bacillus licheniformis
atggaagagaataacggtgtaggagtttcgctgacaagggaaggtaaaacgctgatgatttcgaataacccgtactactataaccaaatgatcgaattaaaagcggacggcccaacaaaacaggccgttcccctcccgcgttttatgcgatacctggtcgatatatttggctatgacgcaatcaaaaaagctgtcgatgagtttccgcaagaaatccgatataagactacgctcgaaaggatgaacgatgagggacgagatccagactattga

SEQ ID NO: 1648 - DNA, 189 bp, Bacillus licheniformis
gtgaatcgtttattctactgctactcaacaacgctcatacactttttgaaagcgaatgggcgccgctataaatttacgaggctccatccgcgaactaataaccggatgtgggtatttgatagagatgctggattaagcgctctgctggacgaatatgacgaaagaaaagcgaatatgaaggcgcggtaa

SEQ ID NO: 1649 - DNA, 444 bp, Bacillus licheniformis
atgggaaagcaattcgagaagcttgctgaagaagcgctacaacgaaaaaagtatgcgatggaaaaagataacggactttccggtaacgcgcccataccgcatgatttatggcggcgcctggttcccatcgcgagagaatacgagaagggtaacggatccatggcgcaattgtatacgtaccttctggcgcatgtgaacggacatcctgacaacgatcgatatatgagcgcttttccctccacggataagatcgctgaagagacggggatagggcggaatagaattgcgcgattagcaaacgtattggaggcggtgggtttgctgaagactgcgtatgattatacgttgagtaggcgaaataaactctactttccccaatattacagcgatttgagcgacgaggaaataaggcggaggctcgatgagttgtacagtcaatcaccg

SEQ ID NO: 1650 - DNA, 147 bp, Bacillus licheniformis
atgaactacgaagaagaactccggaattcaaacggcaccgcctcagcgttagcagacgacatacatccgttaaggaaatcgtttttattagcgacagcaaagattgactccgttttaattgcggtaggcaagtggattgacgaataa

SEQ ID NO: 1651 - DNA, 270 bp, Bacillus licheniformis
gtggcggtacaatgcgacgagtgtttaaaagatttcgaagtccagccgaaggaacgtccgctgaataattccggagtagaggagacgtatttcgaatgtccgcactgttcgaagcactatacggtaatcataacggaccgtgagacgcggaaattaattcgcaaggtcaagcggctacgtcaaacggatgattccgtgaaagaagcggatgaggttcagcggcagataacagcgaaggttgacgcgcttaaagaggaataccgaaaataa

SEQ ID NO: 1652 - DNA, 150 bp, Bacillus licheniformis
atggcgaaattgaccgaagaagagaaagcgtatctacgggaattgttcgaaaagctaatcgaacaggattgcgtaaatttctccgttaatattggcgtaggtgggctattcggtgaacgggatacaacgctaactcttcgatctaaagga

SEQ ID NO: 1653 - DNA, 288 bp, Bacillus licheniformis
atgctgctttcaatccttgtatccgcaagacctacgtgtcctgactgcggaacgtacagtaaagacggaaacccagccacacttgatacgtgctcattctgccaagatatgaacgtattgaatattaacacccgccgcctcaaggttgggcagcgtagtttttcggaaggcaagaccggttataatccttccgtgaggccgtttctgttgctcttgtcaggttacacgccttatcggagtattaagcgctccgaacgctcgcctcttatttcgcgcggttttcaatga

SEQ ID NO: 1654 - DNA, 141 bp, Bacillus licheniformis
atgaacgcattagcttcaaagaattccttcaagcctttggataaaaagaaaaaagcgttattaaagaaattcgtcggtagctcatcatcaaaattagatttgaacaaggtcagagattcctggaaatatgataaagattga

SEQ ID NO: 1655 - DNA, 513 bp, Bacillus licheniformis
ttgttagacacaggcattatactcgctctggcaaatgagtatgatgcttggcacaacacagtcaataacctctttgaaactcacattttatctgatgaagacgatgaaaacagtaaagcgatttttctttttgttaatccattaattattaacgaggtaacccatctagcaggtcgtcctcttgagtcttaccgaagaaagaaacctaaggaagacttttcgaacatcaaccctgaaaaagtggtcgatgaaactatcagcaacatagaagagttaatagataatgaggtttttctagtaattgacggaaacagagaggcggttatggagcagttcaagctctacaaagacttaggatcagctgacgccgcgaacgttgcgatagcaaatcagcatagcctaaactttttaaccgtagatagtagactagcagaaaacatatatcttaaaagaaatcagttaacgaatattcataaggtatacactacatcaggtaagtacaggacttattaa

SEQ ID NO: 1656 - DNA, 804 bp, Bacillus licheniformis
atggcggaatcaaagcgcgaatcaatcgatcgagttgtaggcggcatttattattctggaacaaacgactttacaagcgctgtaatcgaggtgtttaaatccgacggaagtgttaatgtaattcatcgctcgtggatcacgaagaggtgtttaacttgcgaagatctgacgtttggtaaagagagtgaatttacgaagagtggtgagctggaagtagtcgattccgacttcgttcattatttaccggttgtggattggtttgttgagcagtcgcaaaagtacgatatcgaatcgattggaattgatccttttggcgggcgggttgttgctgagtgtttagagagccgtgattttgagacggtgaacatacgtcaaggagcgttaactttaaacaacccattccgtaatttaatggcacttgaaaacgatcgtaagctcgaaaaaggagcgatgttggattggtatttcggcaatgtcgagatatgcacggatcataacggaaatcaaataccgaccagtcagagcagggcgtacagtattgcgggatttagagctttgttaaacgcacatgctgcatcaacaatgtcgaattcgtcaaacggcaatcttttcgtaaaggttaacgttgatgtttccgaagctattaccggcctaaaagcgctacagcgcgaagcgaaggcggcgactaaggcgctggctgaatttcaggatctagctgaacggctcggtgagaagccgttagctgacggttgggagactgctagagtattgcgagaagtatttaaaaaagcaccgaaggcttaa

SEQ ID NO: 1657 - DNA, 547 bp, Bacillus licheniformis
atggcaaacgaagtttttccgataaagtcaaaacgcgattataacaagttcataaaggcgctcaagccgggccgcgatcaatggctggcgcaactaggcaccgcattcggcctgcgcatcagcgacttgcggcttcttaaaatcggacagcttcgaggccagaagtcgattaccttatgggagaagaaacgcaagaaaaaacgtgtgattacgttcagctcttccgttctcaaaatcgtttcccaactcgaaggtgatgacgacgattacgtactttgccagccgcaaaggtggcgagccgatcagccgcgtccaggcttaccgcattctaagcgacgcagctaaacgagccggcatttacgataagatcggcggcatcggtacgcatacgctgcgcaagactttcggataccggctttatcagtccggcgtgccgctttcgcgaatcatggtgattcttaaccattcgagcgagcgcgatacggcaaagtacatcgggatcactgcggaagaaatttcggaagcttacgaaagcatcgaggtttaa

SEQ ID NO: 1658 - DNA, 1755 bp, Bacillus licheniformis
ttggcatacgttgacggaaaatggcttgaccgcgaagaaagacaggaacggatcgatttaatgaccgagcgtgtccgtaaattggtggcgctcattaaggccgggaaagctacggaatatcacattgacacctttcggaaagataaagcggaattgacgaagctgaagcgggtacacaaggccgaagtcgatatcgcgtatttcacatacgagtacttgagcgacggttcgaatccggataatgaggacaacgttgttcgaaatgcggatgacggaacgccacatgacggaatcgagaatatcgcgaagatccatgaagagtttttcgatctttgtaactatgtaaataacgaaaaaaggaacgctagacttgcgattgcggcggcacgggggcattcgaagtccggtatgttttcgaatgcccttccgttacatcaagcggcctttcgaaagcgcaagtatatcctgattatttccgaaaccgactcactttcgaaaaaacttatcggatgggtcaacaaacagatgaaatacaatcagaagttgcgcgaagacttcggtccgatgatgcacgaatccgcaagtcgtaacgaaaaagataacgaagaagcattcatcacaacaacgaatatcctgattgaatcgtcttcgtccgggaagcagctccgggggaaacggcacggagccgtccgtcccgatctcgttatcattgacgatccttcgtcaagtaacaacgaaggcacgaaggaagctcgcgaaaagctcgttcactggtttaactccgttgtcgtaccgatcggatctaaagcaacagcaatcatacttgtcggaacgatggtttcggcgacaggtctattaaaccacgttctgaagcggaaggactttaaatcgagttttcatggcgccatcatcagtgagccgtcgaatccgcagctttgggaaaagtattgcgaaatctatgcccgatctgagtcgatggaggaagtcgatgagttctacgagcaaaacaaagaggtgctggaggagggcgtagagcttgcgtggccttggcgttggacatatcgggagctcatgcacgaaaaggtgaacatgggaacgcgggcttacaattcggaattccgtaaccttgcgttcagtgaagacgaacagttcttcttcccagaaaactacgcttattaccattactaccacgaaaacggcgttgcttatgtcgtttataacgaattgaaaataccgatcagggatctcacgatcagcggcgcctgggatattgcacaaggaaagaatgcgcggtcttgctacaattcggttattacgctagggaaacatgagccgaccggctatattttcgtacttgacgaatatgcgtcgaaagagccggcgcacgtttacatcgacatcatcgttaagaagatcaagcagtaccgtcaccggatatttaacgttgaaacgatcaacgctcagcacgagttttaccggcaattgcaagaagcggtcagaaaagaaggcctttatacgtgccgcgtcaacgatgttaagtcgcacaggtcatcgaaagatgagcgtattcaatcgttggagccgatgctgcacaacaaaacgcttattttaaacgaccgccacacgatgctcttagatcagatggcgcaatacccatttggggattacgtggattcactcgatgcgctacagcaagctatcgaaggagttttccgacctaaaactaggcttgtagcaaaaccgaattggatttaa

SEQ ID NO: 1659 - DNA, 429 bp, Bacillus licheniformis
atgtcacgattgaaagaattagaggcaaaattaacgttacaacaacgaaaggccgcgcttttgctcgtggaaaacgagttgatggccgaagcaaggaagacgcaggaggagctcgccaaggaaatcggagccgaccgcgttacggtttaccgatggcggacgcagaataaagcattcatcgaatatatgaatctactcgcggacgatatgctttccggacaccgagccgaagtgtatgcgcagctaatgaagcttatccgaagctctcaaccgtcagtaaaagcaatcgacttgtttctcaaacgtcatggtttgcttactgatcgtcaggtcacggcaacggaaaacgaaagcgggacggccagcaacgaagatatcgcgaaagaaatcgaagatattgacgaattgcttaacgatgggaacgagtag

SEQ ID NO: 1660 - DNA, 1608 bp, Bacillus licheniformis
atgaatttatttaaccgtaaacacgacgaggcagacgaattcacatacgtaaaaacctacggaattatccgtaagggcgctcaatttccgccacaagattcgatcgaaagactcgcgaaatataaacgggctaaaaaatggttcgacggaaagcagcgagacgtatacgaaagggcaacggctattttaaaagattcgccattctcgtcgcagctcgaaaaactctatatcgcgatcaacctggcggatatcctcgttaccaagcctgcggatctacttgtcggagagccggtccgttttgagagcggaaaagccgacgacagcgaagagcagagggcgctaaacaggtacgttgaggagaatgacgttaatcaattgattcacgaaagtgctacggcgaatggttatcgcggcgacgcgtggtttaaagttcgctatggctaccgtcaggattattctgagcttaaaaagatgggactaatcgagggagatgcgcccgaaggtgtcgaaatggaaccgattattgagcatgttaacgcaagttgggtttttccggagacgtccgccggcaatgttaagcaaacgaaggcgatcaatattgcgcaagtcgagtgggttgaaaccgagaaaacggagataccatttctgaacgttgagcgtcacataccgggttatattatgtattcgcgacatcgcctacatggcaacggcgttgatacttcgacagggacgccggtccaattgtttaccatcggagaacaagttccgacaggtcgagaggaagacgtagaagtaacgaatctgccgcatattccggttttccacattccgtataaatcggtagatgactcgtacttcggaatcggactcatcgaaaagctcgaaactgtgttagctgcgatcaatgatcgacttgttcagatcgactatattctctggaagcacagcgatcctactgcatatggtccagacctggaaacgaccaatggagctgtacagtttggcggtaagtacattcctgttaacaaagacgatccgacgccgggatatatggtgtggcaagcgcaactagatgcggcgtttaaagaattagatgtccttttcagtaacgtctttcagatggcagagacgccgcaatggcttttcggaacgacggtgtccggagacaattcgggcggtactgggacgtctcatacggacggagtagcaattagagcgagatttatgccaatcctttcgaaagtgaaacgcatccgggcgcattacgataaggcgatccgggacgcgctatggacgtgtatgctcttcgaaaaagaattcggggacttatccgtatctgatccggtatatcccaaagcgatatggaacgacgggattccgcgtaacgagaaagaagcggcagagattgcgagtattagaactggcggcaaacctacgcttgacgttcgatctgctattaaagagctcgacgaagtagatgacgataaagccgaagagactatacgaagaattgaagaagatgaaaaaagcgtcagtggctttgttgatggatcggtatttaacgagaccgaagtaaaagaagaggtcgtcgaagaggatgacgagtaa

SEQ ID NO: 1661 - DNA, 825 bp, Bacillus licheniformis
atgcgagttccggagccaaagtatagctatcaaaccgatcaactcgcaacgtattacaaggacgccgttcaagacattttgatcgaattggaccgagttgatatcgacaattttcgccgggcaaacgccaatgcgacactggcctctatttcggaaatcctttcggagctagacgataagtcgaaagcttgggtcgaaaagaacatacctaaagcggctagagacggcgtaataaacacgatcgtctctcttggagttgccgaaacgattgacaaagcgtcacagatcgcttccttttcacgcttgaacaaagaaatggttgcggctgcggttgccgatacccaggccgacctattagcggtcacgcagaatatcgaccggaagacgaaagtggctgtccggaaagctgtctccgattctatgcgttatcacatgacacgaggtacaaatggacgacgtactattgcgtccgacattcgaaatacacttcagcagtcagtgaaaaccggaatcattgacgcagcgggcaggcggtggcggccggaagtttatgcggacatggcgacgcgtacaaaaatgatggagacctatcgggaagcaacgacgaatgaggcgcttagaaggaacgtgtattatgcgaagatctcttcacacggagcgaaggacgcatgtcgtttctacgaaggaaggatcatgaaattgacggaagacgcgcccggtaattatccgacgtacgatcagttgaaggcgtcgggcgagatttttcatccgaattgtaaacacgtgtattcaccgatcagaaatccagagggggctttattttga

SEQ ID NO: 1662 - DNA, 555 bp, Bacillus licheniformis
ttgaacgtaaataataaaatgcgcgttggtatctcgaatgattcacgcggcattagcaaagttgttgacgaatcacttgacggtacaaaggcgatcccggtcgtgttcgttcagaagactgcggagggtagtttctcatacagatcagatccggaggaaggtactgcgcttgataacgaaatgagttatccggtcgaaactgatccggctggatctgccgaagttgttgacgaagacgtcgacggattgaaggccgtaccaatcgttcctgttacgaagaacgctgaaggtaaattcgtttatgcgagtatcggaggcggtgataaagctgttgattggtcggaaattcagaacaagccggaaaatttcccaccttcgtcacatacgcatccaatttcgcaaattaccaacttgcaaacaacgctcaattcgaagctgactgcgaaacaggcggctgcacaagcggatagtaccgcagaggatatcgcaggcttagtcgcggattttaatgcgctgctttctgctcttcgcgctgcaaaaataatggcggaataa

SEQ ID NO: 1663 - DNA, 732 bp, Bacillus licheniformis
atggaactatcaaaatctttattgtcgttagatttacagcattttgcggaagaaactaaagaccaggcggaaccaccggctgcggagccgaaaaacaccgatacaccagaaccgccaaaagacgaagtaaaaacaattccttacgacagattcaagcaggttaacgacgatttaaaagcctttaagtctacctttgaagagctaggcatcgacggagttgattcacttaaaacactcgtcgaagactacaatgcaaagaaaactgccgaagaggaacgtaagcgtagcgaaatgacggagctcgaacgacttcaaaacgatttgaaagcgaaagaagaggctgagaaaactctcgctcagcaactcgaagaagagaagaaagcccgtgaacgcgagaaaatccgcaatgaatttattaaggttgctacgagcaatgatatcgcctacattgacgacgccattgcgttggccgacctgtccgcggtaaaggttgaagacggaaaggttgtcggagtggaggacgttgtcaaaacgctcgttgacaataaaccattcttggtcaagaagaaggcgccaaagcctatcggacagagctcgaatggaaatgcgacccttgcttcggagaaaacagcggaacaactattgaaagaagccgcagagaaagcgagacaaagcgtccgtccagaagacaagatggcatacgcaaaattaaaaagagaattatcgaagtaa

SEQ ID NO: 1664 - DNA, 1092 bp, Bacillus licheniformis
atgtctaagattttatcaggcgaattagtgggtaagcgagaatccgtagtagatgaaattctactattgaatgaacaccagacaccgttattgaatttattagggtttagcgatccggtcactcaggtagagcaccagtggtttgaagatgagatgttcgctgacaagtcaaccactactgtagctaaaactgcagaggacacaaagattacagttgaggacattgaaccatttatggctaaccaggtgattgaaattggagaagagctaatcaaagttgtttccatttataacaaaacgcttactgtagaacggggatatgcgggaactacccctgctgaaattcctgctggtgctgtcgtagaagttcaatttgtagaagggcaggaaggtgcagatgctcgcgatgcgagatataagccaagaaaacgcgtatcgaacatcacacaaattttcgatgaaacaatctcaattaccgggactgctgcagttgtaagcaactacggaatcgatgatctttatgagtatgagaagcagaagagacagctcgaacttgcactgcagctcgaaaaagctgcaattaatggcataaaatacgaatcaactgacgggattgttcgccaaatggaaggtatgcgccaattcattcagacaaatgttattgacgcgcaaaatggggcgctaactgacgagaaaatcaacgatgctatgcaaaaaatttatgaaagaggtggatttacaaccggaggtattttcaaaatcatggttggcgctaaacaaaaacgtgccatttcaaacttcgacaagtctaaaattaatctgactcgcgctgataatggccgtggacaggttgtagatcacttcgtttctgactttggtcaagcagaaattgttttgaataacaacttaaaaggggatgagttgttcatctttgatgctaaccgaacaaaaatcaaacctcttaaagaccgtggtttcttccacgaatatctcggtaggaaaggtgatcgctttgagggccagatcgttggtgagtacacacttgagtttttacaagaaaaagcacacgcgcgaatcaaaggattagcgtaa

SEQ ID NO: 1665 - DNA, 216 bp, Bacillus licheniformis
atgatggcggaattcaaatcgaaatatcccgaactcgggttttatgtgggcgacgtatttaagtcgttcaaaaatggcgtatttaaaacagaggatgaggacgaaatcaaagtcctgtccgatctggcagacgtaactcggatcgacaaaccaacggaggaagacgcgcctaagccggcagcgaagaaacaaacgcgtaaatcctccgcaaaataa

SEQ ID NO: 1666 - DNA, 249 bp, Bacillus licheniformis
atgacagtaagcgtcgagggtgctgacgaatatatcaacagttttacggtagataacgaagattggaacgattctgatcacgaaaggaggcaacggattttaaacgttgctgatgacgttctcgtacgtaaatttcctgactataaaataccggctgacgcagtatacgaattcgcaaacgtgctggcgattgcctataacgacacgaaccgtctgaacaaaacaaaggaattgcgtcgttctctttga

SEQ ID NO: 1667 - DNA, 408 bp, Bacillus licheniformis
ttgagttttgatttcgacgcaagcgatttccttaatcgactgaaccgaactgaacacggcgcagagcaggcggcagtccgagcgatggaggacaataccgatgatctcgctcgtatcgcccaaaatatcgcacctatcgataaggcgacacttcgtagagggatgcagaagaaggtaaaactgtcgcgggatcggttaatcggcgaagtatccttccgagctgtagaaaacgggtttaactacgcaatttggacgcacgaggccgactacaatctcggtcctacctccgcacaagccggcggaacggacggatatacggtcggtaacaagtaccttgagcgtccgttaaaaggagaggccgaaaagtatatacggaacgtcgcagaggccgtaagagaggagttgagg

SEQ ID NO: 1668 - DNA, 219 bp, Bacillus licheniformis
atgctcgcagccgcaaagaaactcgttattaagccgactgcgccttcgacaacgccgaacgattatatcacaattccgttagcaggcgcagtagctgatccggagtacacttacgattcagacaacgaacggattgcgaatctgacctttgtcgcatatccggatacggataacgatggagacttgttcattatgggagacgaatccgcagcagaataa

SEQ ID NO: 1669 - DNA, 704 bp, Bacillus licheniformis
atgaaactgttcaccaaaaaagatcctgagcaactttatttcggtgattatccggtcgagattccgaagctcacaccgaagaagtggaagcaattattcggggccgtcgataagctgcccggaattatcgttcaagttctaagcgcgcctccgcaagacttttactcgtatgtagtcaccgggctcgaagtaggactcgatgagatcgtcggaattgtctcggcactgagcgatgttgacgcggattacatttcagaaaacgttggggcagacgagatgttcgaatacctcgccttaacggttaagaaaaatcggttgtcttcgatggcaaaaaacgtgaaaagccttcttccgaacctcggcaagtaggcgaagaagagggcgtctcatatacgatcgacgactacttaatagatgcggctattattctcggagttactcagcgcgagattgaaaacgattattacatggttgatattccgaagcttattcgcgctaagtcaaagcaaaacgcaattagatgtcttgaagaagtccgtataactctcgctacgaataatcgatcaagtgaggacgaagatttcaagtcgctaatgaacgggcttacgagaacagcaggaatcgaaaatgctaatcacttcgatagagaaaaattcgaacaattacgcatgatgcaagcagcttttcggaaaggaggtaactag

SEQ ID NO: 1670 - DNA, 2817 bp, Bacillus licheniformis
atggccggagcaacagtcggagaaatacgcgcccgtttgattcttgatatggccgattggtctaaaaaatccgatcaagcaaagagcgacatgtcggagatggggaaatcgtctaaaaatctatcgaaagatatgggccagatacaaaaggcgtcactggccgttggtggtgcggtagtcgccggcatcggagcgtccgttaagactgctgcagatttcgaagcggccatgtcgaatgttaaggcgatcagtggcgcgaccggtcaggaattcgaagatttaaagaacatcgcgtctaagatgggcgctgaaacgaaattcacagcggtagaggcggcggaggggctccaatttttggcaatggcgggattcagcgtaaaggaacaagttggatcgctgccagccgtcctaaacttagcgtctgcgtctaacgaaagcctcggacgatctgccgatatcgtatcgaatatcatgacaggcttcggaatcaaagcggaagagtccgggcgagcggtcgacgtgcttgttaaaacgatgactacagcgaatacggatcttggacaattaggtgacgcaatgaaattcgttgcccctgttgcgacctctctcggatattcgatcgaagacacggcgacagcagtggcgaaaatgtcagacgcgggtattcagggatcgatggcaggtacggcgctacgtgcgtcgttattgcacttggcgaatccggtcggacagtccgcaaaagcgatcaaaaattataacctcgaaatacaagacgcgaacggtaacctgaagccgttgccggaactcattggacatatcgcggaaagatttgacggcatgacgtcgtcacagaaaacggctgctgccgcacaacttgtcggaactgaagcggcttccggatttgttacgttgctcagcgttggtgaaaaagagctgcgtaaatattcaagtacgttaaaagaagccggcggcacggctgatcgtgtagctaaaacgcaaatggataacttgaacggctccttcgaaaaattcagaagtgcgctcgatgggctcggcatcaagatcggtaacgagtttttgcctactttccgaaaaattgtagacgagggaacgaaaatactcgatttccttaacaagttgaatccgggaattatcacgacaggactcgaaatggcggggacagcggcggcgattgcgctcgtagctgcctcagccgttaagctcggaatcgcgttaaaaggccttttcgtatcgatggggcctgccggttgggtcatagctggactatcgattcttggcggcttgttggtcggtgtcgcagaggggtacgacgcgatgaatactgttagcttagaggcggctgagaccaaacaaaaagagatcgaatcgattgaaagtctagcagtagagttcgacaaacttaaaaacaagacaaaattgactgcggatgaatttgctcgctatcttgacataaatgatcaattaaagacagagacagacccggatgttattaagcgacttaaagatgagcaagcggacctcaagaaaaattccggtttaaccaataacgaatttgatcggtttttaaagctgaacgatgaagtaattaaaaagtcaccggatacagaggcggcaatcagctctcagggaaatgcagtcgctaagaacaccaatgcgcttaaagcattgaacgcggaaaaagctgaagagctccgattagagcttgagaagcagaaaaacctagcagagaaaaactatgataagaacttagagaagcagaagaacatccaaaaagaaattaacgatctcgcaaaagaacggcagaaaatcgaggctgatgtccaggcccaattggatatcgtagagtctactgagaagaagatcgcccaggctaagttagatggtaataagaaagaagcagaatctcaggagaccgttcttgatgttcaaaaagggactttagcaacccttcgcgggcagttagatacgatttatggaaaaatcagcgctaagaatactgagttaaacaaagttaacgaagagcttggaaagctggataccattaaacaaaagatggtcgacctcgaactccgtcaggtcggtttgaatgcgaaaaaaggagaaggtgtcaacgttctcaagaaagaaatcgctaatctcaaagacgcgaaagcaaatctcgaaaacaacacgacggcagcggacaagaagacgaaggaatatcgtgatgccgttaaagcaatcgataaagaaatcgcgcagcttcagtcggccaaatcgaaggttcaggagattacaaacgaagccgaaaacatgaacgaaaagctggcgcgaaggatcaataaaaagatccacgtcacttacagcatggacggatcggaaatcgaagagagcgcggagacattcaagaagacgcacggtaaaggcggacaagaggtgcctttccacgtcggaggtatcgtcggacgcggtcagatcaacaagctccacaccggaggccttgcgtctaagttcgaaaatgctccgatgagccacgaagtcgacatccgggcactgcggaacgaaatggtcctgacggaagcacaacaggcgaatttaatgcggatgattgacgcaggccatacggcggcagttggaagccaggtcggagcctcaccggaagtattggcggctctcacgtctatcgaaagggccatccgcaacagtgacggccaagtgatcgtgatgaatgacgaggttgtcggacgcttggtggagccgtatgtgagccgtcagcaagccgaagaaataggcgtcttgagcgcgtttaataattaa

SEQ ID NO: 1671 - DNA, 843 bp, Bacillus licheniformis
gtggaaaaaattccgataacagacagcaattttaagatcgtttacgataacgggtccaccgtcgatatggcgagggacctttctgttttagttcgaagctttgttccgggtgcgccgtctcctaacatttattacgaaaaaatcgaagggacaaacggcagcatcaggacgggaaaagatttcggaatacggtcgatcaaagcagaatgccgcctgtttgccgaagatactgacgactttttcctgttgctaaacaaaatagtagcagctctttacaagcagtcgcaattctacatcatcactgaatcggagccttacaagcgatggaaggtcgaagtaagctcgtcttttgacgttgaccgtatcggaacaaccggagactttaatattcagtttgactgtgcggacggattcgcggaatctctcggcacgacactcgatccgttcacgtttgacgcggataggtggcttttgggagaggggctcaccgataccgtcccgtcatatacacacaagaccgcgtcgttctcaatctataacgcaggagatatcccggtagatccgatcgagatgccactgatcatagcgtataaaggcggatcttccaatttagctatcacgaatcagacaacgggggatgtgtggaaatacagtgggacgacgtcatcgggagatacaatcgtcctcaatcgggttcgatctactaaaaacaatattagtatattcgggaacacgaatcggaaattaataacacttgctccggggtggaatcacttcaagttgagcggaacgtccggtagcttcgaagtgtcttttaattttcgtttttactatgcatcgtga

SEQ ID NO: 1672 - DNA, 1371 bp, Bacillus licheniformis
ttgaaagaattatatgttcgtagcattcttgggcaagaggaagcgctcactaagtataccgtgacaagaaagtgtggtctaaacagtgaaaagtatattgatgttaccgtcattaagcatgagacaaatgaacattcatttcctttggttcagccggagaattatttgatatacgaaggagaagagtatgtcatccgcccgatcaacgcttccgttcggtctgtgaaagtgaaaggcattcatcgaatgtttatcgatcttgctgacgtctatatttacgaagtcgaggagaaagaaaaggaatatacgatcgaagaagctctaaatatcgcactgaaagggaccggatacaattacaaagttgataagaccggattgccttctacaatcaaagtttcgaattttggcgacaacttttcgattgatcttttgaagacgatcgcctcggagtttggcgcggagtttgattgtaccggcagaacgatttatattgcgaagcagattgcgagatacacagatcatcagatacggcacagacttaacgcagccaatccatcgaaagagatcgatacaagccaacttaaaacgtttatcaaaggattcggtaaaaaagacgaaaaaactggaacttacgcggttacagcggaatatacgagtccgctagcgagcatttacgggattcgccacgctacgccagttcgcgacgataaatatacggaaaagaacaaggatcagttgattgcgcaaatgaagaaagaacttcatgaccagattgatatttcaattacgctaacatatgtcgaactttctgaactcggagttcaagatatacggctaggagattacgtctggtgcatcctagatccgttagatattgacgtacagatacgcgtcgtagaagtcgaggattattctgatccgttaaaatctccgaaattcacattcggaagtattgtccggaatgccccgagtatagtcgcgtcctttaaaaagacgcagaagacgctttctaaaattgtcgatcctcagaccggtaagatacgagagggatcaatcaaaattggcagcggcacctcattcgatcctgggtacgatccgacgctgataaacattccgcagtacggactggcgtcggcgaattcggatgggttaatgagttcggctgatttcgtaaaactggcgaacattctagtcggtccagacggtcaggtagtggtcgcgttagcttcggatactaatgacgggttaatgagtgcggcagacttcgcaaagttgaaacggattaagacgccggtgtctggcgacgtcgatatgcagtcgattttagatcgattagcagctcttgaacaggaagttgtaggacaaggataa

SEQ ID NO: 1673 - DNA, 1557 bp, Bacillus licheniformis
atgccgaattacccttacaaaaaagcgggcaatgctttagaccgagattttagaaacagctataatgacaatttagaatacatcgcagacgatataagtggatcatacgctaaactaaattctcatattaaaggtcgggcagcccacatgtctacgcaaatatcccatagtagcggattaactgttgctcaagaaatcgaagtggagaaatcgcgaataagaaacctagtacttaatgctgatgggaccaatataaaagaggttgtagatgcgcgtgtagataatgatggttttgtgtacccagtattgaaagaaagattagatgcagataagggagaaattactgcccaactagaagaagcgtacaggacggttgaattaataactaactcacaagacgccttaagctatttaaataacgtcgaggcgatgactacgtttaaagctcgggaagaagctttattctggccgcaatctgcaaatattaatgaacgaacaaatgaagtctatgttgcttcgcaagaaaatgaaggaacagaactgagaattgaaattcgcgatcttgatacaggtgattttaaagaaagaaaatcgattccaatagaatcaggcgcgtacactgagggtttgtcgtttttttataatgaaaaagatgaattatgttttatcgtcaaagccacgaaaacgcccggatataatattttcaattatgataatggagaactctcaggactaatcgcagctaatgtaagtagcaaatatgcagctaatggatactactttgtttcagtaaccgtaaatcaagatagcatccatgcttatgtgtacacctgggagtcgataaaggcgggcagccctgtcttatacactgaattccccgtagactatatgcctaacatagagaagatacaaggtgtagccctaaacaatggatacttgttcatgtcacatggtaaaagctacggaagaccggctatatctgtgtacaatctagtgggcgaacttttgaattactatatttacacaaaagattcactcgctagtgcgatcaataaaaagttccctgactttatcccgaatattcacaactatcactttgaaaatgaatcgtgctgcgtgtataaaggtgatttagttgcggttcaggtagtgaataacgcagatgttgttcttgtacggcataatagaatgctagggtacccattgactgtaaacgcaaaccaatctcgtaaagatacaggttggatgtccgtggagctattaaacggggcaaatacctatgttccagaccgccctccacgaatcaggagaataggcaacaaaatacgtttagaagctgaactaaaaggtataacgacaatggacacggagtatataagttatcatcctgattggtctcctagtagagtattagctttttcgaccccgacatcgggaggatacaacgctacttgccaaattcaaccgaacggaaaagttaaaatattatctacacgacaccctagtccggatgaaaactcttggtatccgataaactttgaatggtatttgaattaa

SEQ ID NO: 1674 - DNA, 1224 bp, Bacillus licheniformis
atgatttataaagataccgatattcatttcagtataaattcgcaaattaaacgaagtattgccgcaaatattcaatttagtacgcaggacatcgatacggcaaaactaacgttcagcttaacgaaagatggcattccgctgccgatcagtcaagcgactcacgggaagttgttcatgcgatttgcagacggaagcaagttctacgttaatacggaagttcaagacgcgctagggggcgttattttttatgtcttgaaaccggatcaagttacgcattatggaacggtgcaggcggagctttacgttaattacgacaacggccagaagctgagcgttcataaattttcgttcgaaatcgatcgggcgctcgttgatcaggacattgtgccagtggccgagtattatatagaagatttcgaggaccttaaagctgtcatcgtagagatgtcggatgaagcagaactaatgctcactgagctccaaaagaaatttgagacgttggacaatatcgagacgaaagagggagcgcaggaaaaggcggacgccgcagaagctgatgcaaaggcttatacggatgaacacgcagctaagacggacaatccgcacaaggtaacgaaagctcaggtcgggttagcgaacgtcgataacgtcaagcaagcatcgaaaacagagtttgatagccacgtcaatgacacgagtaacccgcacgatgtgacaaaagcgcaagttggtttatcgaatgtagatgacgtgcagcaggcgagtaagatagaatttgatgcgcatgacgacgatactacacggcatatcacggctgatgagcgcattgcctggaacgctaaagaaacaacgaatggcgcgcaagaaaaagcggataaggcactggccgacgccaagacgtacgtatctaacttttcgtgggttgttgcgactatgcagaacggttggtcccattataacgatggtgaggatgttatgttcggaatcgatgcgacgaaaacggtatatgtgcgaggcgaagcaaaaggtggagctgtcggtacaactgttttcacacttccggccaacatgcggccgccgagatctatggggtgcattcaaatagcatcagggtcggcacaggtcgctcggattgcgttcaaatccactggggaagtcattgtagaaagcgtgtctagcaacacgagctacattaaatttgatttctcatttaaagcattgtag

SEQ ID NO: 1675 - DNA, 294 bp, Bacillus licheniformis
atgaaacaaatatacaaatacgacagcaaaatgaattatgtgctgtctgaaaatatgattatcaatgacggcgaggagattccggaaggttacacagatatccctcctgttaatcccgacggcgccggcatgtataaaccggtgttcgataaagacaaatcagagtggcgagaaacggccacgcaagagtatatcgatagtctccaaccgcctgatcccggaccgtcagaaatggaagttctccggaaacaagtggcggatttatactacttaatcgcgttaggaggttcgtaa

SEQ ID NO: 1676 - DNA, 195 bp, Bacillus licheniformis
atgccaatcgattggtacacgtatattaaagggttctatgaagacggtctttggacgaaaaagcaagtgcatgacgttgtggctgccggacggatcacgccggaacaatacgaggaaattaccggagatccttacgatcctgattcgccaccaaacgaagacgaaaacgtaactaatagcgaacaggaggcgtag

SEQ ID NO: 1677 - DNA, 264 bp, Bacillus licheniformis
ttgggcgaaccgtcgaacaacgaattgcacggtaagattgccgatattcgcgaatggcttgtacgaatcgatacgaaggtcgactatttcaacgaagtaaaacatacggcagatcgagcgcatgaaaaggcggatgaggcgttggcactcgcgaaagaaagtcgggcggatatctccgacatgaaagcaaatacgaaatggttatggggcgtaattctcacggtcgtcgggttagcgatctcgggaattgcgctatttttatga

SEQ ID NO: 1678 - DNA, 981 bp, Bacillus licheniformis
atggcgatttcagtcaagaaaaacctcgtcgcatcaagcaaatatcacgttaagtgtccgtattcaatggatgcgaagtacattacgtttcacaatacggcgaacgacgcttcagcagcgaatgaaattgcgtacatgatccgcaataacaaccaagtatcgtatcactttgcggtagacgataaagaggtcgttcaggggattccgacaaaccgtaacgcatggcattgcggagacggcaacggaccaggcaaccgttcatctatcggcgtcgaggtttgctattcgaaatcaggcggcgctaagtataaagcggccgaaaaacttgcgattaaattcatcgctcagcttttaaaagagcgcggttggggcgttgatcgcgttaaaaaacaccaggattggagcggaaaatactgcccgcaccgtgtactcgatgaggggcgttgggatgcggtgaaagcggccatcgctacggaattgaaagctctcggcggtcaagcgtctaaaccatccggcacgacttataccgttaagaaaggcgatacgctttccgctattgctaaagcgaatggagtaagcgtggcgaaccttcagagctggaacaacattaaagatccgaataaaatttccgttggtcaggtgctgaagattacagggacgtctaaaccggctgcggctccgaaaccatccggatcttctaaaaagacgttcacactgccgggcggagtccttaaagtaacgaacccactgacgaaagggacgaaggtaacgcaagttcagaccgcgcttgctgccgtttacttctacccggacaaaggtgcaaagaacaacggaatcgacggctattacggttcgaaaacggcgaacgcggtcaaacggttccaatcgatgcacggattgagccaggacgggatttacggacctaatacgaaagctaaactcgctgctgcgctgaaaaaagccggctattccgtaaactaa

SEQ ID NO: 1679 - DNA, 231 bp, Bacillus licheniformis
atgaacgtaaagacaatcgaaaatattagcgcgggcacagtcgcccggttcgtactacttgcgctagcactcgtgaaccaggcgcttacgatgacggggcacagtccgattccggtcgatgaagaaggcgtgcagcaatttatttcgctcgcgttcatgggcgtaacttcgctgtgggcgtactggaaaaataacgacgtgacgaagaaagcgcggacaaaaggcgaatag

SEQ ID NO: 1680 - DNA, 1146 bp, Bacillus licheniformis
ttgacgtctattaaaaaggataaaaggacaggaaaatattattttgtatattcgggtggattccaccctgtaaccggaaaaaggatacagaagaaaagaaaaggaattcatagcttaaaagaagcgaaagaggaattaaaacgagtaataattgaagtagaacaagagaaaaattcatataaggcagataaaagctcattcggtaactttgctgaaaaatggttcgaatcaaaaaaggttagacttcgatcaagtacaatcgtcaattaccgtgagcagcttgattacaacatacttccatatctaggaacgtttaaaattaaagacatcactgaggaagtcttgcagcattatattaaccgacttcacaatgaacggaaattagcgccggcaaccattcggaccgcttatggaattgtggcggaaattttaaagaaggcttcccgtaaaggggcgttcgacctcgcaatccttgacgatataaaccttccgcctgaaaatcgtgtatccaaagtgtggaccgagaagaacgttcaaacgtttttagctactcggaattgcatcgtttctttaacgcgatattttatcggaatggtattatccgttattacaggtatgagaatgggagaggtgcttggattgcggtggtccgatattgacttcgaaaagggactcctaacaattcgacaaactctcgcgaagatagacgatgagggtaattacggattagtgcccgaggtcaaaactacggcgggcttcaggaccgtccatttaccgaaattctttatcgaatacttaatcgaacacaagaaaatggtcaagcgcgaaaaagaaattctcggggaagactatattgactatgatctcgttgtgtgtacgaaacgcggtaagtgggtgcatccgaataactatcgacgggcatttactcggttaattgcgcagcttgaattgccgaaaattcctccgaagaatttgcgacatactcacgcgacatacttaatcagcatcgggatcagtccgaagattgttcaggagcgtttgggccatgcgcatatcaaaacgacgctcggaacgtacagccatgttttaccttcgatgcaggcggaattagtcggaaaattggacgatctaatcgagaaagtgtga

SEQ ID NO: 1681 - DNA, 198 bp, Bacillus licheniformis
atgaacatcatcatgaacgatttaattgagctgatggacccgcgctacatcgaagtctggtgcaaattcacgccgaggggcggaatctcgatcgacccgtacaccaactacggcaagcccggcacaaagtatgaaaaaatggccgagtatcggatgatgaaccatgatctgtatccggagacgattgataatcggtga

SEQ ID NO: 1682 - DNA, 126 bp, Bacillus licheniformis
atgagtattaaaaagctcgttattcccattttagccgccgcgttattaacgatgggtattagcgttgtttcagcaaccgaccagtctgacggcgtatatcaaatcgctacccgtaagcaaacgtaa

SEQ ID NO: 1683 - DNA, 1123 bp, Bacillus licheniformis
gtgaaacagttaataccctcgtcaaaagtcggagtgaaaatccacgaatggtataaaatgataagagagtttagcgtaccggatgcagaggctttaaaagaagaagtagagaaggaaattaatcaaatggaagaagatcaggacttactcctttactatcagttgatgtgttttagacatcaattaatgttagaatatttagaacctactaacaaaagaaaacaaggacaatcaataaacaaattgttggcccaaatcgaggagcctcgaagagatttaaatggcctccttagttactactcatttttctttaggggcatgtatgaatttgagaaaaaacagtacatcaaagcaatagagtcttatcgaaacgcagaaaaacagttggctctcattacgatgttatagaacaagccgagtttcactttaaaatggctgaagcatactacatcatgaaacagacacatgtatcatatattaagggcctttaaaatatacaataatcatgaactctacacagtccgtaaaatccaatgtttatttgttatcgcgggtaactatgacgatttaatgcgccatgacaaagccttaccccacctggaaaatgcacttgaattagcgatagagatcgacaataaaaggctcattagttctgcctattttaatatagccgactgtcatgaatgtatgggagacattgatgcagcagttgaatatgctgaaaaagccgtagagattaatctaaaagaagaatataacaacctaccacaatcattatattactttactcaacttctttttaagcagaaaaactacgagcgcgcaatcgagatatttcttattggttagacaaacagctcgaaaattcaacgataccctattcacttctctatttgaatatcttgaggcgttatatatctattctgtgaataaagaagagattttagaggtatttaaatacttggaggagaataaaatatttgcatacatagaagagctttcgcttgaagtctctaaccaataccttgaaagaaaagaccatagaaactcaatcgagttccttcaaaaaatgatgtatgggcaaacaaaaattaaaaaaggggagtgtctctatgagtattaa

SEQ ID NO: 1684 - DNA, 153 bp, Bacillus licheniformis
gtgaaaaaattttcggtatgccgcaataaaatcagcaacaaaaagacgcctgctaagacgcctgaatctctatatgctctttttcaagccgcacctgcagtattctcgaagggaaatttcgtccaccgcgatcttgaagggtttactatttga

SEQ ID NO: 1685 - DNA, 792 bp, Bacillus licheniformis
atgagagcactaaaacaactcgttcgttttggttgggagcagtccttgtcatgtgtatttcctgtcgttatttttgcctctttggctgttacacaaatcatacctcttcccttcctgccgcggtatgacttgctgctcatcatctgtgttctcatgcaatggtggatggtgcgttccggtcttgaaacacgggatgaattaaaagtaatcacattgttccacattattggacttgctcttgagcttttcaaggtgcaaatgggctcctggtcttatccggaggaaggttactccaaaatctttggggtgcctttgtatagcggctttatgtacgcaagtgtagccagttatctttgccaggcttggaggaggctcaaggttgaactggttaagtggccgccgttttacgtcgttgtaccgctggccgctgcgatttatttaaattttttcctccatcatttttggattgacgtccgcttttggttatctggacttgtgataattgtcttttggaaatcatgggtcatatacgaggttaatgggattcgttaccgtatgccgctcgcactttcttttgtgctcatcggattttttatatggatagccgaaaatatcgcaacgttttttggggcctggacatatccaaaccaaaccagtacgtggagtctcgttcatgtagggaaagtgagttcatggctcttattagtgattgtcagctttctaatcgtagccacgttaaaacaggtgaaggggaaagattccactagagtggatgctggtcaatttttataa

SEQ ID NO: 1686 - DNA, 222 bp, Bacillus licheniformis
atggcaattataatcaatatcgatgtgatgctggctaaaaggaaaatgagtgtaacagaactttctgagaaggttggaatcacaatggcgaatctttctatattgaaaaatggaaaggcaaaggccattcgattatcaactttagaggcaatttgtaaggcgttagaatgtcagcccggagatattttggaataccgaagtgatgaagacacccaggattaa

SEQ ID NO: 1687 - DNA, 483 bp, Bacillus licheniformis
atgaaacggggatcaactctctttttaaagatagctgttattcttattggaatcccagttcttgctttgtgcatattttttgtgccgataatagcgaattttgcagccgaattgtatccgggtatttcttatttgaaatatctcgtatatgccgatttgtatgcagcggcgatacctttttattttgctctgtatcaagcctttaaacttttaagctatattgaccagaataaagctttctcagaattatctgtacgggctttaaagaatataaaatactgtgcaatcaccatcagtattttatttgcggcaggcatgccgctcttctatcttatcgcagagatggacgacgctccagggatcatactgatcgggttggtccttatttttgcttcaatggttatcgcagtctttgccgctgttctccaaaggctattgcaagaagcgattgatataaaatcagaaaatgatttaacagtctga

SEQ ID NO: 1688 - DNA, 123 bp, Bacillus licheniformis
atgtgtgtgtactctgcagacgtgtcggctttgtttccgcaagtaacgccatcttgtctaaaaatcaaaagatcagtccataacaataataaaatcatcaatttcaatatatttttattgtaa

SEQ ID NO: 1689 - DNA, 246 bp, Bacillus licheniformis
atgctgaaaacgggcatgagagtaacagccgcaactaagcttgaaggcattaaaacgacgctaagaccgaagtttaaaatagacgatatacaaaaagaaatgaacagcgtttattcatcgcttctctacagcttcgaaggaaaagcgcagcaggcgcttgctcagcgaatcagtcaaagcgcccagcagcttattgcgacagagaaggatggagaaagttttgtgaatggatttaagacaagatga

SEQ ID NO: 1690 - DNA, 1233 bp, Bacillus licheniformis
atgtattttttcataaaaccatcctttccacgttacattttacatagtttgcgggatattcctaaattaacagataaagagtattattttcttagccaaaacacatatagtaccgataaaatgaaagaagcattcaaggaaagaacacctatagagagtaaatcaaataaggctttttttgttgataaaattaaaagggactctgacactggacttgatgcgtatgtttttgttcaagcaaagaaaaaggacggtaaatgggttaaacaaaacgtcgtcgtggccttcgctggaacaaatcctaaagaacagttttttcaagatgttattgatgcagacggcggtaacgttgttatgggtcttgatccgaaaaagaaatcgcaatacataatctaaaaagatgcgaaggatacatcaaaaacaataggaaaatacaacgcaaccccctcacaagacgcgatgcttagcaccggtaaatacaaattaattacgaaaacgtcccaaatcgggcaagctgatgatctggtacgggaagttaaacaaaagtataaaggcatctcgacggttatttcaaccaccggacactctcttggcggcgcagaggctgaatacagcgctgtgaacaatgatatatacgcagtcgcattcaacaatccttccgtcgttaaattgcattctgaagaaaagcaaaaggagatccgaagcggcaaatatgactcgtctgtaaaagcgattgtcaatccggatgatatgactggttccggctggtggaatgagtacgaacgacacgcaggcagaacaatatataccaaagacccctctacttcgcgtgtggaacgacaaatacgactagatccgaagtataacggcggtatatttggcacagtgtttaatgtcgctgtagactacattgctaccacagcaatgggaatgccggatacacacggcctcaacaaaggcaactttaccttcgacgaaaacggcaacgttcaaaatatagagggcgatgaactcgtttatgacaaaaatttaaaagcgatgcttccaccggaagttgcatccggaagtggcgcaattaaagtaacgcccgaagttgccaagcagctcgcgcaaaaagtaaatgcgattatcaacgatctgcggacgatgaaacgggatcgcctcattaaaggacacgatttcagatttagaagacatcagcggatacctggcgcagattgcaaaagattttaa

SEQ ID NO: 1691 - DNA, 345 bp, Bacillus licheniformis
atgaaaaaatacataattatccttcttgctctggtcattataacatctggaggaatatttatgaagcaacaaaataataacagagaaaaagaagagctttataatttagctaaggaaagaatgacagactttattaaaacgaattataaggacattaagtcaattgattattatgatgactacgaagtgaatccaatgggcggaattgatattaaagggtatctaaatgatgataagaaaaagaaaatatggggtatttacgataaggcaaatgacgaagttgggtccttcacagtcgatgctgaaagaaagcccgaatataaagataaaatttgcgattattaa

SEQ ID NO: 1692 - DNA, 120 bp, Bacillus licheniformis
atgcccttaaaaggaataggcgtgcaacgatgcacgcctgctcaatacgaatatctttttattattatgaacttggacggttttgaaggcaatttcccgataaccaactatgcatattaa

SEQ ID NO: 1693 - DNA, 883 bp, Bacillus licheniformis
atgcagtatgaactggaggatacatttttgaaatataaaaaagcagcagcacttggaattggtttacttttatttataggcggatgtcagaagagcggggaagctgaaatcagcgtccaagattacacaggacaggattttcatattcatagtagaggttatcagaaggaaaccgctgagatcgcagaagcgcatcgagatgaagttgaaaaaacggtaaaagattattttttggatcaatatagaacgaaggtaaaagtccataacattgtcggagggcatgggtttgttactgtgtatgccgaatcagtcggaaacttgcatttctacacaagcgcaaaaattgaaattgatttggacaagaaaagaggtgcaggctgacgcgatcagctcatcggagtgggacgtaaaagactcgattacaagcgcgatatatgcgttggcttttgaagacgaatttgccgctctagattactatttagagaagctggcagaagaagagccggttgtaggtaaaacgcaggcagccgttgataacacaagcggtatgggatatcagacgccttattatgctgtttctttaaatgctgattggaaggatgacctttattcagcctatttagaaaacccaaaaagaagcaaaaaagactggcaagagaaattggaagatgaagaaatcaccccaaaatcatgtgatatcaatatacggttatatatgaaaaaaccaaatacaagaccggacgagcgcatttataatcaagttgtccaggatatcgaggacatggaagagctggccccggggacttacaccatttacttgagtgacaatagaatcaacaaaaacctaggatataattcaagaaaaagcacgcttggccgataa

SEQ ID NO: 1694 - DNA, 171 bp, Bacillus licheniformis
gtgcgatgcttcaaaagacatcctgaacatatcaaacttcttcgggatgatgcaggggacagaggaaaaaaccgccggaccaaggtggcaggcggttttccttttgtagaaaaacttgtggaaataaagcttcgtggaaatcctgaattttttgctgtgaagggcggctga

SEQ ID NO: 1695 - DNA, 189 bp, Bacillus licheniformis
ttgaaaattgcaaaagtcgggaatgtcatcgaatttaaaaacggactcaccggaatcgtagaaaaagtaaacgaaaactctgtgatcgtcgatgtcacgattatggaaaactacagagacttggaactggactccttaaccgtcgtcaatcataaaaactataaaattattaaagactccctgcattaa

SEQ ID NO: 1696 - DNA, 195 bp, Bacillus licheniformis
ttgacagagcaaaatgccatcgatcagatcgagcaattaaggtcagggagcattcatgagctccgtgtgaaaaaagaggattttctttctttcagagccatcttaacaaagcaggaagattttaagcattttcgcggcattgcccagcatggcggagatattatatttcaatatatgaaagaggcaagaagctga

SEQ ID NO: 1697 - DNA, 141 bp, Bacillus licheniformis
ttgcagacagccggcggatttcatgcaaaaaacaccaaaatctccagaaacatatggcttcacacaaataaaaaaagctttctcagcctgtctgagaaagcttttttcagcttcttgcctctttcatatattgaaatataa

SEQ ID NO: 1698 - DNA, 612 bp, Bacillus licheniformis
atgaaatcgaaatttgctgctctagctgcgtttttaatctgcatgctgccggcggcaagaatcgagcatgctcaagctgtcatgttgttctcgaaaaaagataaacaggaaatggaacggctgatggaaagccttaaacaagaagaaaatcctgctttttcccaattgacagatgagaaaagcttcattgaagccgcgcatctgtcagctgaagaggaggaggaaatagaagaagctgaagaagagacgactgatcttacacataaagaaaaagatcttttatcaaggcttgtacacgccgaagcgaaaggcgagtcatttgaaggaaaagtggctgtcgccaatgtcgtcctgaatcgggtgaaagacagccgatttcctgacagcgtaaaaagcgtgatctatcaaagaaacgcttttgagcccgttctaaacggcagcatcgagaaaaaagcagaccgcgaatcagtggaagctgtggaagaagcggtagatcaaaataaaaaagaaacagaagctttatttttctataatcccgacatcgcttctgatgactggattaaaacgagaaaagtcgtgaagcgcatcggcaatcatgtctttgcgatctag

SEQ ID NO: 1699 - DNA, 1341 bp, Bacillus licheniformis
atgaaccgttttgtaaaaggaatcgttcttctttcgctagctgctttttttgcagaatgtcttgaattcgtcatcaacatgattcttgcacgggagcttggcgagcatggcatggggctctacatgagtgttttgccttccatttttttagtcgtggtgattgcgagccttgagctgcccgtatcaatatcgaagtttatcgccgagtccaacccgaagctgcacgaaagcatgctgaaacatgcattgcggatgactgcggtctgcacggttttctccacggcagccgcagtgatcattcttccatttattccggtttttgattcttaccaccctctaatcagaggacttgtgatcgggatgattcctacggttgcattcacatcgatcgcgagaggctacttcatgggcgttcagcaaatgggtaaaatcgcaacggcgaatgccttgaaaaaaatctttcagctcatcggcttgtttttattttttcaatggtattcctttgaattggatacttctcttctcatttcattgtttgtcctcgttgcaagtgaagtggtcgtgtttgtttatttgttttcgcagtttgttttggtcaggcgtgccgctcaaaaagggcagcagatccacttgcggagaaacgatgttttaaaacgcctgctcactgtttcgatcccgacgacggggctgcgcgtgtttcatgctgtgacaaatgccgtcgaaccttttttggtgaaggggacgctgcttgccgctggcgtatcaagaacatcggccatcgaccagttcggcatgctttcgggagttgcgatgacaatcggcttttttccggcttttatcgcccattcactgatggtcgtcatgatcccgagcatttctgaaagctacgcttacgggcaatacgaaagagtgatcaaacggattaaacaggcgatctttattacgctgttttacggcataccgtccgtcatggtgatgtatcactttgcagagccgctgacccatttatttttcgattcggtcaaggcgtcgttttaccttaaaatgttgtggccgtattttttattccacttttttgcgatgccttttcaggcctgtttaatcggaatggggttggccaaagatgctttttatcataacgtttgggccagtgtcttatcgtttttgatgatgtatgttctcgggtccatgcagactttgcagatgacggggatcattcttgcgatgaataccggtatgattttgctgacggcgctgcattatgtgacgatttgcaaggagctgggcgtcacgctttttttgacaaacaaatcccgatctccgagaattgaaagccgctga

SEQ ID NO: 1700 - DNA, 492 bp, Bacillus licheniformis
atgcgaagaatcagtctcatttacccgctcatcctgctgttttttaccgggttattcgtatttcagccgcaggcatctgcaaaacaagcttcgccggcagtcatgcagatgaacacggtcgaaggtcagcgcgtcgtcattcccgccgaaggccagaagacgatcgttcatttttggacgacctggtgcccgccatgccgtgaagagcttccgcgattccaatcctactatgaaagcaagcaatccggcgtcaagctcgtgaccgttaatttactgaatgccgaaaagaacgaacagaaggtaaaacagtttattaaagcaaacaagctgacatttccgatcgtttttgacaaaaagggtgagatgatgaaagcatataaagtcatgacaattcctacgacttttttctttaatgaaaaaggagagctggagaaaacgtttgtcggccccattactgtagaacagatgaaggaatgggcaggaaaaagctga

SEQ ID NO: 1701 - DNA, 1908 bp, Bacillus licheniformis
atgcaattagagatcgggaagcaatcgcagcaaaaccgtcacacgttgcaatttgaaaattggaggcagcacggggaattgatagctgcgcttttgtcgggtttgttgattcttgcaggctggctgttgtccggcaatgaaacattgtccgttgttctgttttatttagctttttgtatcggcggctttgctaaagcgaaagaaggtatacaagaaacgctgtcggaaaaaacgctgaatgttgaactcttgatgatttttgcggcggtcgggtctgcgctgatcggctactgggctgaaggggccgtgttaatttttatcttttctctcagcggagcgcttgaaacgtatacattaaataaaagcaaacgcgatttgacttcactgatgaaattggagccggaggaagccgttttgcttgaaaaagaaggaacaagaaccgtggcggcagccgatcttcaggcgggcgacctcattcttgtgaagcctggagaacgcattgcggcagacggagaaatcgaaaccggaaaaacgagtatcgacgaatcggctctaacgggcgaatccatcccagccgaaaaaacactcggagacgcggtttttgcgggtacggtcaatttgagcggatcgctcacggtccgtgtcacaaaggcaaatgaagattcgttgttcaaaaagatcattcggctcgttgagtctgcgcaaaacagcgtttcaccgtcgcaggcgttcattgagcgatttgaaaatatttacgttaaaggggttttgcttgctgtcggactgctgctctttctgccgcattttttgcttggctggagctggagcgagacattttacagagcgatggtgttcatggtcgtcgcttcgccgtgcgcccttgtcgcttcaatcatgcctgccgcgctgtcgctgatatcaaatggcgcaagaaacggcctgcttgtcaaaggcagcgtctttcttgaaaagcttggcaacagcaaaatcgttgcattggataaaacgggaacgattacgaacggaaagcccggggtggaggatatgcttttagctgctgatatcgaggagcgcgaatgcttggaggctgctgctgcgattgagaagcagtcaggccatccgcttgccaaagcgattgtcgagtatgcagaagcaaaaggcatcaagccggccgcgaatgtgtcgatcgaggagacgtcagggtttggcgttcaggctcgatacaatggagagacatggctgatcggcaaagccggatttgtcggggaagaggcagccgggcaatttctcacggcggctgttcaggagcttgccaagcagggaaaaacaattgtgttcatgaaaaaaggcgaaaaaatcgcggggtgttttgcattaaaagaccaaatcagaccggaagcaaaagcggtggtcgaagagctgaacgcgcttggcgttcagacggcgatgctgacaggggatcagcctgaaaccgcagcggctatcgcacgagaagcgggcttgaaaatcgtcgtttcagaatgccttcctgacagaaaagtagaggaagcgaaaaagctgaaaaaaacatacggaacaatcgttatggtgggagacggaatcaatgatgcaccggccctagccgccgctgatgtgggaatcgctatggggggaggcacagatgtcgcactggaaacggctgacgtcgttttaatgaaaaacgaattgacaggactgaccaaaatgattcggctctcccggaaaatgaatacgatcattaaacaaaacgtcattttctcgcttgctgtgatctgtcttttaatctgcagcaactttcttcaaattcttgatctgccgctcggtgtcatcgggcatgaaggcagcacgctgcttgtgattttaaacggtctcagactgctgaaatcctaa

SEQ ID NO: 1702 - DNA, 1095 bp, Bacillus licheniformis
atggaaagaattgaacaaatctcttcctggctgaaagaaaaaaacatatcttcggcttttattcattcaaaagaaaacgtattttatcttaccggcttttatacagaaccgcatgaacggctgatgggcgtttttatttttcaagatgaagagccgttttttgtttgtccgcaaatggaggccggtcaggcgagagcagccggctgggcgtatgagatcatcggatacggggatcatcaaaacccttgggaactcatatcctcagcgcttcaaaagcgaaacggccaatgtttaaaagtggcggttgaaaaagaaacgcttgctctttcgcgcgccgaaatgctgcaggcggtcacaaacggtgcggagcttgtctctgcagaagaaaggctgaaccaaatccgcgtcatcaaagacgaaaaagaaatcagcatcctccgcgaagcggccaagcttgccgattacggggtcgaagcaggagccgccgcattaaaagaggggatagcggaaatcgatgtcgtcgctaaaatcgagtatgagctgaagaaaaaaggagtccaggggatgtcgttttccacaatggtcctttttggagaaaaatcgggacagccgcacggaaaccccggcagccggacgctcaagccgggcgatttcgtcctctttgatttaggtgtaatcattgacggatactgctctgatattacaaggacgctcgtgtatcaaaatgtgagcgaaaaacaaaaagaaatatataatacggtgcttcaagccgaaacggaggcgcttaagatgagcaaacccggtgtgagaatcggtgatcttgatttaaaagcgcgcggcatcatcgaaaaagcgggctacggcgattactttccgcaccgcctcgggcacgggctcgggatttcgcctcatgaatacccgtccatgagtcataataatgacgaacttttgaaacaaggcatggtatacacgattgaacccggcatctatgtgccggaaatcggaggcgttcgcatcgaggatgatgtacttgttacagccgatggagcagaagcgctgacaaagtatccaaaagagctgactgtcatttcataa

SEQ ID NO: 1703 - DNA, 135 bp, Bacillus licheniformis
atgggcatcttcattctgatcctattatgtatcgttatcgtgctgtcttcaaaagcagcgatgaaacccctcaaagaaaaacacgaaatcaaaccattccgttcctttgacgatttcttcatttcaaaggattga

SEQ ID NO: 1704 - DNA, 120 bp, Bacillus licheniformis
gtgttcagcaccggtgctgtcttcattctaaattatgaaacgctttccatatcaagccctaaatcaataaaagaaacttctgatgccaaagggttctggaatattttgaccatcgcttga

SEQ ID NO: 1705 - DNA, 727 bp, Bacillus licheniformis
gtgaaaaaattagggtttgtactgtttatgtcgatgtttgcttttgtcagtgtagtatcggcagctgaggcgaaagtcattgatcatgacaaagtgcaaggcttcagcgaagtgacccctgtgacggtttcccaaaaagcggccaaacgttttcagccttatttgaaggttgcgagcggctgcgtgccttttccggcagttgacgcacaaggcaacacaagcggaggtctggagcctaccggagcgcccgaaggccactgcagcaaaagcgtgggacaagtgtactcacgatccgcatggtataatggagtttgggcgattatgtatgcatggtattttcctaaagattcacctctgcctttaaaagcattcggccatcgacatgattgggaaggtatcgtcgtatggatcgacaatccggcaaatcaaaatccaaaagtgctttccatcgcttattctcaacacggtaaatttcaaaaaacagcgccaaacaacaatattatggaaggcgatcatccgaagatccgctatgatgctcctcaaccgccgatcaaccacagcctatatgtggacagtgcaaagggcggcacccagcctctcatcgggtgggaagatttgacgcctgccgcaagaaacgcattgaacacaacggatttcggaagcgcaaacgttcctttcaatgatcacaatttcacgaataacctaggaaaagcatggtttagataaa

SEQ ID NO: 1706 - DNA, 972 bp, Bacillus licheniformis
atggcaaatatcagggaaatagctgaagcggcaggggtttccatcacgactgtttcgagggttctcaacggccacccgtatgtcaaagaagaaaagcgtcaaaaagttcttgagacgattgaacgcctcgaatatgcaaggaatatgcatgccgttcatttatccaaaggcttttccaacatgataggcgttgtgctgccgaccatcagccttccttatttcggcgagctgctggaaggaatcgctgaagaagctgcgaaggaaggcgttcacttttcgctttaccaaacaaattatcaattggaaaaagaaatttttgcattggagcagctgaaacaaagacaggtggacggcctgattttctgttcaaaagcgatgtccgatgaagcgcttttggactggcgtgaaaccggcccgttcatcctgtgccaggactcaggcgagcagcactttgcaacggtcagcattccgcataaagaagcattcagacttggattggattttttaattgaaaaagggcacacaaaaatcgcgattggtttggcaaggaaaaacggcatgaacagccattttcgcctcaaggcatacaaggaagctttggccgcgatcggggagccttaccgggaagagtgggtatttgagcggtcgctgacaattaccgacgggcaaaaactgttctccgaatggaaagggatggaggagaagccgacggctgtttttgtcgcaaacgaccaagtatcagccggtatttttcttgaagcgcagcggcatcaagtggatattcccggaagcctcgctattttaagctgtgacaaccagccgatcagcgaagtgctcggcatttcaacaattgaaatcaatataaaggaaatggggaagcgcgcgtttcgccttctgcaaaaaagaatcggcggcgccgggccggaaaaactgactgttccttacaagctgatcaaaagggcgactgtgtaa

SEQ ID NO: 1707 - DNA, 846 bp, Bacillus licheniformis
gtgaacagatcctttaccgttgaaaaggtactcaacaacaacgttttaatcgctctccatgatgattacagagaagttgtcttgattggcaaaggaatcggttttggtaaaaagcgcggagatcttatcgaacatgagaactacgaaaaaatgtttatcctggaaaatgataaggaacaatcgcagtataagaagctcctcacttatgtcgatgaaaaaatggttgatatcgccaatgatgtcatctaccatatcgcgcaaaaaatcggccagccgctgaacgaacacattcatgtcgccctgacggaccatatcgcatttgcagttaagcgtctagaaaagggatttgatatgaaaaatccgtttttgcttgagacggaatcgctttatccgaaggaatacgaagtcgccaaggaagccgtcgatatgattaatgaaaaatccgacattcagctgcctgaaggtgaaatcgggttcatcgcgcttcatatccacagtgcgatgacaaaccgcccgctttctgaagtcaatcagcattcacaactgatctccaggcttgtccaggtcatcgaagattcattccagatgcaagtcaacagggaaagcgtgaactatttgcggctgatcaggcacttgcgctttacgattgacaggataaaacgggacgagccgattcaggaaccggaaaaattaatgttgttgttgaaaacggaatatccgctgtgttacaatactgcttggaagatgatcaagatcttgcagcaagcgctcaagaaaccggttcatgaggcagaagccgtttatttgacattgcatttgtaccgtttgactaataaaatttcataa

SEQ ID NO: 1708 - DNA, 2097 bp, Bacillus licheniformis
atgtttaaatcgctatttggcgttctgcaaaaaattggacgagcgctgatgcttcctgttgccatcctgccggctgcagggattctgctcgcgcttggtaatgccatgcaaaatccgcagatgacaaaagtcgcaccattcttaacgaacagcaccgttcagcttgttgcgaaagtgatggaaagttcaggtgacgttgtgttcaccaacttggcgctccttttcgctgtcggggttgccatcggtttggctaacggcgacggcgttgccggaatcgctgctattatcggatatcttgttatgaatgtcacgatgagtgcagtgctccttcaaaacggttcaattccaagcgatgcagttgaaagagcacagttctttactcaaaaccatccggaatacacgacaatgctcgggataccgacattggcaacgggagtattcgggggtattattgtcggtgtcctggccgcagccatgtacaatcgattctacacaatcgagcttccgcaatatttaggattctttgccggaaagcgctttgttccgattattacatctatttgtgcattgctgctgggacttgttatgctgtttatctggccgccaattcaaggcgcactgaacagcttttcaacgaacctgcttgcagccaatgaagcggtcgcagctctcatcttcggaatgattgagcgggctctgattccgttcggtctgcaccatattttctactcgccgttctggtatgagttcttcagctatacgaaccaggcgggagaaattgtccgcggtgaccaaagaattttcatggcgcaaatcaaagacggcgtcgaattgacagcgggtacatttatgaccggtaagtatccgttcatgatgttcggtcttcctgcggcagcgcttgccatttatcatgaagcaaaaccgcagaacaaaaagcttgttgccggtattatggggtcagcagccttaacatcattcttaacagggatcactgagccgatcgaattctcattcctgttcgtcgcaccgattctgtttgcgattcactgtgtgtttgccggcctgtcattcatgatgatggacatcttgaatgttaagatcgggatgacgttctccggcggtttgatcgactacttcctgttcggaattctgccgaaccgtacagcttggtggcttgtcattcctgtcggtttagtcctggctgtcatctactacttcggattcagatttgccatccgcaagttcaacttgaaaacgcctggacgcgaagatgcagctgcagaacccgctgatgaaggcaaagaagcagcaggagatcttccttatcaaattcttgaagcgatgggtgaccaggaaaatatcaagcaccttgacgcttgtatcacaagacttcgcgtaacagtcaacgatcagaagaaagttgacaaagagcgcttgaaaaaactcggcgcttccggcgtgctggaagtcggcaataacatccaagcgatattcggaccaagatccgacaatttaaaatcacaaatgcaagacattatgtcaggccggacgcctcgtcctgaaaaagcgccgaacgctgccgaggaagtggagcagcaaatcgaagaagctatggttgagcctcttcaaaacgaatcaggtgaagaagtattcgtttcaccgcttgcgggtgaacttcatccgattgcagatgttccggaccaagtattctccggaaaaatgatgggtgacggatttgcgattcttcctgcagaaggcacagttgtgtcacctgtaagagggaaagtgctgaacgtgttcccgacaaagcatgcgatcggtctgcagtctgacggcggcagagaaattctgatccactttggaatcgacacagtcagtctgaaaggagaaggcttcacttcatttgtttctgaaggtgacagggttgagcctggccagaaactgcttgaagtcgacattgaaaaagtgaaggacaatgtaccttccctgatgacgccgatcgtgttcacgaaccttcaagaaggagaaagcgtgagcttgcaggcagaaggcaatgtcagcctgacacaggacgacatcgtccgcatcgaaaaataa

SEQ ID NO: 1709 - DNA, 267 bp, Bacillus licheniformis
atggcacaaaaaacgtttaaagtaactgcagattctggaatccacgctcgtccagcgactgttcttgtacaaacagcaagcaaatatgatgcagatattaatttggaatataacggaaaaacagtaaaccttaaatctattatgggcgttatgtcactaggtattgccaaaggtgctgaaatcacgatttctgcttccggcgctgatgaaaatgatgctctttccgaatttgaagaaacaatgaaaagcgaaggtttaggcgaataa

SEQ ID NO: 1710 - DNA, 1719 bp, Bacillus licheniformis
atgcttgaattaaaaggaataggcgcttcagccggtattgcgattgcaaaagcatatcggcttgaggagcctgatctaacggttgaaaagaaaaacatctctgattctgatgcggaagtaaatcgttttgaagacgccatcgagcgttctaagaaagagcttgaaaccattaaaaaccatgctttgaaagagcttggcgaagataaagcggaaatcttttctgcacatttgttagtattaagcgatcctgaactgttaaacccgattaaagacaaaatcaaatctgattcagtcaatgcggaattcgctttaaaagaaacggccgacatgttcgtcaccatgttcgagtcgatggacaatgaatatatgaaagaacgcgccgcggacatccgcgatgtcaccaagcgtgtcacagggcatcttctcggcgttgagattccgaatccgagcctgatttccgaagaagtcatcatcgtggccgaagacttgacaccgtctgatacagcgcaattaaaccgcaactttgtaaaagggtttacaacagatatcggcggacggacgtcccactctgccatcatggcgcgctcgcttgaaattccggccgttgtcggcacaaaagcggcaacgaaaggcatccaaaacggcgtaacagttatcgttgacggcatcaatggcgatgtcatcgttgatccttcccaggaaacaatcagcgaatacgaagaaaagcatcaagccttcctggcgcaaaaagccgaatgggcaaagcttgtcaacgaaccgactgtaacgagcgacggccatcacgtggaacttgccgctaatatcggtacacctgatgatgtaaaaggcgttttggaaaatggaggagaagcagtcggcctttaccgaactgagttcctttacatgggcagagaccagcttccgacagaagaggagcaatttgatgcctataaaaccgttcttgagcgtatggaaggcaaatccgttgtcgttcgtactcttgatatcggcggagacaaagagcttccatatttagaactgccaaaagaaatgaatcctttcttaggatacagagcgatccgtctttgccttgatgagcaagagattttcagaacgcagcttcgtgcgctgcttcgggcaagtacatatggaaacttaaaaattatgttccctatgatcgcgactgtaaacgaatttaaagcagcgaaagcgattcttttagaagaaaaagaaaagctgaaagctgaaggccaacaagtttccgacgacattgaagtcggtatgatggttgaaatcccttcaacagcggtcatcgctgatcaatttgctaaagaagtcgatttcttcagcatcggaacgaatgacctgattcaatacacgatggctgctgaccggatgaatgagcgggtatcttatctttaccagccatacaatcctgcgattctccgcctgatcacgcttgtcattgaagcggctcataaagaaggaaaatgggtcggcatgtgcggcgaaatggcgggagatgaaattgcgatcccgatcctgctgggtcttggattggacgagttctcaatgagtgcgacgtcaatcctgccggcaagaacgcaaatcagcaagctttctaaaaaagagacagaatcgttcaaagagcaaattctgtctatgagcacaacagaagaggttgtacaattcgtaaaagaaaccttcaacctggcataa

SEQ ID NO: 1711 - DNA, 234 bp, Bacillus licheniformis
atgcctaggcagccattcaaactgggagatgaggtgtatgtcatttaccggaatccgcatgcagcgaatgtggcgcatataaaggaagctgaagtcgttgatcatccgcttcacgaaggcgaactggcattgtttatgtatgatacatatcacgcctttgccgaagatgatgccgttttttcttcatatgaagaggcggaacggctttaccgtgaattatttgacgggatatga

SEQ ID NO: 1712 - DNA, 1029 bp, Bacillus licheniformis
atggtaaaaccgtttgttccccaactcgtctatattgaaccgagagccctggaatatccgcttggaaaagagctgagggataaattttcaaacatgggacttgagatcagggaaacaacttcacacaaccaggtgaggaatatcccgggggaaggccacctgcaaaaatacagaaatgcgaaatccactttggtgatcggcgtcagaaaaacattgaagttcgattcgtcaaaaccgtccgcagaatacgcgatcccgtttgcaacagggtgtatgggtcactgtcattactgctacctgcaaacgacaatgggcagcaagccgtatatcagaacgtacgtcaatgtggaggaaatacttgagcaggcggatcaatatataaaagaaagggctcccgaagatacgcggtttgaagcttcctgcacatccgatatcgtcggaattgaccatttgacacatacgttaaaacgcgccattgagcatttcggtcaaaccgaccatggtaagctgcgtttcgtgacaaaatttcatcatgtcgaccatttgctcgatgccaagcacaacggaaaaacgcgcttccgcttcagcgtgaatgccgaatatgtcattaaaagctttgaacccggcacatccccgttggataaacggatcgaagccgccgtgaaagtagctgaagcgggctatccgctcggttttatcatcgctccgatttatattcatgacggctggcaggaaggctacagagtgctgctggaaaagctcgatcgtgcgctgccgcagcatgcgaggcgcgacatcacctttgaaatgatccagcatagattcacgaagccggcaaagagagtcattgaaaaaaactatccaaagacaaagctcgaactggatgaagaaaaacggcgctataaatggggcagatacgggattggcaaatacatttatcagaaggatgaagaagcagagcttcgcagcgcccttgaatcgtatatcgacaactattttcccgaagcaaaaatcgaatatttcacataa

SEQ ID NO: 1713 - DNA, 669 bp, Bacillus licheniformis
ttggcgatctataaacagttttacgtcgataacggcacttcttatcagcaggtggacatccgcaattacagcaaaaaagatattcccggtttgattgctctccaaagagaatgctttccgcctccgtttccggaagaccttctgtggaatgaagagcagctccattcccatattgaacgatttcccgatggagcgctttgcgcagtttccgaaggccgcatcatcggttcgatgacagcgctcatggctgattttgatccgcatcatccgcaccacagctgggatgaagtgacggacaacgggtatatcggcacacatcaaaacgatggaaactccctttatgtcgtcgatatttccgtgtcccccgactatcgaaaactcggcatcggaatgcggctgatgcaatccatgtatgaactgacggtctttaaagggctcaagcgtctcattggcggcggacggattcctcattatcacaagtcggctgaagaaatgacgcccgaacagtatgttcaagctgtattggacggggaaaagcgcgatccagtgctctcgttcctgcttcattgcggacgctctccagtttgtgtgattcccggctacattgaagatgaggaatcgcttgattatgcggtgttaatggagtggaaaaatccttttttaacataa

SEQ ID NO: 1714 - DNA, 1968 bp, Bacillus licheniformis
ttgtttaaaaaactgcatgtcaaaattgccggatttgttgccgtcctgctggttttgacggttatcgtcctacagttctcgacaacacatttgttgaaatcgatgcttgaagatgaggcaaaagaatcaacgtccagcctcctcggttcaattaaaagaaatattgagcttcaattagaacactacgagatttctttgaatcgtataagtgatggagaaatggctcactcattcttaaaagacggggataataaaattataaaaatcgtcaatgatgaattaaaacaattaaaagaaaaaaatgagtatgtcaatttagcttatatcggcacaaaaaagaaggaaatgtttacatttccgaaaacgacctttgatgatgattataatccggctgaaaggccatggtatacgtcagctgcaaaaacacccgacaaagtcgtttggacggaaccttacaaagatgcggtttccggagatatgacagttactgcggcaaaagccatcgtcgtcaataataaagttgaaggcgttgtcagtatagacttgtcattgaattcattgaacaaaattatcgaaaatcaaaagatgccttatgacggctacgcatttattttggaccaaaacgggacaatgctcgcccacccgtcaaaacagggcgacgatatatcgaatgataaaacatatcgggacatcccgtcatcaaaagacggaatcaaagtaggcaaagatactgtgatcgcttatcagactgtcggcggtacgggctggaaagtcggtacgcagttcgacacggcgaagctgatgtgggtcgcgcaggaaatgaacaaaatggtcattatcgtttcaatcattgctctggcagcggcgatcattttaagctatttccttgccaaaacgatcacaggcccgattaagcagctgattgccaaaacaaaagcagtcgctggcggcaatttgacggtccaaacagcagctgcctcaaaagatgaaatcggtatattgacaaaagactttaacaagatggtcgaacatatgaaagaaatgattgtgcaagtcagatcatcgtccggaaaagtatcggatacgaccgatcaattaagcgctgtttcagaagagacggtttctgcgagcgatgaaatcgccaaagcaatcgaagaagtggcgacaggcgcgactgaacaggcggctgaggtcgaaaatgtcaatgaacaatccgaacggctgtctgtcaaaattaaagaaatcgaacatcatgccgacagcatcaagaaactttcgagaacatcagaagaagcaagctatacaggaatcgatgccctcgggcagctgcttgcaaagtcaaatgaagcaaactcggagacaaagaaagtggaacatatgctattccagcttgaagaaaaaacgaaaaacattgaagacgttgttacagccatctcggcgatctctgatcagacaaacctgcttgctctgaacgccagcattgaagcggcccgtgccggagaaagcggacgcggttttgcggtagttgcagaagaggtgagaaagcttgctgaacaatcggcggtttcttcacagcacatcagtgaaacggtcaaacagattcagatggaaacgaaagaagccgtttcagcgatgacagaagcaagcaagatgaatgaagtgcaaaatggaatgattcacgaaacaggtgaagcgctcagcaaaattactgctgaaatgcaggcgctcgtcaactcaattgaccacatttattctgaaatctcggatatgagcggagagcagcaaaaaatgtccgattcgattcagagcatttcagccatttcccagcagtctgccgcggctgcggaagaggtcagcgcttcggccaacgagcagctgacagcgctggaaagcatcgcaaaatcggctgaagcgctgagcgaggccaaccaagaattattaaatgcgatcaataagtttaacgtgtaa

SEQ ID NO: 1715 - DNA, 786 bp, Bacillus licheniformis
gtggacttaaagatgaatggcaaaacagcgcttgtggctgcaagcagcaaaggacttggcaatgcgatcgccaaagccattgcgaaagaaggggcaaatgtcatgctgtccgggagacacgaagcggacttgaaaaaagccgcggaagagctgaacggactcggcggcggcaccgtctcttatcaagtatgcgatcttgcagacgccgacgggatcaaagcgctcgttcaaaagaccgctgacacatttggaacgatcgatatgcttgtcaacaatgtcggaggaccgaagggcggcagcctgcttgatctgacagacgatgactggacctcatcatttgaattgcatctgctcagctatgtccgtttaatccgcgaagcttttccatatctcaaaaaggatgggggacgcatcgttaatatcgcttcatcatcagtcaaacagccgattccgggcttgctgctttccaacacgtttcgaatgggaatcgtcggtctgacaaaatcgattgccgaagagttggccgaacaccgcattttgatcaacacgctcgcccccggaagaatcgcgacggaccgcgtggcagagcttgaccggctgaaagccgagaaaacaggcctttccgagcagcaggtgaaagaaagctatgagaaagaaattccgctcggctcctacggaaaacctgacgactttgcacagtatgcaagctttcttttatcagagtgcaatacatatatgactggacaaacgctgctgatcgacggcggaatggtaaaagcaatttaa

SEQ ID NO: 1716 - DNA, 873 bp, Bacillus licheniformis
atgaaaaaaacggtcggatttatcggactcggtgtaatgggaaacagcatggcctcgcacattttagccgcgggctatcccgtcagcgcctatacgagaacgaaacacaaagcggacagcctcgtggaaaaaggggcggaatggaaatcatccgtcaaagcactggcgcagtcgtctgatgtgatcatcacaatggtcggctacccaaaagacgttgaagaggtttactttggaagcgaaggcattattgaaaatgccaaaaaaggttcctaccttatcgatatgacgacttccaaaccttcgcttgccaaacaaatcgagactgccgcaaaagagaaaggactttacgctttggatgctccggtttcaggcggggacgtcggcgcgaggaacggcacgctcgccatcatggtcggaggagaacggaaagcttatgatgaatgctacccgctcttttcgatcatgggtgaaaacatccagtatcaggggccggccggaagcggccagcatacgaaaatgtgcaaccagattgcgattgccgcagggatgatcggcgtcgcagaagcgatggcctacgccgaaaaatccggactcgatcccgacaacgtgctgaaaagcattacgaccggcgctgcgggaagctggtcgctctcaaatctagcgcctagaatgctgaaaggcgactttgaaccgggtttttacgtcaaacactttgttaaagacatgggcatcgcgcttgaagaggcggagctgatgggcgagaaaatgccggggctcgagcttgcgaaaagcctttacgacacccttgttgaaaaaggcgaagaaaacagcggcacccaaagtctgtacaagctttggacagaatacaaataa

SEQ ID NO: 1717 - DNA, 762 bp, Bacillus licheniformis
atgaaaaaagcttttcttttatcagcagcagctgcagcaacgctcttcacattcagcggcgttcagcacgcagacgctaaagagcagcagcaagtacaagtcaaaaccgttcattccataaatgtaactgatctcgcgggcaaactgaatatccaaaacatgaaccagctttctaaagctgaccaagaaaaaattcagtccctgcttcattcttatatgaaacaagcaactcaacagcctaaagcttctgcaccgaaggcttctgctcctaaagcttcaaagcctgaaagcacgcagactcaaaaacaggaagcttcaaagcctgcggcttcaaaagagcagacttcacagcaaaagcaaaatacagcgcctgcatcttcttctgtaagcgcgtatgaaaaagaagttgttgaactgacgaatgcagaaagaaagaaacaagggctaaaacctcttacattggatgaaaagctgagcaaggttgcccgcacgaaatctcaagatatgaaagataacaactattttgatcacaacagcccgacttacggttctccatttgacatgatgaagaaattcggcatcacataccgcactgccggagaaaacatcgcaaaaggccaaaaaacgcctcaagaagtcgtcaaagcttggatgaacagtgaaggccacagaaaaaacattatgaatcctaacttcacgcatatcggtgtcggatatgtgaaggacggcaactactggactcagcagttcatcggaaaataa

SEQ ID NO: 1718 - DNA, 2109 bp, Bacillus licheniformis
gtgacagaatctcaacatgatccggctgaaatcaaaaagagcaggcgttcgcgtttatggcggatcaacctgtacttctttgcggtgttcactttgttcgctgcgctgattgtcaagctgggcctcgtgcaaatcgtcaatggagaggcgtatgagcaggaagcttcgaaaaccgaggcgaaaattgcgtcatacccggcaccgcggggtaaaatgtatgacagatacgggcgggtggttgtcgacaaccaaagcgttcccgcgatcacatatacgatgatgactagcacaaaaacggaggaaaaaatcagcacagccaaaaaactcgcagaattgatcgatatcgatacttcgtttctgaaagagagagatctgaaagattactggcttgccagacacccgaaaaaagctgctgcacttctgaaagacagcgagaaaaccctcaagtctgatcaaacatacaagcttcaggtggaccgcgttccggcggaagagatcaaagcgctggaaaaggacaaagatgagcttaaagtcgcagcgattttcagaagattttctggcggctatgcgtatgagccgcaaatcgtcaaggcgatgagcccgaaaaccgcggggaaaaacgatgcgcagctccttgatgagaaggcttctaaacagatgccggccaacgatttgacgtatgaggaagtctcacgcgtttccgagcatcttgaggaactgcccggcgtcgacgtcatcatggactggaccaggaaatatccttatgaaaaaacgctctactccattttcggaggcgtcacaacgcctgaacaagggcttatcaaggaccgggaagacttttacctgacaaggggatatgcccggaatgacagagtgggaaaaagctatctcgagtatcaatatgaagaatatttaaatccgaaaaaagcgaaagtccaatataccgaaaaccgttcaggaaaggttatcagccaggaaacggttgatgaaggaagacgcggctacgatctgcagctgacgttcgacatggagctccaaaagaaagtcgaagaggctatcgaagaggagcttaataaattccgcggctcaaactacatgctggacagagcgttcgtcgtcatgatggacccgaataacggagacattctgtccatggccggaaagcggatcgtcgacggcaaaatcaccgactatgcaatcggcgcgtttacaacccagtacgaaatgggatcggcggtcaaaggcgcgaccgtgcttgccggctatcaggacggcatgccgcatgggcagagttatttagaccaagagctgagcttcgcagggggagttaaaaaaggttcctacagaggaaacactatcggttgggctaatgaagttagagcgctggaaaaaagttcaaacgtttatatgttctatgtggcaatgagaatggcaggaattacgtatgtaccgaacggcccgcttccggcgaacctagaggacttaaagaaaatgaggtattacttcaatcaatttggccttggggtaaaaacaggcatcgacttgccgcaggagtcggccgggatgcagacaaacccaaaaatagtcgggggtctcctcctcgatgaagcgatcggccagtttgacacgtacacgcctttgcagctcgcccaatatgtttcaacgatcgccaacggcggatacaggttgcagccgagagtcgtgaaaagcattcaccagccagaaagcgaaaaactcggtccggtcattgaagagcgctctgccaatgtgctgaatcgtatcaacaattctcaaagcgacatcgccatcgtcaagcaaggatttaaacgagtaacccagacgggaactgcagccggcgcattcggttcgcttgacgtatcaggcaaaaccggaacggcgcagacgcaatactacggcacaaaccgaaactggtgggggactaggacttacaatatcacctttgccggctattacccgtcggaaaatccgcaggtcgccttcagcgttgtcgtcccgaatgtcgacgacaaaacgaagatgaacaaaaacatcgccgccaaaatcgtcaaagcctatgtcgatctgcaaaaaaaatacagcaaagattag

SEQ ID NO: 1719 - DNA, 1812 bp, Bacillus licheniformis
atggaacaaaaaacaaaacgttttgagcaatataagcctcatatgaatttacaggcagtcctgtcagctaacggccgttttatatacatatctgcaaattgcaaagagctcttaagctacgagcagaatgaactgatcggtacgtatttgaaggactatttacacgaagacgatctttttctggtagaaagctatttttacaatgagcatcatttgctgccctgcaccttcagatttgtgaaaaaagactacacgatgatctggatcgaagcatcgatcgatttcgtgacgacccatgttggagaaaaagaacgcgaaattgtactcaaaatgaaagtgtttgaagaccgtccctctaagaaaagcagctccataaaagaggaagacgctccggaagaagcctccaggctgccggcaaaagaggaattcgaagccataatcgaaggcttgccaaaccctctgtgcatcagcgttcaaggggaaatagtctacgtaaatgacgccatggtcaacctgctcgaagccgagcataaacggcaaattatcggaaagtattcctacgattttatcgagaaagagtaccatgacatcgtcaaaaaccgcattaagcggatgcagcagggacttgatgtcggaatgatcgagcaaacgtggcataagctcgacggcacgcagattcacctcgaagtcaaggcggcgccgaccatttatcaaaaccagaaagcggagctgcttcttctcattgacatttcatcgagaaaaaaatttcagaccattttgcaaaaaagcagggagcgatatcagctcttgattcaaaactcaatcgatacgatagccgtgattcataaaggaagatgggtctttatgaatgaatcgggcattcgtctgtttgaagcaaagacgtatgaggatttaatcggcaaagatatttacgaacacctgcacccatgcgatcacgaagatgtcaaagcgaggctgaaacggatcacagaccgccaatccgaatctgaaatcataaaacagacgtggtatacatttgaaaaaaggctcatctatacagaaatggtttgcatccctacgacatttttcggggaaacggcggttcaggtgattttaagggacatttctgaacgcaagcagaccgaagagctgatggtccgttcggaaaagctgtcgattgccggacagcttgcagccgggatcgcccatgaaatccgcaatccgctcaccgcgatcaaagggtttttgcagctgatgaagccgacaatggaagaaaatgaacattattttaatattatcttttccgagttaagcagaatcgaattgatcttgagcgagcttctcatgctggcaaagccgcagcaaaacgcattgaaagaaaagcttgatctgatcaggctgatccgcgaagtgacggcgcttttagaaacgcaggccaacttaaacggcattttgatcaatacgatcctcacagacgacaaaatttacattaaaggggatcaaaatcaattaaagcaagtgtttatcaacctaatcaaaaacgccgtcgaatccatgccaaacggcgggacggttcatttgacggtcagagaaaccgacgattcggtcgtcgtcgaggtggaggacgaaggagaagggatacctgaacatgtcctgaagcggatcggcgagccgtttttgacgacgaaggaaaaaggaacaggcctcggtttgatggtcaccttcaatatcatcgaaaatcacaacggaaccatcgaagtcgacagcaaagcagaaaaaggcacgacatttaagattctatttccaaaataa

SEQ ID NO: 1720 - DNA, 1170 bp, Bacillus licheniformis
atggaacatttgcttaatccaaatgtaaaagaaatcgaaatctcagggatccgcaagttctcaaaccttgtatcccagtacgaaaacgtaatctctttaacaatcggccagcctgatttcttcaccccccaccatgtcaaacaggccgccaaaaaagcgatagatgagaatcaaacatcctacactcacaacgccggatatcctgagctgaggcaggctgtacagctttatatgaagaaaaaagccgatttaaattatgaagcggaaagcgagattattgtgacaacaggcgccagccaggctatcgattcggcattccgcacgattttatctccgggcgatgaagtcattcttccggggccggtataccccggctatgagccgatcatcaaaatgtgcggagcgtctccattgatcattgacaccacgtcccacggctttaagctgacagcaaaattgatcgaggaagcgctgacgccgaagacaaaatgtgttgttcttccatatccgtcgaatccgacgggaatgacgctgtccgaagaagagctgaaggacatcgcctcccttttaaaaggccgaaacgtctttgtgctctcagatgaaatatacagcgaactcacttttgacagaccgcaccactcgatcgcaactgtgctaagggaccagacgatcgtcatcggcgggctttccaaatcccacagcatgacgggctggagaatcgggtttttgttcgcaccgaaggaaatcgcaaagcatattttaaaagtccatcaatacaacgtatcttgcgcttcatcgatttctcaaaaagctgctctggaagccgtcaccaacggggttgatgacgctctgatcatgcgcgagcagtataaaaaacggctggactacgtgtacgacagacttgtgacgatgggcctcgatgtgattaaaccgtcgggagcattctacattttcccgtccatcaaatcgtttggaatgtcttcctttgacttctgcatgtcgcttcttgaagaagaggggcttgcgatcgtgccgggcagctcgttttctgaatacggggaaggctatgtgaggatctcttacgcatattctcctgatacgctaagggaaggtcttgaccggctggagtcctttgttttcaataagaggcaatcgatacagactacgtaa

SEQ ID NO: 1721 - DNA, 156 bp, Bacillus licheniformis
atgggaacaattgtagcgattaaaaatcatgaaatgaccattttagaagaggtcagccgggccgtttacacagaaatgctcaaggaagcttcagacagtgaagaacaaatatatatttcgtggaaagaagattttgactccgattacggctactaa

SEQ ID NO: 1722 - DNA, 525 bp, Bacillus licheniformis
ttggaattggaattagacaaacacgaaactgctcctgaaaggagcgagtatgccggaatcggcgcgcgttttgtagcttccctgctcgacggattgattctcgggattcccgcatatattttcacgtacgttttaacagcgacgttgatgttgggaaattcggatatcatgctcatgatggagactgatcccgagtatttgagcgatcaggaagtctttacgtttatcatcagtatgttcaaaaccgtagcgatcgttggaagtattacttttattgtgtattttctttattacacgctgatggaatcatccaaatggcaagggacgctaggcaagaaaatcatgaacgttcaggtggcgaaggcagaaggcggaagaatctcattcggccgtgcagccggaaggtttctggccaaaagctttctatctccgattttgatgatcggctacattatggccttttttacagaaaggcgccaggcgcttcatgatatgttggcaggaaccattgtcgtaaaaaaataa

SEQ ID NO: 1723 - DNA, 1323 bp, Bacillus licheniformis
atggatactcagccggaacgtgaacaagctgtaaagcgggcgcaaagaacgggaatcaagctctttttgacgctgccgattctttcttgggcgttatacgattttgcaaataccattttttcatcaaatattgtgacgatcttttttcctttttatttgcaggaggcagtcggcgaaaatgccagcatgaatcaggtggcaagcacttttatctcctattcgaacgcagccgcaagctttctgcttgtcattttcacgcctttattcggagtgctgatcgaccgaacgggcagaaagaaaaaatacatcggcctgtttacgatgatttgtgtttcatgcaccattttaatgggggtttttgccggggcttcgtttcagaaggacatatacgggcttccgctatccttgatccttgtcgtcatcatgtttgtgaccgcaaagtttttctatcattcaagcttggtgttctatgatacgattttggctgacttggggacaaaagaagaaatcccgctcttatcaggtttcggaattgcaatcgggtatatcggcactttagccgggttaacggtataccttcttgtcggcaaccaggattttcaccgcgcattcatcccgtcggctctcttgtttctgcttttttcacttccgtatctgctcttcacgaaagagaaaagaaaaccggaaccgaaagaaaagaaatcgtttttcagcggatactgggaaattgtgcagacattcaaagacattcgtctatataagccggtcttcttattcatgatcgcctactttttcctgaatgatgcgcttgctacagcaatagccatgatggcggtttattcaaaaacggtcatcggttttacgaccggacaattcgttttgctttatcttgtttctactgtatcaagcatcatcggttcatttctgctcggctttgtgacgaaaagaatcggcgccaagcacgcggtcagccttgtcgccgccattatgatcaccgctttgacgattggagcatgcacgacgtcaacgctcttgttttggattgcggggagcttgttcggcatttcgcttggaggcacatgggtcgcatcaaggacactgattatcgagctgacgccagaacataaaagaggcgaatttttcggattgtttgctttgtcggggaaaatctcttccattttcggtccggtcctctacggatcgattactttgctgttcagggatctcgggaacatggccagccgaatggctttcggatctttagtgttattggcggcgatcggcctgatcattcatcaaaaaagtgttaaggcaaaagcttga

SEQ ID NO: 1724 - DNA, 918 bp, Bacillus licheniformis
gtgtcttcaaaccaacaggaaattttattaagttcgggaaccaatgaattagaaatcgtgaagttcgaggttggtctcaacattttcggcataaatgtcatgaaagtcagagaaatcattcagccggttgaaattacgaaagtgcctcattcgcataagcatatggagggcatgattacattgcgcggggaaattcttcccgtcattgatttattctctttctttggcgttgagcacggtgatgacgagcatcaagaaaaatacattgtgacggaatttaacaagcggaaaatcgtctttcacactggagcggtttcacagattcaccgggtgtcatgggaagaaattgagaagccgactgctttgaatcaagggatggaccgtcaccttaccggcatcattaagctcggcggcaccatgattttcctgccagattacgaaaaaatcatttttgatcttgagtctgagtcaggtatggacccttatcaaatgaaaaatgaaaaattcgatcagagacggacagacaaaaagctgatcattgtcgaggactctccgctcctcttgcggctattggtggaaaagctgaatgaagctggatacaacaacatcgtgtcttttgaaaacggaaaagacgcttacgagcacgcgcttcaattgatggaagacggcacagctcttcacgaaaaagtcgatctgatgatcacggatattgaaatgccgcagatggatggacaccggctcacaaagctgctaaaagataacccgctgagtacggagctgccgatcttgattttctcttctttgattacagacgatcttcgccataaaggggaacaagtcggagccgatgaacaaatcagcaagccagagctcaatgaactgatcgaaaagcttgataaatatattttcaagaactaa

SEQ ID NO: 1725 - DNA, 462 bp, Bacillus licheniformis
atggacgaccataatcatacgaaagaattaaaaccgacagttgaaaacctttcaaaagcgatttatacagttaaccgccatgcgaaaaccgcgactaatcccaaatacctgtatcttctgaaaaagaaagctttgcaaaagctgcttaatgaaggaaaaggtaaaaaggtaggcctgcatttttcgaaaaatccaagattcagccagcagcagtcagatgtgctgatatctctcggagactacttttttcacatgcctccaacaaaagaagacttcgcaaaccttccacacttaggtacattaaatcattcgtatcggaaccctaaagctcatatgtccttgaatatagcgaaacagcttcttcaaaactacacgggaatcaaagaaaaaccgctcgtcacaaaccggaagcgtccagcctcaaaacccgtcttcaagaagcttggcgaaagctatttttaa

SEQ ID NO: 1726 - DNA, 1432 bp, Bacillus licheniformis
atggatctttttaaaaatcgtaatttcgtccgactttttttcgcagctttcgcttctcaaatgggaacgacagtcggaaatatggctttcgcctttttcttgctcgaccggttcagcagccagccggcctatacgacaatcgccgagctgatgtattccttgccgacggttttcgtattctttatcgtcggggtggtcgctgaccgttttgaccgcaagaaagtcgcggaaaactgtgattggatcagagcgggactgactgtcgttcttttctttgtattgtatcttcaaattataccgcttgtgtttttagtcctatttatcagaagcgcggttacaaaatttttctacccggccgaagcaagtttggtccaggccattttaagaaaggaccagtatgcaaaggctgcaggactgaaccagatgcttttcagcctgtttctattgttcggcgtaggaattggagcatttatgtacaagacgatcggcttgcatggagcaatcgctcttgattttgtgagctttatcgtctccggctttttaatccgttcctgcgatataccgcttgcagcgcggaagccgaacggaaataaaggctggaaaaacatgaccgtcaaagattcgatgcgcgattttaaggaaggcatcgtttatatattaaaaaataaattgcttgcctctcttgtattcggatattttattttcgggcttgtaagcggcggactttcggttctgccgatgtttaaaatgaagtatgagctgtcccctgacagttatgagtggcatacttccctcttcacaatcgtactgggcatcggacttttgactgggattgccgtcgccgccctgctcgaaaaaaaagtagaagccggcatacatgatgtcagtcccgatttttatcgcgggtgcctttatcatcctgcttggctttacagatcaattgcccgtatactactcggctgcatttcttgccgggatatgcatcgggccgatcaacacagctcttggcggctggattcccaaaatcgtccatccaaggctgatgggaagggtcagcgggtggaccgatccgctgacaatgctggcgcaatcctcagcgcttggcatgatcgctgtcctattcccgggaatcatcgccgatgtggattatatatattacggcttggcgggaattattctgctggcggcgctgtactactttatcgccctgcctaaattaagcgccgagagtgcggaaatcgacgttcaagcggcgctgaagagacaaaaaaataacaaaagcgaaaatgaactctgttttataaagatgaaaacgcgcgattccataaaaaatcgcgcgttttttctatgggatatttgcattttctgttctatttcgtataatttagacataagccttgcatctttaggaggtgatctagaaacgaatgga

SEQ ID NO: 1727 - DNA, 498 bp, Bacillus licheniformis
ttgctgatgtaccaagtcaaacccggagaaaccctggaaagcatcgccgccgatttcagaacgacccggcaggcgttgctgcaggcgaatcctggcttaaacggcggccaagtgtccgcgggccagtcgattatcattcccggcatcagaaatccggacacaattccataccggattgccgtgtctctcaacggaagaacgctcagattgtatgagcgagacagacttgtaaaaacatatccgattgccgtcggaaaaatcctcacacagacgccgagaggcgaatttgtcatcgtcaaccggcagccaaatccgggcggcccgttcggcgcctactggctgagcctgtcaaaacagcactacggcatccatggaacgaataacccttcgtcaattggcaaagctgtttcaaggggatgtatccgcatgcacaatcgggatgttctggaacttgcttctatcgtacccaacggaacccgagtgtccattacaccttag

SEQ ID NO: 1728 - DNA, 168 bp, Bacillus licheniformis
ttggctcaaaacaaaaggcatctgcatacattaagtaaaaacattcccgctccatttcatccaatccccatcaaaaaaacgaaacttcctcagcctctttccgtctatatattagcagcggaaaaggctctcttttcgtttttgaaaaggagatgtgctgattattgc

SEQ ID NO: 1729 - DNA, 858 bp, Bacillus licheniformis
atgaaaaatccgtccagaagacaatttttaaaaggcttcttaggccttgccgcagcagggctctttaccgctgccggcggcttgggctatgcgcgctatctcgaaccgcacatgcttgaaacaaactttattcccattcggcatcggctcattcctaaagggtttgatcagtttcggatcgttcagttcagcgatacccacttaagcgaatactttacagcagacgagctttcaaatgttgtcagccaagtgaacgccctctccccggatcttatcgtattcagcggggatttaatagataaaccgcatcgctaccgggaacacgagcgtgctgtaagcgccttaaaaaagctttcagccccctatggaaagcttgctatattcgggaaccatgatcacggaggctatggaacaaaagtctatcagacgctcatggcatcggccggttttcgggtgctgcgaaacgatttgctgaagcttgaattgatagacggaagcgtaattgagatcgcttcactcgatgatttgatgctcggcagacctgactacgaaggcatcctgtcaaagctgagcaaaaaagccttttcgattttgctcgtccatgagcctgatgccgctttaacggcaaatcaataccccgtcaatctgcaaatatccggacacacccacggcggacaaattcagattcccgtattcggtcctttgattacgcctccgtacggagaaatttatacggaaggaatgtatgaaacagccggaatgaaaatctatgtcaatcgaggaatcggcacgaccaggctgccgctccgctttctgtcaaagcctgaaatcaccgtgttccagcttgaatccatttaa

SEQ ID NO: 1730 - DNA, 765 bp, Bacillus licheniformis
atggacagaaaagttgtaatcgtgaccggcgggtcgagcggaatgggaaaagcgatcgccaaaaagcaggctgaagaaggatggaatgtgatgattacgggcagaacacaagaaacgctcgaagcggccaaagaagaaattgaaacttttgccgggcaggtggccgtatgccggatggatgtccggtctgttgaagatgtggaacagatgatcacagaggccgcaggacggtttggcacgatcgacgctttggttaacaatgccgcaggcaactttatctgcccggctgaaaaactatcggtcaacggctggaaggcggtcatcgatatcgtgctgaacggcacattttattgcagccaagcagccggccgctactggatcaaggaaaagaaacgcggccagattttaaatatggtcgcgacgtatgcatggggcgccggtgccggtgtcgttcactccgcggcggcaaaagcaggcgttctgtcgctgacaaggacgcttgccgtcgagtggggaagtgcatacgggattaggtgcaacgccattgcgcccggtccgatcgagaggacgggcggagccgaaaaattatttgaatcggaagaagccgcgcacgcgacaatcaaaagcgttccgctcaaaaggctgggcacccctgaagaaatcgcgggactcgccgcatttttgctttctgagcaggcgggatatgtcaacggggagtgtgtgacgatggacggaggtcaatggctgaatccccgtccgttttag

SEQ ID NO: 1731 - DNA, 1221 bp, Bacillus licheniformis
atgttggatccactcgatattttaacgaacattgaagatgtcattccatactatcagccgatcttcagtgctgaagaacaaaaggtgatcggctatgaagtgctggggcgcatcaaggtagaaactgaagtgaagagcctcgggccgtttttttctgatccgacaattccggaagaatacaagaaagaggttgatctcaaggtgatccgccaggcgctcgatcattttctggacagcgggcgcgacctgctcatcttcgtcaatcaagatgcaaatgtgctgatgatggatcacggcgaatcgttcctcgacctgttgatggaatatcaggataaagggctcgagctcagccgtttcgttatcgaaatcacggagcaaaagtttgaaggggatattgaacagcttcatcatttgctgacctattaccgtacatacggaattaaagtcgctgttgataatatcggtaaggaaagcagcaatctcgacagaatcgctcttctttctccggatctgttaaagatcgaccttcagccgctcaagctgtcttctccttcgccttcctatgaatatgtgctttacagcatatctctccttgccagaaaaatcggagccgcattgctttatgaagatattgaagcgagctttcagctgcaatacgcatggagaaacgggggccgatatttccaggggcagtatcttgagctgccgaaggataaatttatcgaacgggatgtattaaaggaccggctgcaggccgagtttcatcaattcatcacgcatgagaagaagaagctaaccattctgtacgatcactccgagcagttttacaaacgggttcatcagcttgtcacatcgctaaagaaaacggctcagtcagacgatgaatttctcttcaatctcggaaaagaactgacagattgcagctttagaatttacatgtgcgatgaagacggtattcagctgacgaaaaacgtgtttaagcatgacggagcatggatatttcagcctgagtacatcggcaaaaattggagctggcgcccttattttctcgagaatatcatgaggatgagaacgatgagaaaagggtttttcagcgatttgtacagcgatatcgaaacgggggaaatgatcagaacgttttcctatccgatggatgaagaattgtatctgttcattgacctgtcctactcatatttatacgaacaagacggattaatttaa

SEQ ID NO: 1732 - DNA, 114 bp, Bacillus licheniformis
atgatccacccctttttagcatttatattttcacattttcctttatatacgcgaaacaaacctctcgggattcattttttcaaaaagaaaaagcggcgaaaggccgccgcttaa

SEQ ID NO: 1733 - DNA, 627 bp, Bacillus licheniformis
atgaagaacgtttggtcatccttactgtgcgcgcttctggctgcggctcttgtattcttcgacgcggattttgccaaagccggagaaaaaccgacaagagcatcgttatttgagacccttcaatccgtatcggacgtccattttcagctgaccgaaaaggaaagaacgaaaacagacatgatatccctcttggaaccttatatggagcacgccatggcagtgaagtatgtagaggcgaacgcctttcctgaacaagcggggtggattttttacgggacagacgcgcctgaagttgcaatccctttcttcagctatgacgaagacacaaaagtggcggagaaagacggaagctataccgtatatgaatttgttggagatcaaaacgacggccctgtttcatatcaaaaaaattatcagacggtgacgctgaagaataccggcggcagcttcaaagtaacggatatcggccaatctgatacaaaaccggctggagaagaaataatgtccaaacaaccggatgaaaaagaaacaagctcgaattttgcggataaaggggaaggagaccaggctgcatttccgctttttgccaccgatgttaactggacattggccggaattttcagctag

SEQ ID NO: 1734 - DNA, 153 bp, Bacillus licheniformis
gtggttcaaatagactcctctgcagtcaaaaaaatatttttcatgtatgacatgaaaaaagaaaactcaaactatgaaaaagcggtttttctttttcatgatcaaaaaggaaaaatgtcatcggctgatactttgtggtatgatgctttgtag

SEQ ID NO: 1735 - DNA, 243 bp, Bacillus licheniformis
atgtcacaattaatgggtatcatcacgagactgcagagcctgcaagagactgcggaggctgccggagaaccgacgcagcgcaattttgaagtgaacggagaaaaaatttgcagcgtaaaatattttgaaaaaaaccaaacgtttgagctgacagtttatcaaaaaggagataagcctaccacatttccgtttgacaacatcgatatgatttcaatcgaaatctttgaactgcttcagcaatag

SEQ ID NO: 1736 - DNA, 150 bp, Bacillus licheniformis
atgaaagcttttccaagcgttatttgtccgcattgcaaaacaaccgagcatatggatcaagttctgacggcccagtccaatcagaatgtgatttacagatgtgagagctgcgggttcagcttgaaaaatataccgaccaaaaaaggatag

SEQ ID NO: 1737 - DNA, 519 bp, Bacillus licheniformis
atggctgattcttttcttttttacaatctttctgaagatcaaatgacatttcctgaagtgatcgggagactaaagtcgttcatacgccaagatccgagggcaagctatctgctgtccgtcggaacagactcgcagatccatcagaattgcacaaaatttatcacagctatccatttgcaccgcaaaggcaaaggagcgtggggctgtctgaaaaacacggttgtcaacagaccgatacatagcctcagggagaaaatatcgcttgaaacagcttacagccaagagattgccgcatatcttttaaatgattattttaatgaaatcatggatctgcttcttccgtttacagacgagggagcagatttaacccttgaagttcatttggatatcggaaaaaaaggaatgacaaaggatttaattcaggaaatgacaggacgaatcacttcgatggggatctgcgccaaaattaaacctgactcctatacagcttcaagctatgcaaaccggtacacaaaataa

SEQ ID NO: 1738 - DNA, 180 bp, Bacillus licheniformis
atggaacgcttttcagaagaagagagaaaactgttgctgaacgtacttttggaccatgagtatgccgtagagctactaagcagtgagatcaatgatatagaaactggtacaaaaaatgtggatagcctgacatataagaaactggttaccttatatgaccgtgtccggtctgaaaattag

SEQ ID NO: 1739 - DNA, 444 bp, Bacillus licheniformis
atgattagtttgcaatcagatgaacttcttgaaacgacagtaggtcagtttatgatcgatgctgataaagtagcccatgttcaagtcggaaacaatctggaacatgcccttctcgttttgacgaaaaccggatataccgcgatccctgtacttgatgcttctttccgtttgcacggattaatcggaacgaatatgatcatggataaaatcttcggcttggaacgaatcgaatttgagaagcttgataagattcatgttgaagaagtcatgctgacggacatcccccgcttaaaaattgatgatccgattttaaaaggattcggactcgtcatcaacaacgcgtttgtatgtgtcgaaaatgaagagcaggttttcgaaggcatttttacaaggcgtgtcgtattaaaacagctgaataagcatttgaggacgttgaataaatag

SEQ ID NO: 1740 - DNA, 876 bp, Bacillus licheniformis
atgcagcttcaagagcttcacatgcttgtcgttctggcggaagaattaaatatgcggaaagcggctgaacgtctgtttgtttcccagccggcattatcccagcggctgcagaccatcgagaaatcatggggaacgaaaatttttttaagatcgcaaaaagggctgactgtcacgtctgccggagaaaaaattatccagtttgcaaaagatgtaacattggaacaggaaaaagtgagagagaatatagatgagctggagggcgagatacacggtacgctcaaattggcggccgcttcgattatcgggcagcattggcttccgaacgttctgaaaacctacgttaaacaatatccgaacgtcaaaatctccctcgtcaccggctggagcagcgaaatgctgaaaagcctctacgaagaccatgttcatattggcattatcaggggaaacccggaatggaaaggccctaagcactacttgatgcgggacgaattgtaccttgtcgatacagagatccgaaacattgaggacattgccaaaacggaacggccgttcatccagttcaaaagcgacagcacgtactatcaggaaattcagcactggtggcaccaaaagttcaaaacatcgccgaaacaaaccattattgtcgaccaaattgaaacatgcaaacagatggctttccacggaatcggttatgcgatccttccatcggtgacgcttcacggaagcgggagccatgttcaccaaatccctttgcttgatgctaaaggaaaagcaatcggcagagatacgtggctgctcggttatgagccggctttccagctgaagcaagtacaggcgtttgtagaagttgtgaaagaatgtacggcaatggaataa

SEQ ID NO: 1741 - DNA, 480 bp, Bacillus licheniformis
ttgtctaaagcattgattgcatatgccagcatgtccggcaacacggaggatatcgctatgatcattaaagatacattgcgagagtacggttttgatgtcaccattcaggaaatggatgatgtcgataccgactcattggctgaatatgatcttcttttaatcggcacctacacatggggggacggggatcttccttatgaagcggaatcgttttacgaagaggtctcttcgcttgaccttaaaggaaagaaagcggcatgcttcggatccggcgattatgcatacccccgattttgcgaagcggtcaacacgttttacaccatgcttgaacgaaccggcgccgacctttatcaagagacactgaaaatagagcttgctcctgaaacagatgaagatgccgagtgctgcaaggaatttgccgaaggctttataagatgggcagaacagcaaaaacggcgggctgagatccatgtttcataa

SEQ ID NO: 1742 - DNA, 894 bp, Bacillus licheniformis
atgtttcataaaggtgcgacggccgtcgcttcggcaaagcattccggttactttgtcgccgtcaagcgggaaggcatttttcactattcacttgagcaaggctggaaaaggctctttcaattaaaaagcaaaatttgttccatcacctatatcggcgattatttattcgtcgcaggggagagaggaacgattatcagatcgtctgaccaaggggcaacctggtcaatctcaagctttccgacaaacgccacgatttggtcgatcacggggagaacggacggctttgtgtgtgcgcatgggaagcattgcatttacatatccgacgatttcggcgtctcatggaaagtcgtcaagccgttttccggtttgagtcatccgcccgttatccgctctctgtgcctccatgaagagtgcctttacatcgggacgcagattcatgaagtgcacggcggtgtttgggcatacgatttggcatcagaatcggcttttatgatcaaaaaagaaaccggccgcatgaccgcctcgatgatcgcatttgaaggcgaatggctggtatgtgcgatgggatccaaaaaagggaatcacggtgccgtcgatttggtcaacattcacacaaatgatgaaatacaaatcaggcggggccttgttgagaatgaagaatcattcctggatgtgtccgaagacaacggaatcatctatgtcacatcggctcaggaccgagacggcttttcaagaatctatcagcttgatttctttgagagggagctgaaatggtttgacacgataaaagggcatgggttcagggtggccaaccaaaaggagaacttcttttgcgcaggtctttatgaatgcaaatttgtcaggccttatgaacagcctgctgcagcccactga

SEQ ID NO: 1743 - DNA, 369 bp, Bacillus licheniformis
atggggaaagttttgctggtttatgcaagcatgtctggaaatacagaggcgatggccgatttaatcgagaagggccttcttgagggcggggccgaagtggaccgtcatgaagcgatggatgtagatgcggcgctctttaacgattatcagcacatgatatttggcgcctatacttggggcgacggagaacttccggatgagtttttggatatttacgacgatatggaagggatggatttcacaggcaagacgtttgccgttttcggatccggagatacttcttattttgcggtgccgtcgacattcttgaagataaaatcaaggagctcggcgggaacgtggtgcttccgtccgtcaaaatcgaaatga

SEQ ID NO: 1744 - DNA, 711 bp, Bacillus licheniformis
atgaaaatgatggatgcaaatgagattatctcatttattcaaaatagtaagaaatcgacacctgttaaagtgtatgtgaaaggcgaccttgaaggaattgacttcggcgcttcagccaagccttttattacaggcaatacaggggttgtattcggagaatgggcggagattcaagctgcgctcgaagccaacaaaggcaaaattgaagactatgtcatcgaaaacgaccgccgcaattcggcgattccaacgctcgatttaaaaaatattaaagcgcgcatcgagccgggtgcgatcatccgcgatcaagtggaaatcggcgataatgccgtcatcatgatgggggcttccatcaacatcggctctgtgatcggagaaggaacgatgatcgatatgaatgtcgtgctgggcggacgagctaccgtcggcaaaaactgccacatcggagcgggatccgtgcttgcgggtgtcattgagcctccttcagcaaaacctgtcgttattgaagacgatgtcgtcatcggtgcaaacgccgtcgtacttgaaggcgtgactgttggaaaaggagccgttgttgctgccggcgcgatcgttgtggaagatgttgagccttacacagtagtcgccggaacacctgcgaaaaaaatcaaagacatcgatgaaaaaactaaaggcaaaacagaaatcaaacaggaattgcgccagctttag

SEQ ID NO: 1745 - DNA, 1125 bp, Bacillus licheniformis
atgaaattggacgaattagcagcgattcgcagagatctgcaccaaattcctgaactcggttttcaggaatataagacacaggcttatcttttgaaccacttagcaaagcatccggaaggacggattgaaattgaaaagtggagaaccggactgtttgtaaaggttaaagggacggcccctgaaaagattttggcgtacagggcggatatggacgggctctctattcgggaagataccggatattctttttcttccgttcatcaggacaggatgcatgcgtgcgggcatgatttccacatgacgattgccctcggcatcatcgatcatttcgtccgccacccggttaaacaagatctgctgtttttgttccagccggctgaggaaggaccgggcggcgctgagccgatgcttgaaagcgacttgtttaaaaagtgggagccgagcatgatcacagcgctgcacatcgcgcctgaactcccggtcggaacgatcggaacgaaaagcgggctgctctttgccaatacgtcggagctcgtaatcgaacttgaaggaaagggcgggcatgccgcatatccccaccttgcagaagatatggtggtcgcggccagttcgctcgttacgcaaatgcagtcgatcgtagccaggaatgtcgatccgctggacagtgctgtcattaccatcgggacgattacaggcggatcggcacaaaacatcatcgctcaggaagcaaggcttgaagggacgatcaggacgctgtccccagcgtcaatggaacaggtgaagaaaaggatcgaggccatggttcggggcctggaaacggcttatcaatgcagcggtaaagtcagctatcctgcagcatattatcaggtctgcaattcaagcgatttagtcgaagactttatgcagttcgtttctgaaaacggccttgcagaggtcgtccgttcaaaagaagcgatgacaggggaggacttcggctatatgctgaaaaagtatccgggcttcatgttttggctcggcgtcgattcaccttacgggcttcaccacgccaagctgcagccgaaagaggaagcgcttgaaacggcagtccgcgtcatgacggcttatttctcttccaaagccaattag

SEQ ID NO: 1746 - DNA, 246 bp, Bacillus licheniformis
atgtcgaaaaaaatcggaatcgaacaatctctttctgatgtcgaggctgctttgaaggaaaaagggtatgaggttgtaacgatgaaaaccgaagacgatgcaaaaggctgcgactgctgcgtcgtcactggtctggacactgatatgctcgggatttcagatacgatgaccggagcatctgtcatacaggcgacgggtttaactgccgatgaaatctgtcagcaggttgagcaaaaacttcagtaa

SEQ ID NO: 1747 - DNA, 543 bp, Bacillus licheniformis
atggcagaacgcatggtaggtaaacaagcgccgcgctttgaaatggaagcggttcttgcaaacaaagaattcggaaaagtaagccttgaagaaaacatgaaaaatgataagtggacggttctattcttctatccaatggacttcactttcgtgtgtccgacagaaattacagcaatgtctgaccgctatgacgagtttgaagaccttgatgcagaagttatcggcgtatcaactgacaccatccacactcacttggcatggattaacacggaccgcaaagataacggtctcggccagctgaaatatccgcttgctgccgacacaaaccatgaagtatctcgtgaatacggcgtactgattgaagaagaaggtgtagcgcttcgcggattgttcatcattaatccagaaggcgaacttcaatatcaaacagtgttccataacaatatcggccgtgatgtagacgaaacattgcgcgtgcttcaagcgctgcaaacaggcggtctttgccctgcaaactggaaaccgggacaagcaaccctttaa

SEQ ID NO: 1748 - DNA, 459 bp, Bacillus licheniformis
atgaaattacgtcagccgatgccggaactgaccggcgcaaaagagtggttaaacggagaagtgacaaaagagcagcttataggagaaaagccgacattaattcatttttggtccatcagctgccacttgtgcaaagaggcgatgccccaggtcaatgaattccgcgaccgctacagcgataaactaaacgtggtggccgtgcatatgccgcgttcagaagacgatttagacttgaataaaatcaaagaagttgccgctgaacatgatatcactcagcctatttttgttgacagcgaccataagctgactgacgcttttgagaatgaatatgtccctgcttattacgtgtttgacaaaacaggccagcttcgccattttcaagctggaggcagcggaatgaaaatgctcgaaaaacgtgtgaaccgcgttcttgccgaaacagaacagtctgctgaataa

SEQ ID NO: 1749 - DNA, 591 bp, Bacillus licheniformis
atgtttaacgagagggaagcattgcgtttaagattagagcagctgaacgaggctgaagttaaggtgattagggagtatcaaattgagcgggataacatatatgcaaagctgcgtgaattggatcgtccatccagctttaatgatacaaaaaaagattttcgcccggagcgtaaaactgaatctctccctgttttagctgaattggctgcacaggagatgaagagctaccagcaacagcagcaacagcagccgcaagcatctcaaaagaaccagcagcagacttctccgcaaacctcctcactgcctgccggaattccagatggaacgacaaggcgcagaaggggtacagcacgtccaggctcaaaagctgcaaaattgcgtgaagcggcgattaaaacattaaaacgccataatgcggccatcaaaagctccgaacttcaaaaagaaatcgaaaaagagagcggacttgagatccctaatatgacaacctttatgcaaagcctgattaaaatgtacccggaagtcaaaaaaccataccgcggtcaatatatattagagggtgagatttctactgagacagagcagcaatag

SEQ ID NO: 1750 - DNA, 963 bp, Bacillus licheniformis
atgaaaaaaacatcgggttcgctgccttattttcaagatttatcacaggaaaacctttttttaaaagctgagctggcaagatcacatcaattgatacacgagcttgaagcaagctattttcaccagaaaaatcataagctcagccgggaaaacgcagcaatgaaacagcagcttcagcagctgtcattcgaactggagcggatttcggcaaacaaggaagacaagtcggccgaaacgctcaaccggataaaaagcgaattgctgagtaaaatcgtcgttcttcaggagcttcttcaaaaagaaacctatgcaagaaaacaagagatagaagaaaagcaccgccttcatttaacaaatgtaaaagccgaagaagagaaaaaaagcttacatagccaaatagaatacgaaaagcttcatgcagaaagagaaaaaacgctgagggaaaaaaaggaacaggagctcaaaaacgctgcatacgaaaatgcccgcctgaaaaagatgaacttcatgctaaaagtcttcagctcaaacaaatcgaaactgatgttgcggtattaaaagagcgggtgacggaaacgaaaagccggcttttggaggctgaaaaaacaaaaagaagcgctgttttatgaaacgattctctcttataaaaggcaactcgatgaaagtgataagtggatcgcttctcattttgccgatattgatgcatttcagcagacggagaaggcgcttgaacaaaacgaggaggtttttgaacggacagaacagatcgaggcggtgcttcaaactgttacagagcaagttgatcagctccaacaacaattgagcgccattcaacaaaatgatacgaaaatggatcaaaaaaataaacagaatggaaaaaaacaggcgaaagaagaaacacccccgcaaaaatgggtctatcaaattaaacgcaaagacaaagaaacaaaacctttaaattaa

SEQ ID NO: 1751 - DNA, 586 bp, Bacillus licheniformis
atgaaagaaatacatgtcatattatcaggggggctttcgcgccgttttggggaaccgaaggcgtttgcccgctggaaaggcaagccgctttatcaatggtgcaaacaggcgctgggagacgacgtcctgatattgagccgtccgggcttgacggagcggtttatagaactcggggaaaaaagcggtgctggaagatatcgaaccgtacagagggaaagggccgcttgccggtatgtacacagccatggagcgggcggaaggggaatgctatattttttcggcctgtgacaccccgcttgtccggcaggagaccatatcggctttaaaacggcagttgaccccggcggatgacgccgtcgtgcctgtcgcagacggaagggcgcagccgcttgttgccgtctaccacagaagggtaaaatccgtcctccatgaacagcttcagcagaacgaactgaagatcagcagttttctcgaccgcattcgcgtcaagtacattgaagcagatgcggttggtgcagagccgtgggaatttataaatgtcaataaaaagtcggatttagaagaaatagagccgttctttccggga

SEQ ID NO: 1752 - DNA, 1014 bp, Bacillus licheniformis
atgcatgaacggtattcaagacaaatcagatatcaaaacatcggacaggcgggtcaggacagaatcaggcagagccatgttttgatcgtcggggccggggcgcttggcacgtcagccgctgaagggcttgtgcgcgcaggcatcggcgcactgtctattatagaccgcgattatgtggaatggagcaacttgcaaaggcagcagctctacacagagaaagacgcggaggaaaggcttccgaaagcggcggctgcaaaagaacgtctttccgagatcaacaccggtgttgagcttcgtacatatgttgcagacggcacagttgaaacactcagaccgctgatcgaagaggcggatgccgtcattgatgcaacggataactttgagacccgcatgatcatcaatgaccttgcgcaggagacgggtactccgtgggtttacggcgcttgtgtcagcagtcagggcatgtatatgacgattattccccaaaaaacgccatgccttgcctgcctgtttgaagatgttccgattggcggggctacatgcgatacgtcggggattatttcgccggccgttcaaatggtgtcggcttatcagcaagctgaaattttaaaaatcttaactggacagcaagaagcgcttcaaactgcttttgtcacgtttgatttatgggcgaacacccattatcgcatgcagatcggccgcaatgagaaatgtccttcgtgcggagaaacgccggtttatcctttcctcagcaacatgagccaaaagaaagccgacgtgctgtgcggaagagagaccgtccaaattcgcagcgaaatgttaaaacggctgcctaaagaggagctcatgaaaaagctttcggtcatcggaaaagtggatgcgaatgattatttgctgcatgtacaatatgaggcgttcagaatcgttattttcaacgatggaagagcccttgttcacggcacaaatgatataaaagaagccaactccatattggcgagagtcatcggaatgtaa

SEQ ID NO: 1753 - DNA, 1293 bp, Bacillus licheniformis
atgattgaaaaaagaacgcccattccagtttttgaagccgctgcgcgtgtctctcagcaccagaagctgggagatgcagagtggattcaccttgaggagagtctccatagatttttagccgaagatgtcaaggctgatcacgatgtacccgcttttgaccgttcgccatacgacggctttgctgtccgagcatgcgatacagccggtgcttcgggggaaaatccgctgcaattcgaggtggttgatcacattggagccggggccgtatcggataaaaagctgggttcttttcaagccgtcagaattatgacgggagcgcagattccggagggcgctgatgcggtagtcatgcttgagctgacaaaaaccttctcggaagacggcaaaaactatatggtgttgaagcgctcactacagccgggagaaaatatatcaaaaaccggagaagatgcgagaaaaggatcagttcttgtgaaaaaaggaacccggataacgccgggtgttgtcgctttgcttgcaacattcggatatgcagcggttcctgcagtcaaaaagcctgtggtaggcatcattgccaccgggacggagcttctgaatgtcagcgatcctcttgttcccggaaaaatccgcaacagcaatgcaggcatggcggccgctcaggttgaagaatcaggcggaaaacccctttatttaggaaagatttctgatcaatttgacgaaagctttgcagcggtggaaaaagctttggacaaggtggattttctgattacgaccggaggggtatccgtaggggactttgattttctgccggcaatttacgaaaagctcggtgccgaggtcctgtttaataaagtggcgatgcgtcccggaagtgtaacgacggtcgctcaattaaacggcaaattgctgtttgggctgtccgggaacccgtcagcctgcttcgttggatttgagcttttcgtcaagccgtccctgcgcacctggctgcatcatccgaagccgtattctttatgtgcagaagcggttttagccaaggattttccaaaacctaacccgtttacgaggtttgtccgctcgtttgtatccattcaagacggcgcgcttcaggcggagcctgtcggtctggataaatcgagcgccgtaacgtctcttgcagatgccaatgcgctgatggttttgccgggcggaacgagaggctttgaagccggggcaagagtgcatgttcttttataccgggatgagaacggaagtgaacagctgtggccgcacattttccaatcctccagatcgtag

SEQ ID NO: 1754 - DNA, 528 bp, Bacillus licheniformis
gtggccgcacattttccaatcctccagatcgtagggtaccaaaacagcggcaaaacgacgttcgttgaaaaattggcgggaaagctcgatcagctaggagtcaatgttggctgtctgaaacaccacggacatggaggagaaccggacgcttttgccgaagggaaggattccgaccgcttttttcgggctggagcggctgcgtccggcgtagaaggtgcgggcgtttttcagcttacggcgcgcggcgagtggacgcttgatcaactgattgccgcttacggcgttttagcagttgagtgtctcctcatcgaaggatttaaacatgcgccatatcaaaaagttgtcatggtcagaaacgaagcggactgccggctcctgaaggaattggacggcatcatcgccgtcatttaccagcagagcgagccgaaaacagatgttccatcctttcatattgaagacccgggtgccctggcttttattctgaatcatctaaaggaggaaggcgtttgtctgaacgatttatcataa

SEQ ID NO: 1755 - DNA, 495 bp, Bacillus licheniformis
ttgtctgaacgatttatcataacaaaagacccgattgtcatcgaagatgtcgtcaaaaaagttgaaagaagggaagccggtgccgtcacgacgtttatcggaacagtgagagaatggaccaacggaaaaaagaccctctatctcgaatatgaagcttatgttccaatggcggtcagcatgctcgctcagatcggcaaagaaatcaatgaaaaatggcccggcacagctgcagccattacccatcgcatcggcaggctggacatttctgacgcggccgttgtcatcgccgtgtcgtcgcctcaccggaaagcggcgtatgaagcgaatgaatatgcgatcgaaagaataaagcaaatcgtcccgatttggaaaaaagaacattgggaggacggcgagacttggatcggcgaccagcttgagacaactgaatacccggaagggaaaccggatattgaagaggcggcttccggcagagaaagaggtgctgaccattga

SEQ ID NO: 1756 - DNA, 233 bp, Bacillus licheniformis
ttgattaaaattttgctgtttgcccagcttgcggaacaagcgggtgcgcagagtatcgatatagatgaagaaaagacgacaacagacgagattagacagtttttaaaagaaacgtacaatcttcaggggacggaccgggcgatgatcgctgtgaacgaagtgtacagaagaggaaacagtgaggtcgagtcgggagatacggttgcttttattcccccggtcagcggaggatg

SEQ ID NO: 1757 - DNA, 378 bp, Bacillus licheniformis
atgtcgaaaagagaggctttaaaaaaacggcttctcctcttaggtgaattggaacaaaaaatctggaaggacttccggaaagaacgcgaagggatttatgcaaggttgggagaacttgacagacaaatccagcgacatagacgttccaataaagagtattatgcagcacattgcgtagacattattaaacagcaaaaaggagaaattgtaacgacaaaagaactgaaaatgaaactgaaggaaagaaccaattttaacgttcaccgtattagtgagctttatgacctgattcaaaaattagaaccaaacatttcgaaagaacggcgcggctgttttctttatatagagaacggttctaaaaaaaacgtcggtcggtga

SEQ ID NO: 1758 - DNA, 1758 bp, Bacillus licheniformis
atggagtcccttaaaaaactaaaagatttttattggccttataaaaaaatgtttttatggtcgattgcgtcgatgcttctaatgacggcgattaccgttgtttatccgattattctgcaaatgacaattgatgaagtaattctcggcggaaaatacggtttggtcatatggatcagcctcgggttcatcgctgtcatggcggcgaagggcgcagccactttttttcatcagtatctcggagatatgttcggaattcgctctgtctaccggttaagaaaagagctgtatgcgaaattgcagcgtctgccgttcaaatattacgacagcgctaaaacgggagatttaatgtcaaggcttacggcggacgtcgaaggcatcagattctttttatctttcggctttgctgaggcgattcgatttatcctgcttgtcactttcagtctgtctgtcatgttttcttattctgtgccgctgactctggttacgattgcttctctgccgtttttaggagcggccgtctaccggtttgataaaaaagtgcatcccgcttttcggaacataagaaaatcattcgcccgtttaaatacgaaggttcaggaaaatatcagcggcatgaacaccgttaaatctttatcaaaagaagattttgagattcaaaactttactcattcaaatgcccattttcgaactaaaaatttaaacgcttcgtttatcatgtcgaagttctttccgctgatggagtttatcggcaatatctgcctcgtggctctgctgtcgttcggcggctggctcgtgatgcagaacagcttaaaaccgggtgagcttgtcgcttttttcagtctcgtcaattacttgatgtggccgatcatgaacctcggttatgtcatcaacctgttttcacaagcgaaagcatcgggagagcggctgctggaaattcttgatgccgaggaggaaatcaccgataccgaacaggcggtgaaaagcggcagactgaacggcgatgtcgtattcagcgatgtttcccttcaatatacaaaagaaaatgcggaagcattgcatggggtgtcttttcaggctgagcgcggcaaaacaattgggttaatcggcgcgacggggtcaggcaagagcagcatcattcaactgctgagccgcttttatgaaccgacatccggccggatcacgatcgacggcaaaccgcttgaacactactcattaaagatgctgcgctccaatatcggcgtcgttccacaggaatcgtttttattttcctcaacgatcaggtcaaatatatcgtatggaaagcctgatgcatcgatggatgagattatcgaaagcgcgaaaagagcccaggctcacgattttatcatggagcttccgaatcaatatgatacgatgctcggcgagagggggctcgggctgtccggtggccaaaaacagcggattgcgattgcgagagcgatttgtatgaacccgggcattctcatcctggatgattcgacgagtgccgttgacatggaaacggagcaccgcattcaacttgcattgcgggaagtgatgcgggatcggacgactttcatcatcgctcacagaatctcatccttaaagcatgccgacgaaatccttgttctcgataaaggcgtagtcaaggaaaggggaacacacgaacaattaatggaagcaaacggtttatacaaacggatttttgatttgcagtataaagatcaaaatgtgttgaatgagccgcattttgcaggatag

SEQ ID NO: 1759 - DNA, 1821 bp, Bacillus licheniformis
atggaaaaccaggcgaaaaaacaaacgttgatgaaccggtttttttatacttcagaccaaatcattgaaaagccttttaactgggcgcagatgtggaggctgcttaaatatttaaagccctaccgaaaaaatttgctgccgctgtcgtttttaacggtcatgatctcggcggcgatccggctggcggtgccgattttgatcggcgtctatgcgctcgaccaagcgatcgcaggccgggatatgaatcttcttgtgattctgatctccgtcatcagtgggttgtatcttgtcaattatgttagcaatgtgctgagaatccgctggatgaacaagcttggccagcatgtcatatatgatctcagacagcatttgtttacgcatgttcagcggctgtcgcaccgctttttcgacgagcgttcggcaggttcaatccttgtccggatcatgaatgacatcaattctttgcaggaactgtttacgagcggagtcatcaatttattgatggatattttgcttctttttggaattgtcgtcattctgttctcgctcagtcctgagctgaccatcgccattatggtgacgctgcctgtgatgttcttcatttctactaatctcagaaggaaaatccggcgatcctggcaaaaggtgcgcttaaagcagtccaagctgaattcccatttgaacgaaagcattcaaggcatccgggtcactcaggcatttactcaggaaaaagagaatatgatgtattttgaaggcgtcaacagtgagaactttgaagcctggcgggaagcgacgaaaaaaaatgcgactttccgtccgcttgtagaaatgacaaacgctgtcgggacggccattttaatctggtacggctcaagcttgatcatcaatgaaacgatcacgatcggtgtatttgtatcgttcgccttctatctcggaatgttctgggagccgatttcaaggctcggccaagtctacaaccagctgttgatggggatggcttcgtcagagcggatctttgaatttctggatgaaaagccgagcgttgcagacaaggaagatgcggtcaaaataaaagaattaaaaggccggatcgaatttgaacaggtggaattttcttatgacgggaaccgcaaggcgctgcacagcatttcatttgagatacctgcgggatcatcgcttgcgcttgtcggacatacaggatcagggaagacgacgatcgcaaatctgatcagcaggttttacgatgcaacaggcggggctgtcaaagtggacggtataccgattaccgatatctcgctttccgatcttcgttcgcaaatcagcatcgtgctgcaggacacgtttattttttccggaacgattatggaaaatattcgttttggccgtccgaacgccgccgatgaagaagtgatcgaagcagcaaaagctgtcggagccgattcgtttatttcagcgcttccgaatggatacgccacagaagtggaagaacgcggcaatgtattatcggcaggtgagcggcagctcatttcatttgcgagggcgcttctggcagatcctcgtattctaatccttgatgaagcaaccgcaagcattgacacagaaacggaagtcaaaatccaggctgccttgaaaacactgctccatggcagaacggctattatgatcgctcacaggctttcaacgataagggatgcggataaaatcctggttcttgaccacggccggaaaatagaagaaggaaatcaccaggaattgatcgggaaacgtggaatgtattatgagctggtaaaagcgcagtatcaaatgtttcagcgaaactaa

SEQ ID NO: 1760 - DNA, 681 bp, Bacillus licheniformis
atggaaacgaatttagaaactgaaaaagtaaagaatccatcattgctcggattgattacccggcccggagaacagttcgagagaatgagagaaaagccggctttctggtttccgcttgtcattgttttaatcttgtcggttgcgggagcgtatatgctcagcgaaaaaacggcgttgtctaccgatttgtcggaaatgccggatgctgaagcatttcaagctgctatgaagggaatcggcatcatcggcgggatcttcggctttgtgattgccttgctgatcagcgctttaatttattggctgattgtcaaaatcggaagaggaacaaccaattttgttcacatgttttcgctgtctgtttttacatattttattgcggctatcggacaattcataggcggactagtgatctattattcaaatatcgatcccacgatcgtcgtcacgtctttaaacggcatcatcccggcagacgagccgctcaaatcggtattgggtgtatttgatattttcacgatctggtcgctctcattggttgccctgggtctccaaaaggttgggggcatctccaaaaaagcggcttggaccggtgtgatcattttatttgtgatctccattctgctcgctttaataggcggtatggcgatcaatttcttcgattcatttgaaggagcaatgtaa

SEQ ID NO: 1761 - DNA, 1137 bp, Bacillus licheniformis
atgaaaaaaatatggatcggcatcgtcattgttggggctgctgcgctttttatcggactcaacctctaccgctcggttcaaacgagcggaggggctgaagaagcggttcaaaccgtgaaattggaagaaaaagagatttcttctgaagtcatggttccggggacccttcagtttgcaaacgaacaatacgaatattttgaacctggaaaaggagaaattgccgacatcaaagtaaaagaaggcgataaggtgaaaaaaggagatgtgcttttcacctatacaaatgaagaaattcgcctggaaaaggagcaaaacgctttatccattcaatcgaaggatctccagcttgaacaggttaagcgaaaaatcagcagcctaaaaagcaaggaagacgagctgaaggctgagctcggagcggaaaaagccaagaggcaaattgatgaagaacggtcacagcttgaaatggaagaaaaatcgctccagcttgaactgaaacaagccgacctgcaaaaggaaacgctcgagaagaaatcggcagcgctgcaagtgaaaagcggcattgacgggacggttattaccgttgacaaacaagccgctgcaaagcaatcggatattcaaaagccggttatacatataggtaacgaggacaagcttgtcgttaaaggcgtgctctcagagtatgacacattgaaagtgaaaaagggacagaacgtgaccatcacgtcggatgtcatccaaaataaagagtggcgtggaagggtatcacaagtcggattggttcccaaagaagaggcgtctgcaggtgctgcgggaacaaaggagcaagctgttcaatatccgtttgaagtcaaaataaaaggggagcgtcctaaagcaaagtccggctttaacatgattctcaaaatccagacggacaaaagaatcgttcaggctcttcctgaagatgccgtcaagcaggatggtgatcaatcatacgtgtttgccgtaagagacggcaaggcaaaacggatcaatgtcaaaaccggtgagaaagcagacggcctcgttgaaattaccggcggtctgacaaacaaggacccggttatcgcaaacccggccgaggatatgaaaagcggaacggaagtgaagcttcaatga

SEQ ID NO: 1762 - DNA, 693 bp, Bacillus licheniformis
atgattgagctttccaaagtgaaaaaaagctaccaaatcggaggagaaaccattgatgttctcagggagatcgatatgaaaatcgagccgggagaatatctgtccatcatggggccgtccggttcgggaaaatcgacgatcatgaacattatcggctgccttgaccgcccgacatcgggtatttacaggctggacggcgaggatatttcatcatacggcgaaagggagcttgccggtgtcagaaaccgtttaatcggttttgtttttcagcagtttcagcttctgccgcgcttgaatgccataaaaaatgtggagcttccgatgatttacggcggcgttccaagaaaggagcggcgggagcgggctgaacgggcgctcgaaaaagtcgggctcaaggacagaatgcgccatatgccgaacgagctttccggcgggcaaaaacagcgtgtagccatcgctagagcgatcgtcaatgaacctaaactgatattggctgatgaaccgaccggagcgctcgatacgaaaacaagccgggacatcatggagcaattcaccgaattgaatgaggaaggaacgacggtggtgctcgtcacacacgaacctgaaattgcggactatacaagccggaccatcatggtgagggacggtgtgatcgtctcgccggaaacagagcggagggggacggtgcaatga

SEQ ID NO: 1763 - DNA, 1194 bp, Bacillus licheniformis
atgaatctcatcgaaaacttgagaatggctttaagttccatcctttcccataaactgcgatcgattttaacaatgcttggaatcattattggtgtaggctccgttattgtcgttgttgcagcggggcaaggaggagagcagatgctcaagcagacgatcagcggacccggcaacacggtcgaaatctattatcagcccagcaatgaagaattaaccgccaatccgaacgcctacttagacgccggcttcaccgaagaagacatcagaagcttaaagtcactcgaaggcgtgaaacatgtcgttgcgaaaacaaccgagtccatgaatgcccgcttccgggatgaaaatacggatgccgctgtaaacggcattaatgacggatatatcagcatcaattcgatggaaatcgaaaagggaagagaattttcagaagaggattaccttgctggaagcagggtcgccattatttcgccgaagcttgcggaagaactgttttctcagcagtcgcctctcggccgtgtcgtatggataaatagccagcctgttgaaatcatcggcgtattgaaagaagaaaccgggctgcttgcattggggatgaatgagatgtatgttccattttcaatgttaaaatcgtccttcggcatcagcgactatgactctgtctccgttcaagctgagtctgccgacgatctgcaggccgtcgggaagcgggctgcagcggccgtcaacaagaatcacggcacttcggactcgtacgaagtgatgaacatggaggccatagcggccggaatcagccagattacaacaattatgacgatgttcatcggttcaattgcaggcatttctttactcgttggggggatcggcgtcatgaatattatgctggtgtcggtcactgaacggacgagggaaatcgggattcgaaaatcgcttggtgcaacaagaggccagattctgatgcaatttttaatagaatcgtctttaattacactgatcggcggggtgtttggcatcggccttggatacggcggtgcagccctcgtatcgttttttgccgggtggccgccgctcgtttcctggcaggtggtcctcggaggcgtcctgttcagcatggcgatcgggattatctttggactcatcccggccaataaagcggcccgccttcatccgattgatgcattgaggtatgagtaa

SEQ ID NO: 1764 - DNA, 756 bp, Bacillus licheniformis
gtgttgactcccgaacggcatcagctgattattgacgagattgaaaagcatgatgtcgtgaaaatccagtacttaatgaatttaacgaacgcatctgagtcaacgatcagaagagatttgtcgacgctggaagcccgcggatatttaaagcgtgttcatggaggggcatcaaggctttccgatattcgtacggagcctgacatgctagagaaatcatccaaaaaccttcatgaaaagcgaaaaatcgctcaagaagcggcctcacttcttgaagaaggcgattgtatttaccttgatgccggaacgaccacattgcaaatgatcgattttatcaatccagagatggatattatcgtggttacaaatggagtcatgcacattgaggcactaggtaaaaaaggcattactttttatttattaggcgggtatgtgaagtataaaaccggagcgatcgtaggcggttcggctttatcagccatcagccaataccggtttgacaaaagcttcatcggcgtcaacggcattcataaggaagcggggttcacgactccggatcctgaagaagcgcttttgaaaacaaaagctgtcaaccaggcgaaaaaagcatttattttagctgacgtttccaagtttggggaaatttcattttctgcctttgccggtttagacgaagcaactatcattacagcaggatctgcaaaacattcatttgataactatcaagaaaaaactgtcgtaaaggtagtgaaaacatga

SEQ ID NO: 1765 - DNA, 912 bp, Bacillus licheniformis
atgatatacactgtaactctcaacccatcggtcgactatattgttcacgttgaagaattttctgtaggcgggctgaatcgttcagtctatgacacgaaatatcccggaggcaaaggaatcaatgtctcacgcgtactgaacagacaccatgtaccttcaaaagttctcggttttatcggcggttttaccgggggatatatcaaatcatttctcgaagaagagaagcttgaaacggcgtttcatgaggtgaatggcgacacgcgcatcaatgtcaaattgaagaccggggatgagacggaaatcaacgggcaggggccggtcatcagcgaagaagatttcgcggcctttttagaccagttttcagcgatgaaagaaggggacattgttgtactggcgggcagcattccttcatcattgccgcaggacacatatgaaaagattgcggaaaaatgcaaagagcaaaatgtccgtgttgtcgttgatatttcgggtgaggcccttttaaaagcagcagaaatgaagccgcttttaatgaaaccgaaccatcacgagctcggagaaatgtttggaacaactatcacctcggccgaagaagcggtgccttacggaaagaaactcgttgaacgcggggctgaaaacgcgatcgtttccatggctggagaaggcgcacttttatgtacaaaagacggtgtctaccatgccaacgtacctaaaggaaagctcgtaaactcagtcggtgcgggggattcagtggttgcaggctttctcgcaggcattgaaaaacagcttggcatcaaagaagcttttcgcttaggagtcgcttcaggaagcgcaactgccttttcagaggagctgggaacggaagagctcgttcacaagctgcttccggaagttcaagtcaaagcgatataa

SEQ ID NO: 1766 - DNA, 1896 bp, Bacillus licheniformis
atgaaaataactgagctactaacaaagcatacgatcaagttaaaccttgagagcagccagaaagaaaacgttatcgaagaactcgtcagcgttttggatcaggctggcaagttgaatgataaagaaggctacaaagaagctgtgatcaaccgcgagaaacaaagctctaccggtatcggcgaaggcatcgccatcccgcatgcgaaaacggcaagcgtcaaagagcctgcgatcgcgttcggccgttcaaaaggcggcgtcgattatgaatcccttgacggccagccaagccatctcgttttcatgatcgccgctacagacggtgcaaataacactcacctcgaagcattgtcaagactgtcgactttgcttatgagggaggagattcgcaaacagctgcttgaagcttcatctgaagacgaaatcatcgacatcatcaatcagcatgataaagatgatgatgaagaagaagagcaggccgaagaggctcctgcaccatcagcaaaaggaaaaatccttgcggttacagcatgcccgacagggatcgcccacacgttcatggctgcggatgctttgaaagaaaaagcgaaagagcttggggttgatatcaaagttgaaacgaacggttcaagcggtattaaaaatggtctgacggcccaggaaatcgaagatgccgttgcgatcattgtcgccgccgacaagcaggttgaaatggaacgctttcaaggcaagcatgtcattgaagtacctgtaacagcaggtatcagacgtccgcaagagctgattgagcaggcgctgaaacaagacgcgcctatctatcagggtaaaggcggcggtgcaaccgcttctgaagacggagctgccaaaggaaaaggcggcggtttctacaaacacttgatgagcggtgtcagcaacatgctgccgttcgtcgtcgggggcgggatcttagttgcaatttcgttcttctggggaattaacgcgaccaagccgggagatccgacttataatgagttcgctgctgtattaaataatattggcggaacgaatgcacttggattaattgtcgctgtattggccggatttatcgcgatgagcattgcagatcgtccgggatttgcgcctggtatggtcggcggtttcatggcgacacaagctggcgcaggtttcttaggcggcctgattgccggtttcttagctggttatattgttgtcctgttgaaaaaagtgttcgctggtctgccgcaagtgcttgacggtttaaaacctgtgctgctctacccgctgtttggaatattcttgaccggaatcattatgcaatatgttgtcaatacgcctgtcaagtacattatggacggcatgacacattggcttgaaggtcttggaacaggaaaccttgtcgtaatgggtattgttttaggcggtatgatggcgattgatatgggcggtccgatcaacaaagcggcctttacattcggtatcgcaatgattgaagctggaaactttgggcctcacgcagccatcatggcaggcggtatggtgcctccgcttggaattgcccttgcaacgactttctttaaaaataaattctcaaaacgggatcgcgaagccggaattaccaactacgtgatgggcttgtcatttattactgaaggtgcgattccttttgcggcagcagatccggcacgcgtcattcctgcttgtatcatcgggtcagcagttgccggcggtctgtctcaatttttccatgtcacactgcaagcgccgcatggcggaatattcgttctcttctttacgacgaatcatgcgctgctgtatctcctcagcatcttgatcggtgcggttgtgacagctttgattctcggcgttttgaaaaagccggttccaactgaaaaataa

SEQ ID NO: 1767 - DNA, 561 bp, Bacillus licheniformis
ttgactgaagaaaaatccaccaataagaaaaactctctctttgaatgggtaaaagccattattattgcagtcgttctggcgttattgatcagggcatttttattcgaaccgtatttagtggaaggtacgtcgatggacccgacgctgcacgacggagagcggctgttcgtctataaaacggttagatacgtaggcgaatttaagcggggagatatcgtcattatcgacggcgacgaaaagaatgtccattatgtaaagcgcttgatcggcctgccgggagataccgtgcaaatgaaagatgacacgctgtacataaacgggaagaaggtgtcggagccgtatctttcggaaaacagaaaagaggcggaagcagtcggcgtcaagctgacgggcgactttggccctgtgaaggttcccgaaggcaagtatttcgtgatgggagacaatcgccagaggtcaatggacagccggaacggcctcggactgattgataaaaaacgagtggccggaacttcgcaatttgtgtttttcccgtttaacgaaatccgaaaaacagactga

SEQ ID NO: 1768 - DNA, 270 bp, Bacillus licheniformis
atgaagcttatcactttgacggaatactgcatgtttattttttttgcaggggtctatcttgccataaccggctttacagcacgggatctggggctttacatcgggattgccatgatttacgtgttcgttcatatcgcggcgaaacgaatgctgtcaaaacggggaaaagaagccgcggaaatcagaatcttgtacagcgttcttctgattatggcctctgtgttcgttaccgtactgtttatcgcagtgctggcatcattatccgcataa

SEQ ID NO: 1769 - DNA, 243 bp, Bacillus licheniformis
atgaaattgaaagatgaccctgatatcatcagatggattaattcgaggccgcgccaagcgcttttcgcgtcagtggccatggtgatttctacgatgtctatcgggcttttcaaagggtttgatatgtggaccgctgacttttttatattttcctgtctgctgatcggcttcggcctccttgtgggatggctccaaaagatatattataaaaaggtgatatttgaagaaaactcggatcgttag

SEQ ID NO: 1770 - DNA, 1620 bp, Bacillus licheniformis
atgatagctgttcaaaatgtcagcttgcggtttgcagaccggaagctgtttgaagatgtaaatattaagtttgcgcccggaaactgctacggattgatcggagcaaacggcgccggaaagtccacttttttaaaaatattgtctggcgaaattgagcctcagacaggcgaagtccatatgagtcctggcgaacgtcttgccgtcctgaagcagaaccactttgagtatgaagagcatgaagtgttgaaagtcgtgatcatgggacatagacgactttatgaagtcatgcaggaaaaagacgcgatttacatgaaacctgatttttcagatgaagacggaatccgcgccgcggagcttgaaggcgaattcgccgagctgaacggctgggaagccgaaggggaagccgcgatcttattaaaaggactcggcattcctgaagaacttcatacgaagaaaatggcagatttgggcggctctgaaaaggtgaaggtccttcttgcacaggccctgttcggaaaacccgacgtccttcttctcgatgagccgaccaaccacttggatattcaggcgatccaatggctagaagagtttttaatcaattttgagaatacggttatcgtcgtatcgcatgaccgccactttttaaataaagtatgtacgcatattgccgacctggattttaacaagattcaaatttatgtcggaaactatgatttctggtatgaatcaagccagcttgcgcttaaaatggctcaggaagccaataagaaaaaagaggagcagatcaaacagctccaagagttcgtcgccagattcagcgccaacgcctcaaaatcgaagcaggcgacatcgagaaaaaaactgcttgaaaaaattacgcttgacgatattaagccttcatctcgcaagtatccgtatgtacatttcgcacctgaacgcgaaattggaaacgatgtgcttgttgtcaaagacctgtcgaaaacgatcgacggcgtcaaggtgcttgactctgtcagctttatgatgaataaagaggataaaatcgcctttacaggccggaacgagctagccgctacaacgctctttaaaatccttgccggggaaatggagcctgacagcggatcgtttaaatggggcgtcactacatcccaagcgtttttcccgaaagacaacagcaagtattttgaaaacagcgatttaaaccttgtcgactggctccgccaattttcgccgcatgaccaaagtgaaagcttcctgcgcggatttttaggccggatgctgttctccggagaagaagtgctgaaaaaagcaagcgttttgtcagggggagaaaaagtccgctgcatgctgtcgaaaatgatgctgtccggcgccaatgtgctgatgcttgatgagccgacaaaccatttggacctcgagtccattacagcgctgaataacggtttaatcagctttaaaggcgccatgctgtttacatctcatgaccatcagtttgtccaaacaatcgccaaccggatcatcgagatcacgccaaacggaatcgtcgataaacaaatgagctacgacgagtttttggaagacaaaacggttcaggacaagcttgctgaactttacgcgtaa

SEQ ID NO: 1771 - DNA, 375 bp, Bacillus licheniformis
gtgtcatgccgaaaggctcttgagcaatatattcaagcaacaaacacacatgagtttgagaatgtcaaagccctccttgaccccggcgctgtgtactggttttcggatcaaacgtgctcgggctttgaggagattcagcgttattttgaaaacgcctggaagcaaatcgaaaatgaagtatacagcgccggtcatgtcagctggatcacggaaacggacgaacaggccgtctgtctttatacatacgaatggaaagggttatataggggcgaaccggttcaaggggcaggccgtgcgacaaacgtatttgtaaaggacgagtcaggacgctggaaactgaagcatgaacatttaagcagtttgcccaagcgatga

SEQ ID NO: 1772 - DNA, 1233 bp, Bacillus licheniformis
atgaattcgtttactgataaactgagcaaatatgcaaagcttgtggccgaagtcggcgtaaacgttcaaaaaggacagcaagtcgtcatcaacgcgtcaacagaagtacgcgattttgcacggctcctcgtcaaaagcgcctatcaaagaggggcgaaaaacgtgacggtccgctggcaggatgatgaggtcacaaggctgaaatacgagctggctcctgcggaagcctttgaagagttccctgaatgggaagcaaaggggcttgagacgctcgccaaagaaggcgctgcttttatttccattgtctcttcaagtcctgatcttttgaaaggcatcgattccaaaaaaatctccgcacagcagaaagccgccggaaaagcgatgcatacatacaggcaaatgattcaatcggataaagtcagctggactgtcgtcgcagcgccttcgccggcctgggcgaaaaaagtattccctgaggcagatgaagagacagccgtgcaaaagctatggaatgagattttcaaaacgacccgcgtcgaccgtgaagatcccgttcaagcgtggaaagatcacgatcaaaccttgcgcgataaagtaagcgtcttaaacgacaagcattatcacgcccttcattaccaagcaaagggaacagatttgacgatcgagcttcccgagaagcatctgtgggtcggcgccggaagcacaaacgaaaacggcgtcgagttcatggccaatatgccgacagaggaagtattcactgctccgaaaaaagacggggtgaacggcaccgtttcaagcacgaagccgttaagctacggcggcaatttaatcgacggctttacactgacatttaaaaacggacggattacggatgtcaaagctgaacaaggcgaagaaattttaaaagagctgatcgaaacggatgagggttcacactacttaggcgaaattgcgcttgttgcccacgattcgccgatttccaagtccaatattctgttttacaacacactgtttgatgaaaatgcctcaaaccacctcgcgatcggcagtgcatacgcattcaacatcgaaggcggaaaacagatgtcgcgcgaggagctggcgaaagaaggattaaacgaaagcatcacacatgttgactttatgatcggttcaggagaaatgaatatagacggaatcactgctgacggaaaaagagagccgatattcagaaacggcaactgggcgatataa

SEQ ID NO: 1773 - DNA, 132 bp, Bacillus licheniformis
atgcttagagatatgggaagacgcctggccatcaccgttattttaagcggtattattctcggggggatgagcatctcccttgcaaacatgccaagctcgccccccggccaaacggccaaaatcaaccgttaa

SEQ ID NO: 1774 - DNA, 1008 bp, Bacillus licheniformis
atgtttcaaacaaccgagatcggaattgatctaggcacagctaacatattggtttacagcaaaaacaaaggaatcattttaaatgagccttccgtcgtcgccgtggacacggaaacaaagagcgtattggcggtcggcacagaagccaaaaacatgatcggaaaaacgccgggaaaaatcgtcgcggtcaggccgatgaaagacggagtcatcgccgattatgacatgacgacagacctcttgaagcagattatgaaaaaagccggaaagaacatcggctttacgttcagaaagccgagcgtcgtcgtctgcacgccgtccggctcaaccgctgttgaaaggcgcgcgatcagcgatgctgtcaaaaactgcggagccaaacaagtccatttgatagaggagcctgtcgccgccgccatcggcgcagatctgcctgtcgatgaacctgtcgcaaacgttgtcgtcgatatcggcggcggcacgacagaagtggcgatcatttcattcggaggcgttgtctcgtgccactcgatccggatcggcggtgatcagcttgatgaagacatcgtgtcattcgtcagaaaaaaatacaacctgctgattggtgaacggacggccgaagaagtcaaaattgagatcggctacgtattgattgaccatgagacgaaaacgatggaagtcagaggacgcgaccttgttacaggcctgccgaaaacgattaccctggaatcgaaagaaattcagaaggcgatgcgcgaatcgctcctgcatattatcgaagccatcagagcgacgctagaagactgtcctccggagctgagcggagacattgtcgaccggggcgtgattttgaccggaggaggcgcgcttttgaacggcatcaaagaatggctgtcacaggaaatcgttgtgcccgtgcatgttgctgcaaatccgcttgaatctgtcgctatcggaacgggtcgttctctcgaagtgatcgataaattgcaaaaagcggctaaataa

SEQ ID NO: 1775 - DNA, 114 bp, Bacillus licheniformis
atgatgagaaaattatttcatttttatgaccggatttttgtcgaagaaacgcttgataagggaaacctttttcagtcttcattcgtctatcgttatgctaagacaatatcttag

SEQ ID NO: 1776 - DNA, 288 bp, Bacillus licheniformis
ttgaaagcaataggagttgtgagaaaagtagacgaactcggcaggatcgtgatgccgattgaattgagaagagctttggatatctcgatcaaggacagcatcgaattctttgtcgaccaagataaaatcgtcctgaaaaaatataaaccgcacggtgtgtgtctgatgaccggtgaaatcacttctgaaaaccgcgagtatggaaacgggaaaattacgctcagtcctgaaggggccgaattgcttttggaagaaatcaaagctgccttaaacggagtgaaagcataa

SEQ ID NO: 1777 - DNA, 1338 bp, Bacillus licheniformis
atgaaaagatatcaaggacgaatcattgcaaccgtgctggcaatgacttttatcatgttttggaattttttattctatggggtgttgggaaataaaatcaattggacggttgatctgctgtttacgctggtgacattaatcagcgtttggtggctcacactttatatcgatgagtcaaatcagcttgtctataaattgaaggaaagcgaaaagaaatataaagagctttcctcagaaaccaaccgcataatggataatcttcaggaaatcgtctttcaaacggaccggataggatacattacatttctgaatcaggcgtggacaaccctgaccggatacagtgtcgaagagagccttggaacgatgtacaacgattattttgaccatgaagaacggatctcgaatcacctgatcgcccagttgaagaacaaggagcccgaaggcaggatcgaggtgctctaccatcgcaaagacgggagcaagttctggggcgaagttcactataaactttattataaaaacggtcaatttacgggcagcttggggacgctgactgatgtgacagaacggaaaaaagcggagatggaactgtttaagtcgaatcagcggctggccatgcagtctcaaaagctggcgatggccgggcagctcgcagcggggatcgctcacgaagtcaggaacccgctgacatctgtaaacggatttttgcagctgatgaaagcggaatatcctgaccggaaagattactttgacattattttctcagagattaaacgaatcgattctgtgctcggagaactgcttgtgctggccaaaccgcaccaggttcaatttaaaaagatcaaaatcaattcggttcttcagcaagtggcaacgcttcttgagacgaacgccgtgctttcccacattaagatcgaaaaagcgtttcagcacggggaggagtgggaaataaacggtgatgaaaatcaaatcaaacaggtattcatcaatttaattaaaaacgggatagaagcgatgcctgacggcggtaaaattacgatttcctcaaaggcagaaggagactatgtgaaaatcagcatcaaagacgaaggcggcggcatttcccaagccgacttggcaaagctcggggagcctttcttctcaacgaaagaagaagggacaggtcttgggctgacaatttgcctgaatatcatcggcgcccacaacggagaaatgaaaatcgacagcaaattgggcgagggaagcacattccacattttgcttccggtcgataaaggtgcggcgtccgaagagaacgacattcagcaaggatgctgcagccgcgcaactataaaataa

SEQ ID NO: 1778 - DNA, 663 bp, Bacillus licheniformis
atgaaaaaagaatttgcagtaattggactcggccggttcggcggcagcatttgcaaagcattgagtgaagaagggcttgaagtaatggcgatcgacagagatgaagatcgcgtaaacgaatacgccaaaattgcaacacatgctgtgataggagacactacagacgaatctgtgctgaaaaaccttggactgcgcaattttgaccatgtcattgtagcgatcggggagaacattcaagcgagcattttgacaacgctgatcttaaaagagcttggtgtgaaaatgattaccgtaaaagctcaaaacgattatcatgaaaaagtattatccaaaatcggagcggaccggatcgttcacccggagcgtgaaatgggaaaaaggatcgcccacaacatcgtctccaacaatgtgcttgattatctggaactttctgatgaacacagcctggtcgaaatcgcagcgaacggcaaactggccggaaatacactgcttgaccttgatatccgggccagatacggaattaatattgttgcgatcaagcggggaaaggaagtcatcgtatctccgcttgccactgaagaaattcagaaagacgatattttaatcgtcatcggctcaaatcctgacattgagagatttagaaaaaaagtctttcaacattaa

SEQ ID NO: 1779 - DNA, 117 bp, Bacillus licheniformis
ttgaaacagtcaatgaaaagatcaaaaaaaccgcgggctgtggggttcccgcggttaatcggtggcattttaatgttgaaagactttttttctaaatctctcaatgtcaggatttga

SEQ ID NO: 1780 - DNA, 1722 bp, Bacillus licheniformis
ttggacaaagagatgttcattcgccggcttggcgccgccagtcatcgcaaaaaagcggaaactgtaattaaaaacggaaaaatcatggatgtttttaatcaggaatggttggagacggacattgccatcacagacggggccatcgtcggcttgggcgaatatgaggggaaaaatatcattgacgctgagggacaaatgatcgttcccggctttatcgacggtcatgtccatattgagtcctcgatggtgacgccgcccgaattcgctaaagcggtgattccccacggtgtgacaaccgttgtcaccgatccccacgaaatcgcgaatgtctcaggtgtgaagggtcttgagttcatgttggagcaggctgagatgaccaggctgaacatttattttatgctcccttcttgtgtgcctgcggcaccattcgaaaaatcgggtgcgattttgaacgccgcggatttacatcctttttacagccgcgaagaggtgctcgggcttgcggaagtgatggactatgtggccgttgaagctggagagcaggatatggtgcaaaagctcattgatgccgataaagcgggcaagcggatcgacgggcatctggccggcttgtcagccgggtttgtcaatgtctacagagcggcgggcgtacttacagaccatgaggtcacaacacctgaagaggcgcttaaacgggtgagaagagggatgtacgtcatgctgagagaaggttctgcggcaaagaatacgcgtcatgttttacctgcggtcaacgagaaaaatgtgagacgcttctttttctgtacggatgataagcatctggacgaactggtcgatgaaggaagcattaactaccaggtcaagcttgccattcaagaggggcttgacccgtttcttgcatatcaaatgggcagcctgaatgcagcggaatgcttcgggttaaagacgaagggagcggtcgccccgggttatgacgcagatcttcttttcatcagcgattttgagaacgtgagcattacaaagacgatgattaacggcgtgatctggagcgggacagagcaaagccaatcgacgggcggcaaagcggcatccggtctgcttcaatctgtgcatctgtctgatttacatgaggatgatctgcaaattccgatcgttcaagagaatgacatcagggttattgacattatccccaatcagctcgaaacaaagctgtccctggccaagccgaaaagcggagctttttttcagccggatctggaaagcgatctgttgaaaattgcagtggttgagcgccatcgcggcgttaaagaaatcggactcggcgtagtcagaggcttcggtttaaaagaaggcgccatcgcgacaaccatttctcatgattcccacaatttaatcgctgtcggtacaaatgatcaagacattttaaaagcgattgaacgcctcggagaaatcggaggaggcctcaccattgccaaaggagggaaggagcttcaatccgtcgcactgccgatcgccggcctcttgtcggacaaaccgcttgagacggtcaacgaaagcttgaaatctctccacgcggcaataacagagacaggattttcaggagcgtttaatccttttctgacgctttcttttttagcgcttccggtcattcccgacattaaaatgacaacggaaggattgtttgatgttaaagcgttcaggcatatcccggttcaaccataa

SEQ ID NO: 1781 - DNA, 1668 bp, Bacillus licheniformis
atgaaatttgttaaaaatgaccaaacggctgtatttgcccttggaggacttggggaaatcggcaaaaacacgtacggggtccagttccaggacgagatcgtgctcatcgatgcggggattaagtttccggaagacgagcttctcggaatcgactatgtcatccctgactacacttatttagtcaaaaacgaagaaaaaatcaaaggtctttttattacgcacggacacgaagaccacatcggcggaattccgtacctgctcaaacaggtgaacattccggtttacggcggacagctcgccatcggccttctcaggaagaagcttgaagagcacggtttgcttcgccaaacaaagcttcatatcattgaagaagacgatatcgtcaaattcagaaaaacgtcggtttcttttttcaggacgacccacagcattccggactcatacgggattgtcgtaaaaacaccgcaaggaaacatcgtacataccggtgactttaaattcgattttacaccggtgggcgaacccgccaacttgacaaagatggccgaaatcggaaaagaaggcgtgctttgcctgctgtcagacagcacaaacagtgaaatccctgatttcacgatgtcagagcgcaaagtcggagaaagcattgatgatattttccgaaaagtcgaaggccggatcatcttcgcaacctttgcgtcaaacatccaccgcctgcagcaggtgatcgaagcggctgttgcaaacggacggaaggttgccgtatttgggcgaagcatggagtcggcgatcgaaatcggccaaacgctcggatatattaagtgtccgaaaaacactttcgttgaagcgaatgaaatcaacaggctccctgccgggaaagtgacgattctctgtaccggaagccaaggcgaaccgatggctgctctatctcgaattgcaaacggcacacaccggcaaatctctatcaatcccggggatacggtcgtattttcatcatctccgatcccgggcaatacgatcagcgtcagccgcacgattaaccagctttaccgggcgggtgccgatgtcatccacggagctgtgactaacattcacacctcgggacacggcggacaggaagagcaaaaactgatgctccgcctcatcaagccaaagtttttcatgccgattcacggtgaatacagaatgcagaaaatgcatgtcaaactggcgacagactgcggaattcctgaggaaaactgctttattatggacaacggggaagtgcttgctttgacaagcgaagaagcctcagttgcgggtaaaatcccgtcaggcaatgtttatattgacggaagcggcatcggcgacatcggcaatatcgtgcttcgcgaccgccggattctttccgaagaagggctcgtcattgtcgttgtcagcatcaacatgaaagaattcaaagtgtccgcagggcctgacttaatttccagaggatttgtctatatgagagaatccggtgatttaatcaatgatgcccaggaactgattgcaggacaccttaaaaaagtgatggagcgcaaaacgacacagtggtctgaaattaagaacgagattacagacacgcttgctccttttctctatgaaaaaacaaaacgccggccgatgatccttccgattattatggaagtctaa

SEQ ID NO: 1782 - DNA, 210 bp, Bacillus licheniformis
atgatctataaggtattttatcaagcaagcaatgacgaagtacctgttcgtgaaaaaacagattcaatttttgtggaagctcaatctgaacgtgaagtcagatctaaattaaaaccatacaactacaatattgagtttatacagcaagttgaaggcgcttttttagaatatgaaaagcaaagcgaaaattttaaagtattggagttatga

SEQ ID NO: 1783 - DNA, 72 bp, Bacillus licheniformis
atgcttcgccgtctgcggaaaaaattaaaaaaacagctgaatggcatgatgcgcagaaagtcgattgcctaa

SEQ ID NO: 1784 - DNA, 777 bp, Bacillus licheniformis
atggataaaaagctgattttctttgatattgacggaacgatttatgatcacgataaacgcattcccgccaccgcaaaacaggccgtctccgatttgaaagcgcacggccatcatgttttcatcgcgtcaggccgtgcgccgtttatggtcaggcctgttcttgaagaactgggcatcgattcttttgtctcttataacggacaatatgtcgtttttgaaggagaggtcatttataaaaatcccattgccgagcagtcgttagaagcgctgcttgcgcattcggacagctgcggccaccccctcgtcttcatgggggaagaggggatgcgctctacaactgccgcccatccgttcgtcgatgaagggatcggcagcttaaaagtcaatccgccggaagaggatcgtacctactttaagggcagggacattttccaggtcctcttgttctgcacgcaagacgaggaagagcggtacagccggtttaaagagtttgatctcgtccgctggcacgagcgctccacagatgtgctgccttcaggcggatcgaaagcggaaggaatcaaaaaagtcattgaaaaacttccgttcgacagagaggatacttatgcgttcggggacggtctgaacgacctgcagatgatcgaatttgcgggaaccggagtagcgatgggcaacgctgtgcccgagctgaaaaaaatagccgactttatcacaaagcccgtcgatgaagacggcattcaatacgcggtggaagcgctcggacttttgaaatcataa

SEQ ID NO: 1785 - DNA, 555 bp, Bacillus licheniformis
ttgatcacaatggaaaacattgtccgcgacggtcatcctgctttgagaaccgtcgccgaagaagttcaattgccagcaagcgaagaagaaatcaaacagctgagcgaaatgatcgagtttgtcaaaaacagccaggaccccgaaatcgctaaaaagtacaaccttcgtcctggtgtcggtctagccgctccgcaaattaatatcaataaacgaatgatcgccgttcatgccgaaagcgaagacgggacactatacagctatgcgcttttcaatccgaagatcgtcagccactctgttcaaagatgctatttgacaagcggcgagggctgcctgtccgtcgacgagccgattcccggatatgttccgcgctatgaacggatccgagtcaaaggaacgacgcttgaaggcgaaaacatcgacatccgcttaaaaggatatccggcgatcgtattccagcatgagatcgatcatttgaacggcattatgttttacgaccacatcgacaaagaaaacccgctgaaacaacctgaaaatgcaacgcctgtaggcaggtaa

SEQ ID NO: 1786 - DNA, 132 bp, Bacillus licheniformis
atgtacggttattgctgccctggatacgggtacggcggcggttatggatacggctacggccgcacattcgctttgatcgtcgttctctttattttgctgattattgtaggggccgcttatttaggttgctag

SEQ ID NO: 1787 - DNA, 669 bp, Bacillus licheniformis
gtgaaattttcaaatatgcgggtgcccgcaggcatcgtcgttttttgcacggctgcatttgtattaacaggctgtctctggaaggatcctgtcgagtcgtttcacggctcgctggagaagatcgtggaattggaagagccttttaaacaagagcagggttcacttaaaagtcttgaaaaagccgaatcgaagctttacgaggaaatgatcaggctcaatatggatgattttgaccggatcgctgcgctctccgacaaagcgctgaagacagccggcaaacgcgagaagcacttgaattctgagaaagaaagcatagatgaagcaaagcaggagtttgaagcaaataaagcgtcggcagaaaaaatcgatgatcagaaggtcaggaaaaaggctgagaacgctgcatcttatatggaaaagcgctacaaagcatacgactctctttatggcgcctatcaaaacgcaatcggccttgacaaagagctgtacaagctgctcaaaaataaagggcttaaactggatgaccttgaggagcagctgaaaaaaatcaatcaatcgtatgacaaagtgctgaaagaaagcaagcatttcaatgagtatacaaaggactacaacaaagccagaaaagatttttacaaggctgcggggtttgagatgaaagagggctga

SEQ ID NO: 1788 - DNA, 1116 bp, Bacillus licheniformis
atggctgcaaaaacgaaaaaagcaatcgttgatagcaaaaagcaattcgatgccattaaaaagcagttcgaaacgtttcaaattttgaatgaagaaggcgaagtcgttaatgaagcggcaatgccggatctatctgatgatcaattaaaagaattaatgcgccgcatggtgtatacacgcattttggatcagcgttctatttctttgaacagacaaggccgccttggcttctacgcgccgactgccggtcaggaagcttctcaaattgctacgcatttcgcgcttgaaaaagaagacttcgttcttccgggctaccgtgatgttccgcagctgatctggcacggacttccgctttatcaagcattcttgttctctcgcggacacttccgcggcaaccaaatgcctgacgatgtcaatgcgctttcaccgcaaattattattggtgcgcaatacatccaaacggctggcgttgcactcggcttgaaaaaacgcggcaaacaggctgtggcgatcacctatactggagacggcggtgcttcccaaggtgacttctacgaaggaatcaactttgccggtgcgtataaagctccagctattttcgttgttcaaaacaaccgctatgcgatttcaacacctgttgaaaagcaatcagcagctcaaacaatcgcccaaaaagctgcggctgcaggtatcgtcggcgttcaagtagacggaatggatgcccttgctgtatacgctgcgacacgcgaagcacgcgagcgcgctgtaaacggcgaaggccctaccctgatcgaaacgctttgcttccgttacggtcctcatactatggccggtgacgatccgacaaaataccgtacaaaagaaatcgagaatgagtgggagcagaaagatccgcttgtccgtttccgcaagttcttggaaaacaaaggcctttggtctgaagaagaagaaaacaaggtaattgaagaagcgaaagaagaaatcaagcaggcgatcaaaaaagctgacgaagagccgaagcaaaaagtgaccgacctgatcgacattatgtatgaagagcttccttacaaccttgtagaacaaaaggaaatttataaagagaaggagtcgaagtaa

SEQ ID NO: 1789 - DNA, 978 bp, Bacillus licheniformis
atggcgcaaatgacaatgattcaagcaatcactgatgcgttacgcacagaactgaaaaatgacgaaaatgtcttagttttcggagaagacgtcggtgttaacggcggcgtgttccgtgcgactgaaggattgcaaaaagagtttggtgaggatcgcgtatttgacactcctcttgctgaatctggtatcggcggccttgcactcggcttaggcttacaaggcttccgtcctgtaatggaaattcaatttttcggctttgtgtatgaagtgatggactctgtttccggacaaatggcacggatgcgctaccgttccggcggccgctggaattctccggtgacaatccgttctccgttcggcggcggtgttcatacgcctgaacttcacgcggacagcttggaaggactcgttgcacagcagcctggacttaaagtcgttattccttcaactccgtacgatgctaaaggacttttaatctctgcgatccgcgataacgatccggttgtcttccttgagcacatgaaactttaccgttcattccgccaggaagttcctgaagaggaatacacaattgaaatcggcaaagccgatgtgaaacgcgaaggaaaagacctttccatcatcacatacggagcgatggttcacgagtcattaaaagcggcggaagagcttgaaaaagaaggcgtatctgctgaggttgtcgaccttcgcacagtcagcccgcttgacattgacacgatcatcgcgtctgtagaaaaaacaggccgcgcaatcgtcgttcaagaggcgcaaaaacaggctggagtagctgcaaacgttgttgccgaaatcaacgaccgcgcgattttgagcctcgaagctccagtgcttcgcgtcactgctcctgatactgtattcgcattctctcaagctgaaagcgtatggcttccaaaccataaagacgtgcttgaaactgcgaaaaaagtattggaattttaa

SEQ ID NO: 1790 - DNA, 1293 bp, Bacillus licheniformis
gtggcatttgaatttaaacttccggatatcggggaaggaatccacgaaggcgaaatcgtgaaatggttcgtcaagccaaacgacgaggtaaacgaagatgacgttttggcagaggtacaaaacgataaagcagttgtagaaattccttcacctgttaaaggaaaagtattagaattaaaagttgaagagggaacagtcgcaaccgttgggcagacgatcatcacatttgatgcaccaggttacgaagatcttcaattcaaaggcgacgaatcaggcgaagcgaaagcggaagaagctgaaaaacaagaaactgatgcacctgcagaagcagcggaagcaaacgagcaagcggatgcagatccgaataagcgcgtcattgcaatgccatctgttcgcaagtatgcccgcgaaaaaggcgttgatatcgtgaatgtttcaggttccggcaaaaacggccgcgttctgaaagaagatatcgacagcttcttaaacggaggaactgccggagacgctaaggctgctcaagctgaagagaaagcagaacctgctgcacagcaacctgcagctgcggttcaagtgcctgaaggcgaattccctgaaactcgcgagaaaatgagcggaatccgcaaagccattgcaaaagctatggtcaactcaaaacataccgctccacacgttacattaatggacgaagtcgatgtgacaaaccttgtcgctcaccgcaagcagtttaaacaagttgcggctgatcaaggaattaagctgacttacctgccttacgtggtaaaagctttgacatcagctctgaaaaaatatccagtcctgaatacatcaattgacgacaatacagatgaagtgattcagaagcactactacaacatcggtattgcggcagacactgaaaaaggcctgcttgtgccggttgttaaaaatgcggaccgcaaagcgatttttgagatttcaaacgaaatcaacgagcttgcgacaaaagcacgcgaaggcaaacttgctcctgctgaaatgaaaggcgcttcttgcacaattacgaatatcggctctgccggcggtcaatggttcacaccggttatcaaccatccggaagttgcgatccttggaatcggccgcatcgctgagaaagctgtcgttcgtgacggcgaaatcgtcgctgcacctgttctggctctttctctaagctttgaccaccgtatgatcgacggcgcaactgcacaaaacgcgttgaatcacatcaagcgtttgctgaacgatccacaattaattttaatggaggcgtaa

SEQ ID NO: 1791 - DNA, 1413 bp, Bacillus licheniformis
atggtagtaggagatttccctattgaaacagatactcttgtcattggtgcgggacctggcggctatgtagctgccatccgcgctgctcagcttggacaaaaagtaacaatcgtcgaaaaaggcaatcttggaggcgtatgtctgaatgtcggatgtatcccttcaaaagcgcttatcaatgcaggccaccgctatgagaatgcgaagcattctgaagagatggggatcactgctgaaaacgtaaaagttgactttacaaaggttcaagaatggaaagcctctgtcgttaataagcttaccggcggtgttgaaggccttctgaaaggaaacaaagtcgacatcgtaaaaggcgaagcatactttgtagacagcaattctgtacgcgtgatggatgagaactcagctcagacttacacgttcaaaaatgcgatcattgcaacaggttctcgccctatcgaattgccaaacttcaaatatagcgaccgcgtactgaattcaacaggcgcacttgcactgaaagaaattcctaagaagctcgttgtcatcggcggcggctacatcggaacagagctcggtactgcatatgcaaacttcggtactgaagttgtcattcttgaaggcggagaagaaatccttccaggatttgagaagcaaatgagctctcttgtgaaacgcaacctgaagaaaaaaggcaacgttgaaatccatacaaaagcaatggctaaaggcgtagaagaaaaagctgacggcgtaaccgttacgttcgaagtgaaaggcgaagagcaaacgatcgatgcggactacgtacttgtcactgtcggccgcgttgcaaacacggacgagctcggacttgaacaagtcggcgtcgaaatgacggaccgcggcatcatcaaaacggacaaacaatgccgtacaaacattccgaacatctatgcgatcggtgacatcatcgaaggtcctccgcttgcgcataaagcttcttatgaaggtaaaattgctgctgaagcgattgccggagaagctgcggaaatcgactatcttggaattcctgcggtcgtattctctgagcctgaacttgcatctgtaggctacactgaagcacaggctaaagaagaaggtctttcagtgactgcagccaaattcccgtttgcagcaaacggacgtgcgctgtcattaaacgaaactgacggtttccttaaacttgtaacacgcaaagaagacggcttagtcatcggtgcacaaatcgccggagcaagcgcttctgacatgatttctgagctgagcttggcaatcgaagcaggaatgactgctgaagatatcgcaatgacaatccacgctcaccctacattgggagaaatcacaatggaagctgcagaagttgccatcggcatgccgatccacgttgtaaaataa

SEQ ID NO: 1792 - DNA, 378 bp, Bacillus licheniformis
atgtggtttcgagcgatattcaccgccgcaatttgtttcctttttttgtacgagtggatgttctttatctcacatcatgcctgaccagcagcatcaaagcaccaatcaccgccacctcaagctcatctttttttccgatgacgagcatatggagcaggaagtggcttattatgatgcgcttttggatttaaaaaaagaatttcccgaacaggtttcaagtatggaaatttcacatgataaaggcgagtggaaaaagaggttaaagtctttccaagcttgctgcttgttaatgataagaaagtactggttaaaattgaaggaaaaataaaagataaagataaaattgtaaggcttcttcaaaaggaattgaaacattaa

SEQ ID NO: 1793 - DNA, 120 bp, Bacillus licheniformis
atgggcacgatcgtttgtcaagactgcaatgaaaccattcagcattttgaagatgagaaagtgacgatactttacggaacgtgcggacagtgcaactgccatcttaaagaggaagaatag

SEQ ID NO: 1794 - DNA, 1491 bp, Bacillus licheniformis
atgaaggtgggaaaacaattgttgcagcacgaaacacccctatataccggattaaaaaaacacgccggcaaaaacccgatccagttccatataccggggcacaaaaaaggctctgggatggaccccgaattcagggagtttatcggagaaaatgcattaagcatagatttaatcaacatcgagcctctcgacgatctgcacgcgccgaaaggaataatcaaacaggcgcaggatctggcggctgaagcattcggagccgactacacgttcttttccgtccagggaacgagcggcgccatcatgacgatggtcatggccgtatgcggacccggagacaaaatcatcgtcccgagaaatgttcataaatcggtgatgtcagcgatcgtcttctcaggcgccgtaccgatcttcatccatccggaaatcgacgatgagctggggatttcacacgggatcacccctgaatcagcgaaaaaagcgctgcttgagcatcctgacgcaaaaggactgctcgtcatcaacccgacttatttcggcatagctgcagacttaaaaagcatcgtcgagcttgctcattcttttcatgtcccggtgctagttgacgaggcgcacggcgttcatatccacttccatgaagatctgcctctttcggcaatgcaggccggagcggatatggcggcgacgagcgttcataagctcggaggatcccttacacaaagttcgattctcaatatgaaagaaggtctggtttcaaaggaaagggtgcaatcgattttaagcatgctgacgacgacatcgacctcctatctattgctcgcttcgcttgatgtcgccagaaaacgcttagccacagagggacacgaactgatcgaacaaacgattaagctcgccaacgaaacaagggaacgcatcaatgatatcaacgggatttcatgcgtcgggagggaaatcctcggctccaaagcggcttttgactatgatccaaccaagttgatcatatctgtgaaagacctcggcctgaccggtcatgatgtggaaaaatggctgcgcgagtcatgccaaatcgaagtggagctttctgacttatacaacatcctgtgcatttttacaccgggagaccggaaagaggatgcagatgcgttaattaaaggattaaccgagattgctcaacaggccgcttcatctgcggaaaacagacgcaagcctgaagtgcttctgccaaacattccggcgcttgcgatgacaccgcgtgacgctttttacgcaaacacggagatcattccgttcaaaaaagcagctggcagaatgattgccgagtttgttatggtttatccgccagggataccgatcttcattccgggcgagatcattaccgaggataatatcaactacatcgaaaagaacctggaagctgggctgcctgttcagggaccggaagatgacaccctccatatgatccgcgttattaaagaacagcaggcaatcctgtaa

SEQ ID NO: 1795 - DNA, 183 bp, Bacillus licheniformis
gtgctgcaacaattgttttcccaccttcatgataaacctgctatttccttaaagactaatctttatcaaaaatcgttgagttattttgcgtttttgcttgatggcataaaacaaatgaattatattatgttcttgaaagaatgtaaagaacattttatcatctttcctgtaaggggcttctag

SEQ ID NO: 1796 - DNA, 276 bp, Bacillus licheniformis
atggaagaagggtaccaatatccgatgaatgaagactggagcacagaggaagcgatagacgtcatatcgttttttcaggcggttgagctcgcttatgaaaaaggcgtaaagcgagacgtgctgatgagtgcttaccgccgctttaaagaaatcgttccgggaaaagcggaggaaaaaaagctgtgcagccagtttgaagaagcgagcgactactctccgtatcaagcagtcaaaaaagcaaaggaacaaacggaagatacgaaaattaaaatgtaa

SEQ ID NO: 1797 - DNA, 636 bp, Bacillus licheniformis
atgagcagtctgcgttttactgaagaggattttcgtacatttacaatagaaggtttagatgcgcggatgagcgttctgaaagacacagtgcgcccgaaacttcaagggctcggcgatcattttgcgcctgttctgtccgctttgacaggagacgaaatgtttgtccacgtcgccaagcacgcgcgccgctcagtcaatccgccggacgacagctgggttgctttcgcaaacaataagcgcggctataaaaagctgccgcatttccaaattggtttatgggaaacccacgttttcgtatggtttgcattgatctatgagtcccctctcaagcaggaatacggccagctgtttaagaagcatctgccggatattgagagcagcattccaagtcgctttttctggtcggccgatcatacgaaaccggatgccaagagacagtctgagatgaatgaaaaagatctggaaaacctgtttgaacggctcgtcaacgtgaagaaagcagaagcgctttgcggtattcagctttctaaagacgaggtgctgcatatgagtgaagaggcgtttctatccgaaatcgaagcggcttttgaaaagctcgccttcctttaccgcctgacgcagaaagtatcggtataa

SEQ ID NO: 1798 - DNA, 187 bp, Bacillus licheniformis
atgaaaccaatagtaaaacaaggatgaaagaggaaaaagacaatcgggccgctgtttggaggcttgaggtcgattatgaacttgcaacgcttttgaagctatggaaaaaaaggatgaaacccaaatcgagttgagcaagcgcaaactggaacgactcagaaaagaatggatcagattacatggttga

SEQ ID NO: 1799 - DNA, 795 bp, Bacillus licheniformis
atgacaaactggaaggaaatcgatcgcctggcgaaaagctgggtgaaagaagctggtcagagaattaagcaatcaatgaaagaaaagatgacgattgaaacgaaatcgaatccaaatgaccttgtcacaaacattgacaaggaaacagagcgttttttcattgaaaaaattcaatcggtttttccggatcatcatattcttggcgaagaaggccaaggggacaagctcacatctttggacggcgtcgtttggatcatcgatccgatcgatggtacgatgaactttattcatcaaaaacgcaattttgcgatttcaatcggcatttttgaaaacggaaaaggcaaaatcggcttgatttatgatgtaactcacgatgagctttatcatgcttttcaaggcgagggtgcttacataaacaatacaaagctcggcaagatgaaagaagtgccgcttgaggaatcgattctggccatcaatgcgacatggatcaccgagaacagacggatcgatccaagcgtattatccccgcttgtcaggcgcgtcagagggacccgttcatacggttcagcggctttggaactcgcttatgtagcggcaggcagaatggatgtgtatgtgacgatgaggctcgctccttgggattacgctgccggctgcattctgcttgacgaggtcggcggaacatatacaaccattgacgggaaaccgctcaattttcttgaaaaccacagcatcgtagccggcaatccggcagctcaccgggcgattttcgacgaatatttgccgcatgaatag

SEQ ID NO: 1800 - DNA, 468 bp, Bacillus licheniformis
atgaatagcaggtctttctcttcttctgatctcgccttttttgaagagctggccgaagcgagccccgggtgggtgaaggaagagcttgacggaagcagcctggaacgctatatgagtgcttatgcgatgtataacggtgaatggctcgtgtgggaagacgggggactgccggcggctctcagctttcatctcgaatgggcgccttctaatggcaagccttggctcggaacgcttcttgtccatcccgatttccgcaaaaaaggccgggcaaaagaagtgatcaaaacgatcggaaaacgcttgagagaaaaggggcataaagcgttgtttgcggcagtgccttatgagaaagacgaatggttgaacatgctggcccgttcaggatttgaacagctgaaaacggaaaaagatgaaaagggaaaacgatatttgatcatggttttgccccttcccttgaggctgcaatga

SEQ ID NO: 1801 - DNA, 1923 bp, Bacillus licheniformis
ttgatcgaactatttagtgattatgtgctccattttgaacgttattttgttttaagcagacagagcatgcttgtcattcagtggtgtgtgacaggccttgtccttttgtatgccgtgtcatttcatccgaaagtgtgcaggcggcgcctctttttttatgcaggcatcgttctcaggctgatactggttggcgccctttcgtttgaattggctcaccaaatgaaagccgctgagttttcaaacctgtacatagacgaacaagatgcgcttctgccttttatgcagtttttgctgttcggctatattttgcttgtctcttttcattatatgatgacactcgcggaaaaagggggcaaggggctgttttttgcatttgacattgcggtgatggcgatgccgcttttccaatcgctgttcagctttgccgcctatttgaaggaatttggagcggaggagcttgaagaattgccgctcgttctgttgttgattgtcggaataccgggactgatgatctgcttgttttttcagctttattggaaaagaaaccgttacgttctccttttgattttttatattgtgacgatcggcggtttcttcatcaaaaagcttggatacgaattttttccgctgaacgtattgacaatgatcggttttcttatgacatatcacttgctgaatgactcgagaaagcctttgttgatggtgaagcgtgttttagccgcgggcaccgccgtatttttcacgcttcacctcaatcctttttacaatttggcggatgccgcttttacaatctcacacccggaggtttcagacgtggttgatgccaattttcggcctgtttcggttaaagaagcgaagcagactgtcagctcgttttttccgacagagagctttatctatttgtcagctaccaaccaggattttcataacgtttatcatttcaaaacgaaagattacgatgcggacgttgacggctggacgggaatgatcaccaattatcacaatcaaaaaaagcctagcgggaatatcctgtccggtcaggcatatatcaagcggtcgaagcaatttctaagggaacacggccgcgaacttgacaaacaaatcaaggcaaaggtcagccgtgatgacggcgaagctactgttgaattttaccgtgaatgcgaggatcctgaattaagcacaatgtggtttacttggcggaaggagactctgatgggattccatgaggacgcgtctgtttacagcttagaaagcgtgaaccaagcccgcgtttctggtgaggatatcgagcggggagttgaagccgtctatcgtaagctgggcatacccgtctcatcttatcggctgacagatattgatttattattcccattcagcctcaactcggcatccatcaacataaagacaagtgacggaatggggatggagttccaccctgtaacaggtgcattaacggctatttcgatcaaatctgaaagcgccttgccttatcgcggacaagagcttgaaaaacgcttgctttcattatttgatcaagacatttccaatctgaaaagggtggagttagaaaaggatctgatagaatttcagaaaaaagaaagcgatgctgtgttaaatacggtctggaccatgacgaaacatgaagagggagcttatctgacggtgagaaaaaactttcaaaaagcagatgaaaaacccccctacacgtatgcagacggggaaaaagcttttcagaaagtgtctgaacgctatcaaaaagggctggtctatcataaacggacgaagcttgtaatcgtttcagacggggatcaaaagagccgttatgcgtggcttgtcatcatccagccgttcggctcaaatgaacatgacgcatacttggttgatgccgagacagatgaggtgaaacattttgatgacaaatga

SEQ ID NO: 1802 - DNA, 402 bp, Bacillus licheniformis
atgacaaatgaagaaaaaaaagcggtgtttatcgatttgtatgagctctatcaagaaagtgaactggaagaggaaacgatgatctggatgaaagagcatgagcagttttttcaggatcaggctgaagcggcagcagccgggaatagagagctccccggcatgcaaaaaacagatgatcatcagaagctccttcatatcaagatttttgtttactcgttatatggtgctttcctgctcctatcgatttggatgacggtgtggtttttttctaaatggctcacaataaaaaacagacgattgaagaactgtacagggaatattatcatgacatcatgtactatttgtacaggcgaacccatcagcttgagacggcgaaagacctggcgcaggatacgtttctaa

SEQ ID NO: 1803 - DNA, 516 bp, Bacillus licheniformis
atggctcacaataaaaaacagacgattgaagaactgtacagggaatattatcatgacatcatgtactatttgtacaggcgaacccatcagcttgagacggcgaaagacctggcgcaggatacgtttctaaaagcttttgcgggcctgaagtctttcaggggccattcctcgatcaaaacatggctgtatacgatcgcacatcatacgtttatcaactggtacagaaaagataaaaaaatccaattttccgacgtggcggcctgcggcgatatggaacagcacacatttgaaatgcctgagcgccatttggcaaacgccataatgcaggaagagctgaaacatcacattgaccggctgaaagaagattaccagactgtcctcattttaagagagtttcaagagctgtcatacgaggaaatagcggaagtgctgaattggaaactgtcaaaggtaaaaaccaatcttcaccgggcccgcctggagctgaaaaaaagcttggaaggcagggaggtttaa

SEQ ID NO: 1804 - DNA, 297 bp, Bacillus licheniformis
atgaaatgccatcttgtaagagatttactgcctttatacatagaaggcgattgcagccgcaaaacggaacgtttggttgccgcacacattaagacatgcgaggattgccgggaaatgtacgacatgatgagggaacctgtcaattttcatgatgacggaggattgccaaaggaagcagaagaagcggaagaacaaaagttcaggaaagcgtattatcaaaggctgattctcaaaggggcagcgctgtttggcgggggctacttgctgatgcttttgatttacttattctttttataa

SEQ ID NO: 1805 - DNA, 189 bp, Bacillus licheniformis
gtgaaacaaatcaaatggattttcttattattcgcacttgctgcagtgatcagcatcatgatgatcggagttgcagtcgccgaaaaaagcgcagccggcgtcgcaatcgccatcgcgattctgatcgtcattatgggaagcggttttacactgaaaaaaagaatgcgcgaaaaaggcctgcttgaatag

SEQ ID NO: 1806 - DNA, 1839 bp, Bacillus licheniformis
gtgaaacttcgagaagatcttcgcaatatcgctattatcgcccacgttgaccatggaaaaacgacgctggtggatcagctcctccatcaggccggtacattccgtgcaaatgaaaacgtggctgagcgcgccatggattccaatgatttggaaagagagcgcggcattacgattttagcgaaaaatacggcgattaattataaagatacacgcattaatattttggatactccgggacacgcagatttcggcggggaagttgaacggatcatgaaaatggtcgacggcgttctgcttgttgtcgacgcttatgaaggctgcatgccgcaaacccgctttgtgctgaaaaaagcacttgagcaaaacttgacgccgatcgttgttgtcaataagatcgaccgcgattttgcccgtcctgaagaggtcgttgacgaagtgctcgatttgtttatcgagctagatgcaaatgaagaacagcttgaattcccggttgtttacgcttctgcgatcaacggcaccgcgtcagcagatccgaagcagcaggatgaaaacatggaggctttattcgaagcgattgtcaaccatattccttgtcctgtcgataaccatgaggagcctttgcagttccaggtggctctgcttgactacaatgattatgtcggccgtatcggaatcggacgcgtgttcagaggaacgatgaaggtcggacagcaagttgctttaatgaagcttgacggttctgtcaagccgttccgcgtcacgaaaatcttcggtttccagggcttgaagagagtcgagattgaagaagcgaaagccggcgaccttgtcgctgtatcaggaatggaagacatcaatgtcggagaaaccgtctgcccgattgagcatcaagaggcgcttccggttcttcgcattgacgaaccgacgcttcaaatgacgtttgcggttaacaacagtccttttgccggtcgcgaaggaaaatatgtcacggccaggaagattgaagagcggcttgaacagcagctgcagacagatgtcagccttcgagtcgatccgacgccatctcctgacgcatggatcgtgtcaggacgcggtgagctgcatttgtcgattttaatcgaaaacatgcgccgcgaaggctttgaactgcaagtatcgaagccggaagtcatcattaaagaaatcgacggcgttcgctgtgagcctgttgaacgcgtacaaatcgatgtgcctgaagagcataccggatctgtaatggaatcaatgggtgcgcgcaaaggtgaaatgatcgacatgatcaataacggaaacgggcaagtccgcctgattttcaatgtcccttcacgcggattaataggctactcaaccgaattcctttcccttacacgcggtttcgggattttaaatcatacgtttgacagctatcagccggttgagccggggcaagtcggcgggcgccgccaaggcgtgcttgtctcaatggataccgggaaagcttcagcctacggcattcaaggcgttgaagagcgcggcgtgatttttgtcgagccgggcacagaagtatatgaaggcatgatcgtcggcgagcataaccgtgaaaacgaccttgtcgtcaacatcaacaaaatgaagcagcagacaaacgtgcgctcagcgacgaaagatcagacggtcagcatgaaaaaaccgcgtatcatgtcgcttgaagaatcgcttgaatacttgaacgaggatgagtactgcgaagtcacacctgaatccatcagattgagaaagaaaattctcgacaaaaacgaacgcgaaaaagcagcgaaaaagaaaaagctggcaggattgtcgtaa

SEQ ID NO: 1807 - DNA, 321 bp, Bacillus licheniformis
ttgactgatgtaagtgaacggctgtcgttttttgccgctctctataaagtggaccagaatcccgaggcgggaatgtggtggctttatgccaccatcttcgtcctgtctgcggtcgtctttaaactgggtttcgccaaacggctgccgctgttgaaaacggcgatcatttacttttttctggcattaggctgtacgtttttaacttttttcggcgtttttctgccggttggagaagggctgatcgtagctgttttaatcctttcgatttataaaatccgcctgcaccgttcgaaaaaagagcagacgggggcgaatacgtag

SEQ ID NO: 1808 - DNA, 507 bp, Bacillus licheniformis
atggaacatttaacacacgccaaacaagaaatattttacctgtacatcaggctcattcatcagcaggagcagcaagaaaccgtcatgaaagagcgcatctccgcagaaatgaaaaagatggagcgcgaattcggagctgaaatgagactcaatatgtctgacatccatacgatcagctgcattggcgaccacgaaccgatcaacgtcacctcgatttccgagaagatggaattttcaaaagcgacggtctcaaggatcaccgcaaagctgaccgaaaaagggctcgtcagcaaaacacagctcagcgataataaaaaagaaatctacttccgtttaagccataaagggagaagcatccatcaccttcaccagcgggagcacgataaaatcgaacaaagatttaaacgatttttaagccggtattcatttgatgagatcctttttgccagggctttgtttcgggacttattaacggcggattttctcgcggatacagaaaagacatag

SEQ ID NO: 1809 - DNA, 1482 bp, Bacillus licheniformis
atggattttgatgtattgattgcaggcggcggccccgtcggtctgctgacggcttccgagctggctttggccggcgtccggacctgtattgtcgaacggctgaatgagccttctccattctcaaaagcgctcacactgcatcctcgctcaatcgaaatacttgaaatgagggggcttggagaacgatttaaggaaattggcaagccgctcggttcggggcactttgcaggtctgaagactggattggatttttctgcgcttgacacgcgagccaattttacactgttcatcccccagtacgaaactgagaaggtgcttgaggaacacgcgaggaatctcggtgtctgcatccttcgcggtcatgaagttctcgctgtccgcgagcatgaagacaccgccgagcttgtcgtccagggtccggacggcctgtccttactaaccgcttcctatatcgtcggtgccgacggggccggaagtaccatccgcaagcaggcgcgcatcgctttttccggaactgatgcgaatatcaccgcaatgcttggtgatgtgtcgcttgaaaatccgccggaatcgcatttctatacttgcgtgaaccgtgaaggcggcgttgtgatcgtgcctttagacggcggcattttccgcgtcctcataacggcgccgcatatgccccaagctttgcttcacgagcccgtcacactggaagaattaaaaaaagaactcagccgcatttgcggtacggactttggaattaacagcccggtttggatgtcccgcttcggaaatgccagcaagttggcggagcattaccgttccggcagaatttttttagctggagatgccgcgcatatacattttcccgcaggtgggcaaggtttaaatgtcgggcttcaagatgcgatgaaccttggctggaagctcgcagcaaagatcaacggacggtgtcccggctggctgcttgacagttaccatcatgaaagacaccctgtcggcaaagcgctgatcgtcaatacacaaatccaaacaaagctgattgattttacgcgtgaagggctgtacctccgtgaattgctatccggcatactcggattttcagacgtcaatcgctatctggcagaacaaattgcagcgctcagcgtgcagtatgaagcagatgaaaaaatgcctgaacatgagctgaacggtaaacgcctgcccgatattgacctgaccctttcagatggtactgtcaaacgactttacacatttcaccgcgatggacgtttcttattagcagcattcggaaaagaaccgaaggaattttccagactgcctcatgtccggctcatgcaactgaaagcgattgacggacggcctgaatggaatggcgtaaaagcagccctgatccgccccgacggccacatagcctgggctgtggacgaatccctggaaaacgcggagcaattgattgccgatggaatccgccgctggtgcggaaacgcttaa

SEQ ID NO: 1810 - DNA, 207 bp, Bacillus licheniformis
gtgagggtaaagtgttcattgtgtgacaaaatcgaaaaaatcgatgacgacacactcattgccaaacgtctccgaaaccggccgatacatacctatatgtgccatgaatgcagcgaaagaattaaaatcaaaaccgaaaaccggatgaaaaccggccgttttaagttatatccgcacagaaaagataaagagcagatcaagtcataa

SEQ ID NO: 1811 - DNA, 615 bp, Bacillus licheniformis
gtgcgaatcttttttttgatcctaattcaaaccgttatgctgctttcagcctgcggcattcaaaataatgcccgaaatgaagcaaatgagcttcccggcaacagaccgattcatgtaaaaaacagcgcccaggagccggtgaaccgcgaagacggacaagccatctcacggcgccttgtaaagatcaccgaaagcgttccgggtgtcaatgatgcgaccgccgtcgtgctaggcaggctcgccgtcgtcggaattgatgtgaaagacaatttggaacgcagcaaagtcgaatccattaagtattcggtcgctgaagctctgcagaatgacccttatggagcaaacgccgccgttgtcgcggatcccgacactgtaaaccgcctgcgggcaatgggcagagaaattcaagcgggacgtcctgtcaaagggattctcgatgagctggcagccattgtcgggcgcgtccttcctgaagtgccgaacgacgcaacagacaaccagcaaacaaatcctacaaaatccaacaacgaccagctgaatgagagaaaccaaaaacaactcgaaaagaagcagaataatcaatcgaacaaacatatgaaaaatcggcagcaataa

SEQ ID NO: 1812 - DNA, 1329 bp, Bacillus licheniformis
ttgagtaaaatttatgtgctagatacgaatgtgttattgcaggatccgaattcaatcttttcttttgaagataacgaggtcgtcatcccggctgtcgtattggaggaagtcgattcaaagaaacgttacatggatgaaattgggaggaatgcaaggcgcgtatctaaattgatagatgatttgcgtttaaaaggaaagctgtatgaaaatgttcctctccctaacggaggaagcttgagaatcgagcttaaccatcgctcttttcagcagcttcaggaaatctttatcgaaaaaactagcgacaaccggattttagccgtagcgaaaaacctcagccttgaagaagaaacgaaagaaggcggcagaccggttattcttgtcagcaaagatatgctgatccgcgtcaaagccgatgccatcgggttgatgtcagaggattttttgcacgacagggttgtcgacaatgatgatatatacagcggttatacggacgtgtacattcgctcggatcagatgaattcattttttgaacatcattatttgcagcttgacgaaatcagcgaggagccgctgtgtccgaaccagtttgtcgtcatgaaggacgcgctcggcggatcatcttctgcggttggaatcgtagatcaaagcggaaaagccgttaaaaagcttgtttttgaccaggagcaggtttggggcatccgttcccgaaacgtacagcagacgatggcgttggaacttctattaagacaagatattccgcttgtcaccctgatcggaaaagccggcacaggaaaaacactgcttgcgctggcagccggattgctgcagacagaggatctggggaattttaaaaaacttgttgtcacaaggccgatcgttcctgtcggaaaagatctcggctatcttccgggtgaaaaagaagaaaaacttcgaccgtgggtccagcctatttttgataacctggaatacttgttcaatgcaaaaaaaccgggggaacttgatgatattttggcggggatgggctccattcaagtcgaagcccttacttatataaggggcagaagcattcccgaccaattcatcatcattgatgaggcccaaaatctgaccaagcatgaagtcaaaacgcttctgacacgcgtcggggaaggcagcaaaatcgtattgatgggagataccgaacagatcgatcatccttatttggatgcgatgaacaacggcctggcctatgtagtagagcgctttaaagatcaaaaaatttccggaaacgtgaagcttttaaaaggagagcgctcccggcttgcaaggcttgcagcagacctgctgtaa

SEQ ID NO: 1813 - DNA, 483 bp, Bacillus licheniformis
atgagcattgtaacgatcacaggaaatgtaaagtatccgattacgctcgatccgagcgtctggatttttgatgaccgaaaattcgatctcgagcagttcttttcacatttcggagaggtacaggatgaagatgacgaccttgtgattgaccgggaacggcaaatcagagaaggtgctgtatcgccgccgacgctgaaatcggagaaaaagtatgaaaaggaaaaattgcttgacggcactttcggaatcaagcttgagccttttttgaaaaacgcggaggtgtcaggctccgccgtcaaatgcctcttcaaaacggaaggtgaagacgtttccgttccaattgaagaagcgggcggcatgattctctgcttcagcaacaaaggcaagccgcttggcgaagacgggcctgtacacgtttattttcccgacggttctaacaagatgaatcctgtgaaacgagtaaaagaaattcacattatttaa

SEQ ID NO: 1814 - DNA, 930 bp, Bacillus licheniformis
ttgaattgccggcataataaggagctcgaatattttgtcacagaagcgaaaaaagtgacggacaaaggaaaggttgcatcttacataccggctttggccgaattatcggaggacgatttatcggcggcggtctactttaccgacgggacttgtatatcagcgggggatgtggaaaaagcattcactctgcaaagcatatcaaaagtattgtcgcttgccctcgttctgatcgatcacggaccggaaaaagtgtttcattacgtaggacaagagccgactggcgatccgtttaactccatcatcaagcttgaaaccgtcaacccggggaagccgctgaatccgatgataaacgcaggagcattggtggtcacaagcatgattaaaggagagacgaacgctgataagatcgggagactgcttgattttattaaaaaacttgcaaacaaccggagcattaccgtttgcgggaaggtcgccgaatctgaatttgaaacctcgatggtcaacagggcgatgtgctattacatgaaagagcacggcatttttcaggctgaggttgaggatgttatggatgtatatacaaaacagtgcgccattgaaatgaacagcctggacctggcaaaaatcggctctgtttttgctttgaacggcaagcatcccgaaacgggagaacaaatcataccgaaggatatcgcgagaatttgcaagacatttatggtgacatgcggaatgtataatgccagcggcgaattcgcaatcaaaatcggaattcccgccaaaagcggggtttcagggggcatcatggggctatccccataccgtttcggcatcggcatcttcgggccttcgctcgatgaaaagggaaacagcattgccggaatccggcttttagagctattatctgcgaattacagcttaagcattttttaa

SEQ ID NO: 1815 - DNA, 282 bp, Bacillus licheniformis
ttggcgtctgagattgtagtcgaccatcgtgaaaaagcacttgctctgttaaaacgtgatgctgataaaatcttaaagctgattcaagtgcaaatggacaacttaacgatgcctcaatgtcctctttatgaagaggttttagatacacaaatgttcggactctctagagaaattgattttgctgtccgccttggattagtggatgaagaagagggtaaagaactgctttacaggctggagcgtgaattgtctgcattacatgatgcatttacaaaaaaataa

SEQ ID NO: 1816 - DNA, 126 bp, Bacillus licheniformis
atgcgtcttcgtttattcggcgtgaacagcggccattccttcatcaactggcgttttctttctcattccataataaaaaaagcctgccggcagtttgtttctatcgaaacgtcgtcgacaagctga

SEQ ID NO: 1817 - DNA, 1212 bp, Bacillus licheniformis
atgataaaaagaatgctcaaatcctatgattattcattaatcttcgctgtattcctgctgtgcgggttcgggctcgtcatggtgtacagttcaagcatgatcacggccgtgacaaggtacggacaaaacagcagctacttttttgacaggcagctgatgtttttggcgctcggaaccgtcatatttttatgcgcggcgctttttccgtataaggcttttgccaatcaaaaattccaaaagtttttgctgctcatttccgtcgtcgctttgttcgggctgtttgttgtcggacatgtggccgggaatgcccaaagctggttcagggtttcgaattacggcatccagccgggggagtttgtcaagctgaccgtcatcttgtatctttcttccgtctacgccaaaaagcaaagctatattgacaacttgggagccggaatcgcccctcctgcgatcatcacgctcttcatttgcgccttggtcgctgctcagccggatgtgggaacggcctttatcatcgctttaatcgcattgtgcatcattttgtgctcgggattcagcggcaaaacgctgttaaagctcgtgcttttggccgggattgtccttgtgctcgtcagcccgctcatttatttcaactgggacagcattttaacagaaggacggatgaagcggtttgaaagctatcaaaacccgtttaaagatgcgggagattcgggctttcaagtcgtcaactcctacttggcgatcggttccgggggactgttcggcctgggcctcggcgagagcgtccagaagtatgggtatctgcctgaaacgcacaccgattttattatggcgatcatcgccgaggagctcggtattttcggtgtcctttttgtcgtgttgctgctttctttcatcgttttaaaagggttttatatagcgaggaaatgcgatgatccgtttggaagcctgctcgcgatcggcatatcgagcatgatcgccatccagtctttcgtgaacctgggcggcatatccggcttgattcctttgacaggggtgacgcttccgtttatcagctacggagggtcatcgctcattctgctgatggcaagcgcggggatattggtgaacatcagcatgtttaatgaatattttgatcggttcaaacgaaaacagcctgtcaatactacaaaaacgaaagaaaatcaatataaaaaaagtataaatttttaa

SEQ ID NO: 1818 - DNA, 3444 bp, Bacillus licheniformis
atgtcacaacagtctattcaaaaagttcttgttgcaaacagaggggaaatcgctatccgcgtatttcgcgcctgcacagaactgaatatccgtacggtagcgatctattctaaagaagacagcggatcttaccacagatacaaagccgatgaagcatacctggtcggcgaagggaaaaagccgattgacgcttatcttgatattgaaggcatcatcgagattgcaaaacgcaaccatgtggatgccatccatccaggctacggcttcctgtcggaaaacattcagtttgctaagcggtgtgaagaggaaggcatcatctttatcggaccgacctccgagcacctcgatatgtttggagacaaagtaaaagcccgcgaacaagctgaaaaagctggaattccggtcataccggggagcgacggaccagtggcggatatagcggaagtgaaacaatttgcggaaaagttcggatatccgtttatcattaaagcgtcgcttggcggcggcgggcgcggcatgcggatcgtcagggacgaatcggagctggaggagtcctataatagggcgaaatcagaggcgaaagcggcctttggcaatgatgaagtttatgtcgaaaagctgattgaaaagccgaagcacattgaagttcaagtcatcggagataaagaagggaacgtggttcacctttacgaccgcgactgctctgtgcaaaggcgacatcaaaaggtcatcgaagtggcgccgagcgtttcgctttctgaatccctccgggaaaagatttgcgatgctgccgttaagcttgcgaagaatgttgactatgtcaatgccggtacagtcgaatttttagttgcgaacgatgagtttttctttattgaagtgaacccgcgtgttcaggtggagcataccattacggaaatggtaacgggcgtcgatatcgttcagacgcaaatcctgatcgctgccggtctcagtctggacagcagcgaaatcagcattccgaaccaggatgcgatcacgctgcacggatatgcgatccagtcaagggttacgactgaagatccgtcaaacaatttcatgcctgacacaggcaaaatcatggcatatcgctcaggcggcggtttcggggtgaggcttgataccggaaacagttttcagggcgctgtcattacgccttattacgattcgctgcttgttaagctttcaacttgggcgctgacgtttgaacaggcggcagccaaaatggtccgcaaccttcaggaattcaggatcaggggaatcaaaacgaacattcctttccttgaaaatgtggcgaaacacgaaaagtttcttacagggcaatacgacacgtcttttatcgatacaacgccagaactttttgtctttcctaagcagagagaccgcggaacgaaaatgctgacatatattggggacgtaacggtcaacggcttcccgggcatcgataaaaagaagaagcccgagtttgataagccgcagatcgtcaaaacagatgtcgatcagccaatcgcaagcggaacaaaacagattcttgatgaacgcggagccgaagggctcgtcaaatgggtgaaagatcaagaggaagtgctcctcactgatacgacgttccgcgacgcccatcagtcattgcttgcgacaagagtcagaacgcatgacctgaaaaaaatcgccaatccgacggctgcgctctggccagagcttttcagtcttgaaatgtggggcggcgccacatttgatgtcgcttaccgtttcttgaaagaagatccgtggaaaaggctcgaggagctgcggaaggaaattccgaatacgatgtttcaaatgcttttgagatcttcgaatgccgtcgggtatacaaactaccctgacaacctgattaaaaagttcgtcagcgaatcggctgcggccggaatcgatgtattccgcatttttgacagcttgaactgggttaaagggatgacgctcgccattgatgcagtgcgcgagtcaggcaagcttgccgaagcggcgatctgctatacaggggacattctcgatccgaacagaagcaagtataatcttgaatattatacgtcaatggcaaaagagcttgaagctgcgggggcgcatattctcggcattaaggatatggccggcctgctgagacctcaagcggcatacgaactggtgtcggctttgaaagagacgatcgacattccgatccacttgcatacacacgacacgagcggcaacggtatttttatgtatgcgaaggcgatagaagcaggcgtcgacatcgtcgacgtagcggtcagctcgatggcgggtctgacatcacagccaagcgcaagctcgctttaccatgcgcttgaaggagataaacgccgtccgcagttcaatgtcgatgcggtagagtcgttgtctcaatattgggagtctgtcagaaaatattacagcgagtttgagagcggcatgattgcgcctcataccgaaatttacaagcatgaaatgcctggcggccaatacagcaaccttcagcagcaggctaagggagtcggcctcggcgaccgctggaatgaagtgaaagaaatgtacagccgggtcaaccacctgttcggggacatcgtaaaggttacgccgtcatctaaagtcgtcggggatatggcgctttacatggtgcaaaataacctgacggaagatgatatttacgaaaggggagaatctctcgattttcctgactcggttgtcgagctttttaaagggtatatcggtcagcctcacggcggattccctgagaaattgcaaaagctgattttaaaagggcaggagccgattacagtacgccctggagaactgcttgaaccggtttcatttgacgctataaaagcggaattcttggaaaagcatggtatggagctttccgaccaggatgctgttgcatatgcgctttatccgaaagtgtttaccgagtatgtcaagacagcggaactgtacggggatatctctgtgcttgatacaccaaccttcctctacggcatgaccctcggcgaagaaatcgaggtcgagattgaaagagggaaaacgctgatcgtcaaacttgtctctatcggggaaccgcgtccggatgcgacgagagtcgtttattttgaactgaacggccagcctcgcgaagtggtcattaaagacgaaagcattaaatcgtccgttcatcaaaaggtgaaagccgaccgttcaaacccgaatcatatcgcggcatctatgccgggaacggtaatcaagcttcttgtaagcaaaggggaccaagtgaagaagggcgatcatttgatgatcaatgaagcgatgaaaatggaaacgaccgttcaggctccgttttcaggaactgttgaaaacattcacgttacaaacggagaagccattcaaaccggcgaccttctcattgaactgaaaaaataa

SEQ ID NO: 1819 - DNA, 909 bp, Bacillus licheniformis
atgaataaagcattaaaaggcttgggaattatcacaactatcgccatgcttttcgtgctgatcggcggcgccctcgtcacaaagacgggttcaggaatgggctgcggcagatcttggccgctttgcaacggaagcatattcccggctttaacccttgaatcgattatcgaatggagccacaggtttgtcagcggcacatccggcgtccttgtgctggctctcgccatttggacatggaaaaaaatcggccatatcagagaaacgaaatttctcgcggtgatgtcggtcgtctttctcattcttcaggcgcttttgggcgctgcagcggtcgtcttcgggtcatcggccctgatcatggctttgcacttcggaatctcgcttatttcctttgcttctgtgctgcttttgacgctcctggtgtttgaagctgacagcaaacagaaatccgaatcgttttatataggaaaaaccatgcagtttcatatgataggaatcattatatacacatatgtcgtcgtttatacaggcgcatatgtccggcatacgagttcaagcctcgcgtgccttgactttccgatgtgcagcacggaaaacggctggcttcccgggaagtttcacgaatgggtgcagatgggacacagagctgcggcgcttcttctgttcgcctggatcatcgcggcagcggtacatgcagcaagacagtataaaaatcaaaaacgcatttattggggctggatgatttccctgatcctgatcatccttcaggctgcctcaggaattgcggttgtctacagcagactggatttgggttttgcactcgcccacgcattctttatttcctgcctgttcggaatcctttgctacttcctgctgcttgttgcgcgctatcgcaggcaggtgcaaaaataa

SEQ ID NO: 1820 - DNA, 927 bp, Bacillus licheniformis
atggctgaaacaagaattacagctgatacagcaatgaatggacaaatagaagagacgacagcatggaaagatttcctcgcccttatcaaagtcgggattgtttactcgaacctgataacaacttttacgggcatgtggctcgctttttacttttcaaatctgagctttctaggaaaccttgatatcgtgctgttcactttagcggggtcctcgcttattattgcaggctcatgcgtcatcaacaacttttatgaccgtgatattgaccagctcatgcagcggacgagaacaaggccgacggtgactggaaaaatccagccttcacaggcattgtggttcggcattctgctgactgcgctcggttttatcatgctgctgatgaccaatctgacagctgccgcagtaggatttgtcggcgtctttacgtacgtgtttctatacacgatgtggtcaaagcgccgctataccgttaatacgatcatcggaagtgtgtcaggggctgttccacctttgatcggatggaccgctgtccaaggttccatcggagtcgaggcgtgggtgctgtttttaattatgtttatttggcagattccccactttctggcgcttgcgattaagaaaacggaggaatacagagccgcaaatataccgatgctgcctgttgtacacggttttgaagtgacgaaaaggcagatcatcatttggattgcctgcttaatgccgctgccgtttttcctgggcggactcggactgccgatcgtcattttggggacggtgcttaatatcggctggctcgtttgcggtctggtcggttacagaagcaaaaatatcatgaagtgggcaacgctcatgtttgtatattcattaaattacttgaccattttcttcgttgccatggtcgtatttacactttttaaaattggatag

SEQ ID NO: 1821 - DNA, 1068 bp, Bacillus licheniformis
atgttaaagaaatggcgtctgatgtcgctgttcactattttggcgctcgttttagcagggtgcggagaaccgtttatatcaacgctgcagccggcgggcgaggtggctgatcagcagtatttcctaatgattctcagcacgctgatcatggttgttgttgtagtagtggtaagtttcattttcgtatttgtcatcgtcaagtacagaagatctaagctcggtgatgaccacatcccgaaacaggttgaaggaaaccgcaatttagaaattttatggactgttattccgattatcctccttcttatcctggttgttcctgttgtcgcacagacctttgatcttgctgatacgaaaccgatggataagaaaaacagggatccggagaagacgctcgtcgtcaacgtgcgggcgaacctttactggtgggaattcgaatatcctgactacggcgtgattacgagccaggagctggtcgtgccgaccgatgaacgcatttacttcaagctgaaagcttccgatgtcaaacattcattctggattccttctgtcgggggcaaggttgatacgaacacagacaatgaaaacaagttctacttaacgattgattcaaaacgggcggaaaaagccggagactatttctacgggaaatgcgccgagctctgcggaccttcccacgctttaatggactttaaagttaaagcggtttcgaaggatgagttcaagaaatggatgagcgatatggaaaacaataaagcggaagcgaaaaccgatctcgctgttgaaggagaaaaggtgttcaaagagaaaaactgcctgagctgtcatgcgaccgattcaaaagaccaaagggcggaagcggccagaacggctccgaacctcgcgacttttggagacaggtcgacgatcgccggcgtgaaggaattcaacgatgaaaacttgaaagcgtggctcaaggatcctgaaagcataaaaccgggcaacaaaatgaccggcacataccctgatttgagcgacaaggaacttgatgcactgactgaatatttaaaggggttaaaaaccgaagactaa

SEQ ID NO: 1822 - DNA, 1869 bp, Bacillus licheniformis
gtgagtacgcttaagaaaaagcaaggttttggggctgtattatgggactatttaacgactgtcgatcataaaaagattgccatcctttatttgctgggcggcgggttcttctttgtgctcggcggaatcgaagcgatgctgatcagggttcagctgatgataccgaacaatgacatcatgagcggcggggtctacaatgaaatcatgacgatgcacggcacaacgatgattttcctggcggcgatgccgctgttgttcgcattgatgaacgccgtcgttccgctgcagataggcgcgcgggatgtcgcgtttccattcttgaactcgctcggcttctggctgtttcttttcggcggcatctttctgaatttaagctggtttttgggaggggcacccgatgccggctggacgtcttatgcgtcgctttcccttcattccgaagggcacgggatcgatttctatgttctcggtctgcaaattgccgggatcggtacgctgattgccgggattaactttctcgcgacgatcatcaacatgagggcgccgggcatgacatacatgaggctgccgcttttcacatggacgacattcgtcgcttcggctttgattttgttcgcgtttccgccgctgaccgtaggcattgcgctcttgatgctggaccggttgttcggaacgagctttttcaatccggaattaggcggaaatacgatcatttgggagcatctgttctggattttcggacaccctgaagtttatattctcgtactcccggcgttcggcattttttcggaaatcattccggtttttgcgagaaaaaggctgttcggctattcttcaatggtatttgcaaccgtattgatcggctttttaggcttcatggtttgggctcaccatatgtttacaacgggactcgggcctgtggcaaacgccatttttgcggtggcgacgatggccattgccgtcccgactggtattaaaatcttcaactggctgctcacggcgtggggcgggagcatcaagtttacaacgccgatgctttacgcgatatcctttatcccgacgtttgttatgggcggggtgacaggcgtcatgcttgctgccgcaccggctgactatcagttccatgacacgtactttgtcgtggcccacttccattacgtcatcattggcggagtggtgttcgccatcctcgccggagctcattactggtggccgaaaatgttcgggaaaatgctgagcgaagcgttgggcaaaataacgtttgtactctttttcatcgggttccacctgacgttcttcatccagcattggctcggattgtggggaatgccgagacgcgtgttcacatacttgccgaatcagggatttgacatggcgaacctgatcagttcaatcggagctgtgtttatggcggctgcggtcatcatactcgtgatcaatattatcgtgacgactgccaaaggggaaaaagtcggcagcgatccttggcatgacggaagaacgcttgagtgggccgtttcttcgccgcctcctgaatacaacttcaaacagctgcctttggtcagaggccttgatgctttatggatcgaaaaaagagccggcaagcagtcaatgaccgccgcggagccgcttcaggacatccatatgccaaacggatcgattcttccgttcatcatgtcactcgggctgtttatatccgccttcggctttatgtaccggacggaatttgcctgggggctgcctgtcattctgatcgggttagggatcacgttatttatgatgcttctccggtctgtaattgatgaccacgggtaccatattcataaagaagatctgatggatgatgacgacaaaggggtgaaggcataa

SEQ ID NO: 1823 - DNA, 624 bp, Bacillus licheniformis
atgcatacagaagagaaattgacggctgaaaccttcccggcttctcctgaaaaagctacgttagaaggaaaaaataaatttatcggcttttggctatttctcgggggagagacggttcttttcgcgtctctcttcgcaacataccttgcgctgaagaattcgaatgcaggggggccgaaaacgaccgagatgttcgacatggggctggtctttcttgcgacaatgctccttttgacgagcagtttgacgagcgtgtatgcgatgtatcatatgaaaaacttcgcttttaaaaagatgcaggtttggctcggaatcaccgttctgctcggtgcaggctttctggcgcttgaaatatatgagttcacgcattacattcacgaatatgggttcaccattcaaagctcggctctcggctccgctttttatacgcttgtcggcacacacggagcacacgttaccttcgggcttctctggattctttctttgatgatcagaaatgcgggccgcggattaagcctttacaacgcgccgaagttttttgtcgcaagcctctactggcattttatcgacgttgtctgggtgtttatctttaccgttgtatacttgatggggatggtgggataa

SEQ ID NO: 1824 - DNA, 330 bp, Bacillus licheniformis
atggtgaataacgaaaacagagggaatcccaaaacagatcttgcctaccgcaaaaagaaaaacgcggaggacatgagatatcaggttatttcattcggtttgatgatcggcctgaccattgtcgcttttttaacggtcgcctcaggtgccggcgtatggtttacggtgccgtttattctgctgctcgccgtcattcaggttgcgtttcagctgtattactttatgcatatgagtcagcgggggcatgaagcgccgactttgttcctttattcgggcgttttggtcgcttttgttaccgtgttggcttttgtaacgctaatctggtggtaa

SEQ ID NO: 1825 - DNA, 900 bp, Bacillus licheniformis
ttgggcagccttgaaatattcggttttcgcgccctttggagcccctatttcctaggggctgtcgttttcataaccgccctttacttttttctgatgaaacgcttaggatcagaaggagagcgggcgtccaggaaagaaatcggtttattcctgacggcgatgattcttttatacgcgtctaagggcagtccggttgatttgctgggacatattatgttcagcgcgcatatggcgcaaatggcggttctgtatttgatcgtgccgcctctgatcatccttggcataccgccttggttttggaaaaaggtcatttttctgccgatcgtcaagccgctgttccggtttttttccaaaccattgatcgcgataatcgtgtttaacggtctattttcgatgtatcacattccattggtgtttgattttataaagacggatgccgtttatcatgccgccattaccgtgctgatctttattgcagcgtttttcatgtggtggccgctcgttcacaaggtcgaggagcttccgcagatgagcggacttttgaaactcggctacattatggctgacggcattttgctgacaccggcgtgcgcgttaatcatgttcagcgatacggctctgtattcgacatattcggatccgtcagcatgggcggaggcaatgaagctgtgcgttcctctcgatacgctgagcggaatgacgcttacaggtccggaaatgttcagcagcatgcctgttctcgaagatcagcagcttggcgcgattgtcatgaaaatcctacaggaaatcgtgtacgggacatttttggcgattatctttttcggctgggcgaggaaggaaagagccaaagacgaaaaggacctggaagaagaatcatattctccgtctacggttcattaa

SEQ ID NO: 1826 - DNA, 360 bp, Bacillus licheniformis
atgaaatttgaagaatccggaattgaaggattgactgccgaccttaaccggttagacgacatcatggaaaacgaagggttcgtaagagctggacaatgggattatgaacgcgtcacatatgaccgcaaattcgatatggtcgaaggaagattctaccttcgcgtgttcggatatgccatcgaaggtgacgtgggcgcccggcgcgcggtaatcaaactgatgacgccgcttttgggcaaatattattatccgcatggagtggaatacggcgaagacgaacattttccgccgcagctcctcaaaacaagcaagacggtgctgaattcgatcaaagaaaaggtttcagcgcttgaagtgtag

SEQ ID NO: 1827 - DNA, 447 bp, Bacillus licheniformis
ttgacacgtgtgaaagatatcatgacaaaggaaacattatattgtacggttcttgataatgtatacgaggctgccgtgaaaatgaaagacggggatgtgggagcgattccggttgtgcttgatgacggcttggaactggttgggatcgtcactgaccgggatttagtgctgcggggaatcgcagctaaaaaaccgaattcgcaaaaaattacaaatgtcatgacgactgatctcattacggtaagtgaagacgattcaattgaaaaagcggtcgatctcatgggagattatcagatcagaagggtcccggttacacggggaaaaacgcttgccggcatcattacgctcggcgatgtttcaactcacaataaatcgaaccgccaggctggcgacgcgctgacatttatatctgaaaacgaagagcggcctggagattttcttcattaa

SEQ ID NO: 1828 - DNA, 1044 bp, Bacillus licheniformis
ttgaaaaatatattaagagcggtcgtgatccttctcatcgttgcggcttcatacacgctgtttattcaatacggctcaacgcctgagaaaattgcgaaggaagacaagccgcaagtctcaaacgaagatgcaaaaaaagagaagcccttgaacattcccgattccggcctgctttcctttatcggggaatcggccgagacgatcgaaaagaaactggggaaaccggacagagtcgatccttcagcgtatgattatgaatggtgggtctataaccaagggaaaaaacagtacgttcaaatcggcttgctgggcggcaaggctgtgacattgtttgcgacaggcgacggggtgaacaccgctccgtttaaaatcggacggccgtcaagggaagttttcaaaacgacccagatcgccccgtatgtcaatgttcaatataaaggcagttcataccgttttgagttttccgaggaagatatgaatacaaggccgacggttaaagtcggagacatctatgttcagctgtacatggataaattcgaggggacgctttcaagcatcagggcatttgatgcgccgactttaatcaagcaaaggccgtatgaagttgtctacagaggcaccctgatcgagcctaaagcattgacagaatcggattggaagaaaatcgagaaagcaaatgagaagcagatttttgatataacaaacgttatccgcgcaaggcacggcctgtctgagctcacttgggatgaaggcgtatcaaaagtggcttacggccacagcagcgacatgaaagagcaccattacttctcccatgtgtcagaaacggaaggcaccctcaaagacaggcttgaaaaaggaaaagtcaattttgagcaggcgggggaaaatatcgcgctcaactatgtcgacgggcctgcggcggttgaaggctggttaaacagcgaagggcacagaaaagcgctcttaaatgccgactatacccatctcggcgtcggggtggatgagaaatattatacgcaaaactttattaaagaatggcaatag

SEQ ID NO: 1829 - DNA, 396 bp, Bacillus licheniformis
ttggcaaatcaaaacgcgcaatcatccatcaatgaatttaagcaatttataaaacggcatcctaagttgatttccgaagtccggaaacaagaaaaaagctggcaggaagtctatgaaaactgggttttgctcggggaagacgattcgatatgggatccgtacagggaagaagcttcagcggaaaaggagccggacgctggcggcaaaaacgatttcatttcgaaaatggtgacggccgttcgaaagatggatgccaatcaaatgaatgagcagatcaataaaatgagccagtctatttcttcgctgcaaagcttgctcagccagttttcgggcggaagccaaaaacagcagaaacaaagcggcggcgagcatccgttttctttccgaaaagattag

SEQ ID NO: 1830 - DNA, 240 bp, Bacillus licheniformis
atgcgtaaagaagtgcaggagtatgtgttcgccgacgaagagcgccgccggttcatccgtgagcagccggtctggtaccgcaagctttcgcggaatccgaatgatctgtcagcctttcatctcgatatgatgaatttttatgaaaaaacgattcctcacagggtcaaccagttatcgggcagcattcagatggcccagatgatgctgcaaatgtttcatgcgatgcgcactcaggattaa

SEQ ID NO: 1831 - DNA, 171 bp, Bacillus licheniformis
atgccgcctccgaactataattttccaaaaacttcgctttcacaagcggaatcgcgccaatcagataagcctttgggctttggtttatgggtggcgcagccggccagcaagaggcacagaaagattacaagccagcacttcttcatcacagatcaactccttcacacctag

SEQ ID NO: 1832 - DNA, 450 bp, Bacillus licheniformis
atgtttgccacaatggaatcgttgcggcttcaaaatgaagcatatgatttggccaacatgattcttcaatcagaggcggctgaacattacagaaaatgctacaagcgtctccgcgaagatgaagaggccggacgtattatcgcttcgtttacgaaaataaaagaacagtacgaggatgtgcagcgctttggcaagtatcatcctgattataaagagataaccaagaaaatgagggaaatcaaacgggagcttgaccttcacgatacagtagccgaatttaaaaaggcggaaaccgagctgcaatccattcttgatgaagtcagcgtggaaatcggtcatgctgtgtcaaaacatatcaaagtaccgactggaaacccttattttgataatctttcatcttgcggcggcggctgcgggtcaggcggaagctgcggctgtaaagtttcctga

SEQ ID NO: 1833 - DNA, 273 bp, Bacillus licheniformis
ttggaaatcaggcgtcaaggtttaatcgtttggctgcactccttgaagcaggcgaaaatgctcaggaaattcggaaatgttcattacgtttcaaagcggctgaaatatgtagtggtgtattgcaatatggaagatgccgaaagaatcatcgcaaaaatacgttcgtactcttttgtcaaacaggtggatctttcatacaaaccgtttttgaaaatggagtttgaatccaagcaggataaagcgaaagaatacgactataaagccgggctctaa

SEQ ID NO: 1834 - DNA, 567 bp, Bacillus licheniformis
atgagagtgatttctgggacgtataagggacgtgccttaaaggcggttcccggcacgtcgacaaggccgacgaccgataaagtaaaggaatccatctttaatatggtcggcccgtattttgaaggcggcaccggccttgatctgtacgcgggaagcggcggattgggcattgaagcgctgtcgcggggatttgaccgcttcatttttgtcgaccgggattttaaagcgattcaaaccgtgaaaggaaatttgaaaacgctgggcttagaaaagtgcgccgaagtgtacataaatgacgcagaacgggctctgcatgcactggtgaaaaggggcgcaagctttgatgccgtctttttggacccgccatatcgagagcaaaagctggaagcgcttttatcgatcattgatgaagcggatatgctgactgaaagagggtttattgtggctgagcatgcgaaggaagtcatgctgccggatgcggcgggcggacttcagcttgcccggcaggaaatatacggcttaacaggcgtgaccatatacagaaagagagggaatggggatggctag

SEQ ID NO: 1835 - DNA, 495 bp, Bacillus licheniformis
atggctagcattgccgtttgtcccggaagttttgatccggtgacttttggacatttggatatcatcaggcgcggggcgaaagtgtttgataaagtttatgtatgcgttttgaacaattcttcgaagaagccgctgtttacagtggaagaacgctgtgggctgcttcgcgaagtgacgcaggatatcccgaatgtgcaagtggaatcttttcaggggcttttgattgattatgcaaagagcaagcaggcaaacgtcatcctgcgggggcttagagcggtatctgactttgaatacgagatgcagggaacctcgatgaacaaagtgctcgatgaaaatattgaaacgttttttatgatgacgaataaccaatactcgttcctcagttcaagcattgtcaaagaagtggcaaaatataaaggttcagtcgcagaactcgtgccggaagcggtcgaggctgcacttgaaaaaaagtttgcaaaaaatgagcggccgtaa

SEQ ID NO: 1836 - DNA, 123 bp, Bacillus licheniformis
atgagaagggtgccgattgttaggagcggaccgatctctgctaaagtgttccacatctccagaaagaaaggttccgtcttcccggccgtcagaaaggagaagaccggctccgtcggagaatag

SEQ ID NO: 1837 - DNA, 1086 bp, Bacillus licheniformis
atggacatgtcaaaggtaaagacactcatgattgccgttttgctgctttcatttacagctgccgtcattacccacccgcaagaatcatttgacgcttctaaaagtggacttgccatgtggtgggaggttgtattcccttcccttttgcctttttttattttatcagagctcttgatcgggtttggtgtcgtcaggtttgtcgggctgttgctcgagcctttcatgagaccggtgttccgcgtacccggcgtcggagggttcgtgctcgcaatgggaatggcatcgggaaacccggccggcgcaaaactgacttcaaggctgagacaggaacggcagatttcccgggtcgaagcagagcggctcgcttcattcaccaactcatctaacccgctgtttattttcggagccgttgcggtcggctttttccataatccttctcttggcgttgtgcttgcggcggcccattatttgggcaatttcgcagttggactgacgatgcgcacttacggaagaaaagaagaaaaccgcaccgccgtgcgaaagaagcttcctgtgccttcaattaaagaagccttaaaagcgctccatcaggcaagacttgaagaaaagcggccgctcggcaaacttttgagcgatgctgtcatctcctccgttcaaacgctgctaatggtgggcggcttcatcattcttttttcggtttttaataacattctttctgtgatgcacatcaccgacattctttcgcacgcgacaagaatgattttgacggctcttcaattgcccggtgattttgataagcctttattatcgggattgtttgagattacgctcggcagcaaactggtcagcgcaacggatgcggcgcttctccagcaagcggtgatcgtcagctttattttgggtttcagcggcttctgcgtccaagcgcaggttgcaggcattcttgctgaaacggatatccgctttagccgttttttatcgctcgcatcctccagggaatttatgcagcgatctttgttcttattctttggaagcctctttacacatcgttctattctccgacggagccggtcttctcctttctga

SEQ ID NO: 1838 - DNA, 129 bp, Bacillus licheniformis
atgaaacaaatgaaccggaagctctttaaacgcgcggaaacccttctccttgatgagcatcaaaagaaggcatttcatacatctgtgaattcatgcaggctgaaaattcgaagccggatcaagatgtga

SEQ ID NO: 1839 - DNA, 1023 bp, Bacillus licheniformis
atgctgaaaaaaagaattatacgcatcgcattattgctcgttatcatcgtggccgcgctgtcatttgtgaagctgccatattacatcaccgaacctggcgaagcgaccgagctgaaccctttaattaaagtcgataacggctatcctgaaaaagggagcttttctttaatgacagttaaagtcggtcctgccaatccgcttacatatatatgggcaaaaatgcgcccttaccacgaaattcttccggaagaaaattttaaacaagaaggcgaatctgatcaggaatatatgaagcgccaactgcaaatgatgagagattcccaggaaaatgcgatgatcgccgcttataagcgggccggaaaagaagtcagctacacgtttaacggcgtatatgccatgtcggtcgtcagcggcatgcctgcagaagggaaaatacaagtcggggacaaaattaaaaaagcggacggaaaatcgttccggtcagcggagagcttcgtccgctacatcgagtcaaaaaaagccggggaccgcgtgaaaatcgtagttgaacgggataaagaagaaaaaacatatgagatgaagctgaaaacattcaaagaagatccaaagagagcggggctcggcgtctccctcatcacagaccgcaatgtcaaggtgaagccggaggtcgatatggatattgaaaacatcggcggcccttcggcagggctgatgatgtcaatggagatctataaccagctgacaaaagaagacgagacgaaaggacaccatattgctggaaccggaacgatcgacgacgaaggcaaagtcggtccgatcggcggcatcagccagaaagtcgttgcggcagacaaggcgggagccgacatcttttttgccccgaacgaaggcggaaaaaaaggatcaaactatgaagaagctgtaaaaacggcaaaagatattaaaaccgatatgaaaatcgtccctgtcgacacgatggatgatgcgattcattatttggaagataaagtgaaaaacacctga

SEQ ID NO: 1840 - DNA, 1251 bp, Bacillus licheniformis
atgaaagcggtcggccttgttgtggaatacaatccttttcataacggacatttatatcatataaaggaagcaaaatcagaaacgcggagcgaggtggcggttgccgttatgagcggctcctttttgcagcgcggcgaacccgccatcgtatcaaagtgggcgcgtacgaagatggcgctcgcatcttttgccgatgtcgtcgttgaactcccttacatattcgccgtccaaaaagcggaaacgtttgctgaaggcgccgtctcgattttaaatgaattagggtgttcttctttgtttttcggaagcgagcacggcgatattgaggcatttctcaatacagtcgcacacacgatagagcacgaagacaggctcaacgaagaagccagaaagcagatagcgtttgggctgagctacccgcaagcgatggcaaaagcgttccggtctgtaacaagagaaggcggtaacatcgttgacctttcaaagccgaacaacattctcggattccattatgtgaaagccatcatgcaaaagcaattaagcatgaagcccgaaaccgtcaagcgccggtcctcaggctatcacgattcaacattccctgaagcggaccgaatcgcaagcgctacgagcatacgcaagtcgatttttgaaacgggaagccttgcggacagccgcttctaccttccaaagacaacggtcgatgagctcgatgaatacgcccggactttcggcatgtggcactcgcctgaagattatttcccctttttgaaatacagcctgcatacaatggatacagaagagctgaaagggatatacgaagtggaagaaggccttgagcaccgcgtcaaaaaagcgatccggaaagcaggctcttttaaggaatacatggagcttttgaaaacgaagcgctatacgtggacaagactgcagcgcatgaacacccatatcctcacaaaaacgaagaaagccgacgttaagcgcatgttaaacgaaacacatccggcatatatcagacttctcggaatgacaaaaaaagggcaggcctatttggctgaaaagaaaaaaagcttgagcgcaccccttattacaaagacgggatcgttttcccatccttccctccagcttgacataaaagcgggccaagtatacagcgccccgctcaaagagccggtgcggacgatgctgacagagcaggaatattccctttcgccgatcaggtatgacgaagacagccggatatttttgcgcaaataa

SEQ ID NO: 1841 - DNA, 516 bp, Bacillus licheniformis
atgaaatggacgatacatcagctgaatcaaatgccgaagaaggactttgaatttgatgaaacagttgatttaagcgaactctctcaaagctcggaaatccgcagcatttcaccggtgcgggtgaaagggcgcgcggaaatccgctcaaagcaggctgcatttgattttaccatttcaggcgagatgatcttgccttgctcaagaacgcttgttgatgttcgttatccattcagcatttctacaaaagaactgtttatatttcataagaccgaggaaatggaagatgaagacatccatattgttgaagatgacctcatcgacttgactccggtcgtgaaagaagaaatccttcttgagatccctatgcaaatcttttgtgagtctgttcaaaaagaagaaggtgctccgcaggagggcaaggattggcaggtcattacagaagatgaccggaaagaccggatcgatccgagacttgccggactcgggaagctcttaaaacaagaagatgaatcttaa

SEQ ID NO: 1842 - DNA, 171 bp, Bacillus licheniformis
atggctgtaccttttagaagaacttctaaaacgaaaaaaagacttcgtcgtacacactttaaattgcaagtgcctggtatggtagaatgcccaaactgcggtgagatgaaactttcacaccgcgtctgcaaagcatgtggatcatacaaaggaaaagacgtaaaaagcaac

SEQ ID NO: 1843 - DNA, 600 bp, Bacillus licheniformis
ttgacgattacaagacaggatgcatggacacaggatgaagatatattgctggctgaggtcgtattaaggcacattcgggaaggcgggacacagctttcagcctttgaagaagtgggcaaggctttaagcagaaccgcggccgcctgcggattccgctggaattcatttgtcagaaagcaataccaatcaggcattgaactggcaaagaagcagcgcaaagagctgcgcaaaaaaatcggcatccattccgcaaaccttcctggatctgtcaaaacggtttctgagagcaaggcggaaaacctgacgctcgatgatgtcatagagtacttggaaaagctgaaagaagccccggttcaaaaggactttatcgacgagaagaaaaagcttgctgaagaaatcaatgagctgaaacaagaagttgaaaagctgcgaagcgaaaatcaatcgctgaaaaaaaagcttgaattgacagaagaggattataaagcgctgattgaaatcatggagagagccagaaaaatggtcgttcttcagggagacgaacgaaacaaaaaggcgatgctccagccggagccgaatgaaaatctgggggaagcttga

SEQ ID NO: 1844 - DNA, 480 bp, Bacillus licheniformis
atggtcaaagtcgaacgtttgctgatcaactacaaaacgcttgaagaatttaaaaagttcagggagtacgggattcaagagctttccatgctggaggaccttgaaagcaacatgattgaaaacgacagcaactcaccgttttacggcatctattacggaaatcggctcgtcgcaagaatgagcctgtataaagtggatggtaaatcaaaccaatattttgaagaaggccaagattacctcgagctctggaagcttgaagttttgccggggtatcagcgaaacggctacggaacgatgcttgtggagttcgccaaatctttcggactcccgattcgcacaagtccgcgcgtcaaatcatccgatttttggaacaagatgggctttacaccggttaaatacgatatggcccgggataaaggggaaaatccgctcgtttggcatcctgcgagcgaacctagtcaaagttctgaatcagcataa

SEQ ID NO: 1845 - DNA, 882 bp, Bacillus licheniformis
gtgaaaatcggagtcatcggaggaggctcggtcggcctcctttttgcatactatttttcgttcggccacgaagtgactgtgattgcgcggagaaaggaacaggcggaagcgattgaagaaaagggaatccgccttcttgaagacgggaaagagatgaccgtgaacgccaggggcgtgactgaacttgatccggactgcgaccttctttttgttgccgtaaaggagcatcagctcggagccgttctgtctgagctggagcaggcggctcctcttgacatcatgttcctgcaaaatggaatggcgcatattcccgtgcttgaaaaatggcagacgggccaccgcatctatacgggatctgtggaacacggagctgtcagggtggatgaccgtacattccggcacacgggaaaaggggccgtaaaatggagcgcgttccgaagccaatccgccgcccggctgaaaaaagagctcgcttcggtgcatgaagcgttcccttttatttggtgcgaagactggtataagcccctcgccgaaaaattgattgtcaatgcgtgcatcaatccgctgacggctcttttgcgggtgaaaaacggcgcgctgcttgaggagccgatgtatggggcctatatgaagttcgtctttgaagaagcgagccggattttggaacttgaagatcgccaggcagcgtgggaccatgttctttccgtctgccgccggacgaaaagcaacacgtcctcaatgcttgccgatgtgctggcagaaagaaaaacggaagcggatgcgatcatcggctatctgctgaagcgggcaaaagagtcaggagagcccgccccgcaccttacctttttatatcgcagcatcaaggcgcttgaaaacgaatga

SEQ ID NO: 1846 - DNA, 1617 bp, Bacillus licheniformis
atgcagcttactgaactttccatacaaagtcaaaacccttttgtacgagactatataaatggaaaaaaggagatagagccgttttttgattacggcctaagcaatgaaagttggagtgtccgtttggatgatctttcctcccggacgtatgaccgcgatgcgttagcagactatttgctcgactatcaccgcaaatttcaatcggcaaccatgaatgaaacaatcgaacgccttcgcgatccgaaaagcgtcgtcgttgtcggagggcagcaggccggccttttaacgggtcctctttacactatacataaaatcgtatcgatccttttattagcaaagcaaaaagaacaagagctgaacgttccggtcattccggtattctgggttgcgggggaagaccatgatctggaagaaatcaatcacgtctacatttctgacggcggcaaggtgaaaaagcacaagctcccgcagtcccactggaaaaaaagccaggcggcaaaaacggcgctcgatgccgagaaagctgaaaagtggctggacgggatttttgcttcatttgaagaaacggagtatacgaatgatcttctcggccatttgcgccgatgtttaaggcagtctctttcttttaccgattttttcgaatttcttgttgccgacatgtttgaacaagacggcttgatccttttgaattccggagacccgggcatcagaaaccttgaagcgcgctttttccggcagctgctggacaaaaacgatgagctgaccgactctgtcaaacggcagcaggaattgatgaaacaactgggttacacaccgattatcgaaggggccgcacaacatgcgaacattttttatgagcgcgacggcgagcggtttttaattgaaaaagaaaacggcgcgttttttataaaagagcttcatcttcagtggtctgaagcagagctttgcgatttgatctgccagaacccggaagcgttcagcaataatgtcgtaacccggccgctcatgcaggaatatcttctaccgacattggcgttcatcgccggtcccggagagatcaattattggggcgagctgaaaggcgcttttcaggtcatgggctataaaatgccgcctgtcgtaccgaggcttcaggttacattccttgaacggcacatcgaaaaaaagctggacgaacggggaatcgaactccgcgaatcgattgaaaagggagcgcgggccaaaaaagagcagtattttcaagataaggttccgaacggatttaccgattcggtcaaacaggcgaaagaaaaaatcgaaaacattcattccgcagtgcgcgccgaagccctcgaaatcgacggcagcctcggcccccttttagaaaaaaacgcgggcttcattcaagatcagctccaatttttggagaaaacagtcatcagaaggattgaagaaaaagaaaactatattttgcgtgattttgacaaaattcaaacaagcatcaaacctttagacgctccccaggagagaatttggaacatcgtgtattatttgaacaaatacggtccggatttcttggaaaaatacaaggatttgccatattcatttcaaaacatgcatcaagttgtcaaactttga

SEQ ID NO: 1847 - DNA, 432 bp, Bacillus licheniformis
atgtttatgggtgaataccagcatacgattgattcaaaaggccgcatgatcgttccggcgaaattcagagaaggcctcggcgagcagttcgttctgacgcgcgggcttgatcagtgcctgtttggctacccgatgtccgaatggaaactcatcgaagaaaaactgaaggcccttcctcttacgaagaaagatgcacgcgcttttacccgcttttttttctccggagccaccgaatgcgaattggacaagcagggccggatcaacattgcatcgccgctgttaaattatgcaaagcttgagaaggaatgcgtggtcatcggagtttcaaatcgaattgaattgtggagcaaagagatttgggaacaatacgtagaagagcaggaagattcatttgccgaaatagctgaaaacatgatcggatttgatatataa

SEQ ID NO: 1848 - DNA, 939 bp, Bacillus licheniformis
atgtttgagcatacaacagtattattaaaagaaacagttgatggtttaaatgtaaaagaagacggtacatatgtagactgcacattaggcggtgccggtcacagcgagtatttgctttcacagctgtctgaaaaaggcaaattggtcgcttttgaccaggatgaaaccgcactccgccatgcgaaggaaaaactggcggattatgaaggacaagtcgttttcataaaaagcaattttcggtatttaaaagaccgtctaaacgaaatcggcatcacgaaagtggacggtgttttatttgatttaggcgtctcatctcctcagctggatacacccgaaaggggcttcagctatcatcatgatgcacctcttgatatgcgaatggaccagtcggcgggcctttcggcaaaggaagtcgtcaatgaatggccttatgaggatctcgtgaaaatcttctttaaatacggagaagagaagttcagcaagcaaattgccaggaaaatcgaaaaagcaagagaacaatcgcctattgaaacaacaggccagcttgtcgatatcatcaaagaggcgattcccgcaccggcaagaagaagcggcgggcatccggctaaacggatcttccaggcgattcgaattgcggtaaacgatgagttgagggtatttgaagaagcgcttttgcaggcgattgaggtgctgaagccgggcggaagagtatcggtcatcacattccactcgctggaagaccggatctgcaaatcgacatttaaagacatgtcgtcgcctcctgaactgcctcacggactgcccgtgatccccaaggagtttgaaccgaaattaaaattagtcaacagaaagccgatcacagcttccgaagaggagcttgaacacaataaccgtgcgcgctcagcgaagctgcgcatcgcggaaaaagcacgagagtga

SEQ ID NO: 1849 - DNA, 354 bp, Bacillus licheniformis
atgagcaatttggcttataaagtagaaaaacagcaaagacagacagacagtgcagaacaattcgttatcatccggagaagagcatcgattacgctgggggaaaaggtattgattgtgcttttcgccctggctgtgctcagcgcttcactttttatgatttcaaaggcttttgccgcgtatcagaccaatattgaaattcaaaagctcgaaaagaaggttgaaacggaaagcagcagagttgatgacctcgaaaaagaagccgatatgctgaaagagccggaccgtatcatggacatcgcccggaaaaaaggccttaaattgggtgataaaaaagtgaaagacatacaggaatga

SEQ ID NO: 1850 - DNA, 2136 bp, Bacillus licheniformis
atgccgaaaaaaaataaattcatgaacagaggagcggcaatactcagcatttgttttgccctctttttctttgtcatcgtaggacggtttgcgtttattcaagcgacgggaaaagtgaacggcgaagtgcttgcgcagaaggcgaacgaacagtatgagaaaaagcggacgatcgaagcccaccggggatcgatccttgaccggaacggaaaagtgcttgccgaagatgctacgacatataagcttgtcgcgattatgagcgaaaagatgaagcctcaatacgttaaggacaagcagctgacagctgagaagctcgcgccgatcctcggcatggatgaggggaaagtgctcgatattctaaataaaaaaggagcgtttcaggtcgaattcggatcggcgggacgggatttgacatacgcccaaaaagagaaaatcgaaaagctgaagctgccgggcatcgtgttcacccgcgatacgaagcgctactatccaaacggaatcttcgcctccaacctcatcggctattcgcagatcaacgaaaaaacgggtgaaatgcaaggcatgatgggccttgaaaaaacgctgaacgattatttgaaagaaacggacggatacatgacgtacgataccgacagaacgggctggcgcctgccgaacagcaatgaaaagattaaagcgccaaacaacggagacaacgtgtatttgacgatcgatcaaaaaatccaggcgtttttggaagacagcatgacgaccgttcaaaaagagtacaagccgaaaaagattatggcggcggttgttgatccgaaaacgggcaaagtgcttgcgatggggcaaaggccgagcttcaacccgaacgtgcgcgatgtcacgaactattacaacgaccttgtctcctacagctttgagccgggctcgacgatgaagattttcacattggcggcggccatccaagaaggcgtatataatggaggagaacaatacaagtctggatcatattcggtttctaaaaaagataagccgatcaaagaccataacggtggaaacggctggggcccgatcacttttaatgaaggtgttgaacgctcctcaaacgtcgcgtttgcgatccttgccaacgataaactcggcacggaccggttcaatcaatatttgcggaaattccatttttacgacaaaacggggattgacctgcctggggaagcgaacagcaaaatcaactttgaatatttgcgggataaagtgtcgacggcttttggacagagctctgctgtcacgccgatccagcagcttcaggccgcgacggcgatcgccaataacggaaaaatgatgaagccttatgtgatcgatcatgtcgttgattctgacaaaaacaaaacgatttatcaaaataaaccggaacaagtcggccagccgatctctgccaaaacggcaaaagaagtgcgcgagctgttgggaaaagtcgtcacatctgaaaaaggaacggggcagccgtacaagatcgaaggatttgatgtcgccggaaaaaccggtacggcgcaaattgccggagaagacggcagatatttgaccggccgcgaaaactacgtgttctccttcatgggcatcggcccgaaggacgatccgcagcttctcgtttatgtggccgtgcagcagccgcaattaaaagctacggaaacaggctctgctccggtgtcaaaaattttcaatccggtgatgaaaaacagtcttcactacttaaatatcacaccgaaagagactgaaaaagaagaaaagcaggaagaaaaacagctgaaaatgcctgatttctccggcaaacgagccgaatccgccgcaaaagaggcgcaaggcagcagccttgttcccgttacgatcggcgatggcttggctgtgaaagaacagtacccgaaagcgggcgaagccgtcctgccgaaccaacgggtcttcctgaaaaccgacgggaatatcacactcccagatatgacaggctggtcaaaacgggacgccctccgcttcggcgccatggcaggcattcatatcgaaacgagcggccagggctatgtgaagagtcaaaatgtaaaagcaggcaaagaattaaaagcaaattcagtcgtgaaagtcagattgaaaaacgaatag

SEQ ID NO: 1851 - DNA, 135 bp, Bacillus licheniformis
ttggaaacgcgcaagagaccgttcactccttatttaggcttgtttcattttatgcctcggagcgttttgatagaacggcccgatttttcatctattcaaggcggccgcgtccaaacggaaggctatcgactttga

SEQ ID NO: 1852 - DNA, 1935 bp, Bacillus licheniformis
ttgcgcgtttccaatgtaacggtcagaaaacgtttaatattcgttctgctttttggtgtgatcatctttttgattattgatacaaggctcggatacgttcagttcgttctcggggataaactgacgactttagcaaaagattcttggagccggaaccttccttttgagccggaaaggggcgaaatattggacaggaacggcgtcaagctggcaacaaaccaaagcgcgccatcggttttggttgttccgaagcaagttgaaaatccgatcaaaacgagcagactgctggccagcgttttgaatatgtcggaagaaaaagcgtataaacatgtcacgaaaaaaacgtcgattgaaaggatcaatcccgagggccggaagatttcccacgagaaagcaaaagaagtcagagatctcaatttgaaaggcgtatacatcgcagaagactcgatccgccattatccgttcggcagctatctgtcccatgtgctcggatttgcgggcattgacaaccagggtctgctcggccttgaagccttttatgacaaagagctgaagggcgaaaagggctatgtgaaattttattccgatgcaaaaggcaagagaatgcctggggaggcggatgactataccccgccgaaagacgggcttgatatgaagctgacgatcgattcaaaggtgcagacgatcatggagcgggaatttgatatcgcagaagcgaagtataatccggacggtatggtcggtgttgcgatgaatccgaaaaacggggagatattggcgatggtcagccggccggactttgatcccgcaaactaccaatcaatcgatcccaaagtctataaccggaacctgcctgtatggagcacatatgagccgggttctacttttaaaatcatcacgcttgccgcagctttggaggaaaacaaagtcaacctccaaaaagatcaattctatgataaaggttccgttgaagtggacggcgcgaggctgaagtgctggaagcgcggcggacacggcgcacaatcgtttcttgaagtcgtccaaaattcgtgcaacccgggatttgttgagcttggtcagcggctcggcaaagaaaaactgttcacctacattaaaagtttcggcttcggacaaaaaaccgggatcgatctgcaaggcgaaggaacaggcatcctattccctcttgaccgcgtcggccccgtagagcaggcgacaacagctttcgggcagggggtatcggtgacgccgatccagcaggtcacggccgtttctgcggctgttaacggcggaacgctgtatacgccgtatattgccaaagagtggattgatcccgtgacaaaacaaacagtgaaaaaacagacgccgatcgccaaaagaaaagtgatttctgaagagacatccaaacagatccgctacgcgctggagagcgttgtcgcccaggggacggggcggaacgcttttgtcgacggctaccgggtcggcggcaaaaccggtacggcgcaaaaagtaaaagacgggaaatatttgaaaaacaaccacatcgtctcatttatcggaacggctccttcagatgatccgagcattgtcgtctacgtcgccgtcgacaacccgaaaggaacgattcaattcgggggtacggttgcagcgccgatcgtcggaaacatcatgagagacagtcttccgcagctcggcgttaagaagcggaaagatcagatcgaacgcgaatatcaatggctggacaaaaagctgatcgaggtcccgaaccttatagggctttccgtgacagagcttgaaccattgctgatcaacctcaggctgaaggcttccggagaaggcgatgtcgtcgttcagcagtcccctaagccgggcgaaaaagtaaaagaaggatcgacgattcgcatttatcttgacagcgatgacggagcctctgattaa

SEQ ID NO: 1853 - DNA, 141 bp, Bacillus licheniformis
atgtccggggccgttcctcctaaaaaatatatcgattttaaaggattagctggatgtatcctcttttttacgctaaaatatgaactgtatgtctgcacgaagctcgtgcggcgaatcaatatgacaacgaatgaagaatga

SEQ ID NO: 1854 - DNA, 1467 bp, Bacillus licheniformis
atgaaattgacaaagcttcttacatatttaaaaaatgcaccttcctatgccggccaagaagaccctgatataacttcaattgagatggactccagggaagtcaagacagggagtctttttgtttgtataaaaggctatacagtcgacgggcatgactacgcccgccaagccgctgaaaaaggggccgccgccattgtggcggaaagggaagtggacgccgatgtgccggtgattatcatccgtcatacgaagagagcgcttgccgtgctgtcggacgctttttacggccagccgacaaagcagctgaggctgatcggaattacaggcacgaacggcaagacatcgacttctcacatggtggaggagatctttagaaaagccgggagccgtacaggactgatcggcacgatgtacacgaaaatccacgacgaaacgttcgaggcgaaaaatacgacgccggaaagcgtcacacttcaaaaaacgtttagaaaaatggttgatcagggtgtggatacagccgtcatggaagtatcttcacacgctctccacatgggccgggtgcacgggtgtgattacgatatcgccgcatttacaaacctgacccaggaccacctcgactaccacgagacaatggaagaatataaacatgcgaaaagtctgcttttctcgcagctcggcggatcctttaaccacgaaacaccgaagtgggccgtgctgaatgcggatgaccctgcttcagcctatttcgcccaagtgacgtcagcacatcttttgacatacggaattcaaaacgatgccgatgtcatggctgaaaatatcaaaatggctccgaaagggacaacctttgacctggtgacgccaaaaggttctgcacaagtgacgattccgcttgtcggcctgtttaacgtctacaatgttttaacggctgccgcgatcgcgattgcagcggatatcccgtttgccacgattacagaaggaattgaagggctgaaaggggtcagaggaagatttgagcttgtggacgcaggccaggacttcccggtgatcgtcgattatgcccatacccctgacagcctcgaaaatgtcttgaatacgtgcagaggcttaacggaaggaaagctgtttgtcgtcgtcggctgcggtggagaccgcgataagacgaagcgtccgaaaatggcgaagatcgccgttgaccttgctgatgaacccgtctttacagccgataacccgagaagcgaaaacccgctcgccattttaaacgatatggaggaaggcgtaaaaggagcttactatcacagcatcgtcaaccgcgagcaagcgatcttttttgcaattgcaaacgccaaaaaaggcgatgtcgtcctgattgcaggcaaaggccatgaaacttaccagcagatcggcggtcaaacctttgattttgatgacgctgaggtggccaaaagagccattcttgagctgaaataa

SEQ ID NO: 1855 - DNA, 975 bp, Bacillus licheniformis
atgctcgaacaagtaattttatttaccattatcatgggctttttaatcagcgttcttttatctccgattttcattccgtttttaagaaggctgaaattcgggcagagcatccgtgaggaaggtccgaaatcccatcagaaaaaatcgggaacgccgacgatgggcggcgtcatgatcatattgtcgattatcgcgacgaccattgttatgacgatgaaattttccgaagtcagcatgaacatgatcctcctcttgtttgttacggttggatacggtctgctcggctttctggatgattatattaaagtcgtgatgaagcgcaaccttggactcacatccaaacaaaaactgatcggtcagatcgtgattgctctcgtattctatgccgtctaccacttccaaggaatgccgactgacatccgcattccgggaacagagctgtcgtttgacttcggctggatttatccagtgctcgtcatctttatgcttgtcggcggttcaaatgccgtcaacctgactgacgggcttgacggtctgttgtcgggtacagctgccatcgcgttcggtgcgtttgcgattttggcgtggaaccagtcgcaatacgatgtcgcaattttcgcggttgccgttgtcggagcggtgttaggatttcttgtgtttaacgcgcaccccgcgaaagtctttatgggagatacagggtcgcttgccctcggcggcgcgattgtgacgatcgcgattttaacgaaactggaaatcctgcttgttatcatcggcggtgtattcgtcattgaaacgctgtccgtcattttgcaggtcatttcatttaaaacgaccggcaaacgaattttcaaaatgagccctcttcaccatcactacgagcttgtcggatggtctgagtggagagttgtcgtcactttttggacagcggggcttctgcttgccgtcttaggaatttacatcgaggtgtggttataa

SEQ ID NO: 1856 - DNA, 1356 bp, Bacillus licheniformis
gtggatactcaagatttattgcaaaatcaaaatgtgctcgtactggggctggcgaaaagcggatatgctgccgcttcgatccttcatgagaaaggcgtaaaggttgtcgtgaatgaccagctgccttttgaggaaaatgaacctgcgcggattctcgcggaaaaaggggtggaagtcgtctgcggctctcatccgacggaactgtttgatcttcattcgatcgacattctgattaaaaatccgggcatccgctatgaaaacgtgatggtcgaagaagcgctgaagcggggtatcccggtctggacggaggttgaactcgcctatcatctgacagatgctccgttcatcggcattaccggttcaaacggaaagacgacaacgacaacgcttgtttatgaaatgctgaaggccgattcgaaaaaagcgctcgttgctgggaatatcggtacggcggcaagcgaagtggccaatcaggccagcggagacgaatggatcgtgacagagctgtcgagttttcagctcatggggacttatcaattcagaccgaagattggattattattaaacgtatttgatgcccatctcgattatcaccattcgcgcaaaaattatgagcttgccaaacagcaggtctatcgaaatcaatcggaaacagacgttgccgttgtcaatttggacgatgagacagtcgtccggctcgcggagtgttcaaaagcggagaaggtgtatttttcggtccgccggacacttgagcgcggagcgtgcgtgaaagacggcgcaatcatgtttaacggcgaaccggtcatgccgctggaagacgtcgttttgccgggagagcacaatttggagaacattttggccgccctttgcatcgttaaaacagcaggcgtttccgacgcggccgtccgtaaggtgctgacgagctttacaggtgttaagcacaggatgcaatacgtcgcgacgatcaaaaacagactgttttacaatgacagcaaagcgacaaacattcttgcgacgaaaaaagcgctgtccgcctttcaaaagccggtcattttgctggcaggggggcttgaccgcggaaatgaatttgatgaactaaagccgcatatgtcttttgtaaaagcggtgatcactttcggcgagaccgcgccgaagtttgagaagctggccgaagaaatgggaatacaacaggttaaacgtgtcgataatgttgaacaagcagcaactgcggcgttcagcctgtcagacgaaggagatgtcattcttctgtccccggcctgcgcaagctgggatcagtacaaaacatttgaagaacgtggtgacatgtttgtaaacgccgtgcatatgcttaaataa

SEQ ID NO: 1857 - DNA, 1101 bp, Bacillus licheniformis
ttgcaaacaaaaaaaacgtcaccggattttttgctggttatcattacgctattgcttttaacaatcggactgattatggtatacagcgccagtgcagtatgggcgacttacaaatacgacgactcctttttctttgcgaaacggcagcttttgtttgccggcatcggggtcatcgccatgtttttcatcatgaacgtcgactactggacgtggaggacttatgcgaaaatactgatcattgtatgtttctttctgctcatcattgtcctggttcccgggatcggcatggaacggaacgggtcgaggagctggatcggagtcggcgctttcagcattcagccgtccgagtttatgaaactcgcgatgatcgcatttttggccaagtttttatctgaaaagcaaaagaatattacgtcgtttagaaaaggctttgtgccggcgctgggcattgtcttttcagcttttctgatcatcatgatgcagcctgacctcggaacaggaaccgtgatggtcggcacatgcatcattatgatctttgtcgcgggggcgagaatttcgcacttcgtttttctcggcctgatcggactgagcggttttgtcggccttgtgctgtcggcgccgtaccggatcaaaaggatcacttcatacttgaacccttgggaggaccctttaggaagcggctttcaaatcattcagtctctttatgcggtggggcccggcgggctgttcggcctcggcctcggccagagcaggcaaaagtttttctatctgcctgagccgcagacagattttatttttgcgattttatcagaggagctcggctttatcggcggatcgctgattcttttgctcttcagcgttctattatggagaggcatcagaatcgcgctcggtgcgcccgatttatacggcagttttgtcgccgtcggcgtcatttcgatgatagcgattcaggttatgatcaatatcggagtcgtgactggcttgattcctgttacaggcattacgcttccgtttttaagctatggcggttcatcactgaccttgatgctcatggcggtcggcgtgctgctgaatgtcagcaggtattctagatactag

SEQ ID NO: 1858 - DNA, 1101 bp, Bacillus licheniformis
atgcggattgttgttagcggaggcggaacgggcggccatatttaccccgcccttgcgtttattaaggaagtgaaacggcatcacgaagatgttgagtttttatatatcggaaccgaaaaaggcctggagaaaaatatcgtcgagcgggaagggatccctttcaaagcgattgaaattacgggttttaaaagaaaactttcatttgaaaacgtcaaaaccgtcatgcgctttttaaagggtgtaaaagaatgcaaagaagaattaaaacggttcaagccggatgccgtgatcggcacgggcggctacgtgtgcggccccgtcgtatacgccgcttcaaaactggggattccgacgattatccacgaacaaaacagccttcccggactcaccaataagtttttatccaaatatgttgataaggtagcgatttgttttgatgaagcgaaaacacattttcctgcagaaaaagttgtttttacaggaaacccgagggcgtctgaagtcgtctctataaaagggggccgttccctgaccgctttgggtcttgcagagggcaaaaaaacggtccttattttcggaggcagccgcggtgccgctccgatcaatgaagcggtcattgcgatgcaaaacgaattaaaaaagcgggattaccaggttctttatgtcacaggggaagttcactatgataaagtcacagctgcgcttgaaaaagaaggcgccgctccgaatatggtcgtccagccgtttctccatcaaatgcccgagtacttaaaagcgttcgatgtcgtcgtgggccgcgcaggggcaacgacaatagcggaaatcaccgcgctcggcattccaagcgttctgattccgagtccgtatgttacggccaaccaccaggaagtaaacgcacgctcactcggggagcagaacgccgctgtcgttttaaaagaatcagagcttaatggagaccgcttaattcaggcgatcgatcatattttacaagacgaaaagacgttggaagagatgaagatccgcgcgaaatcgcttggcgtgccggacgctgcggaacgcttgtacaatgtgctgaaagaattgaaacatcatgcaaaatga

SEQ ID NO: 1859 - DNA, 912 bp, Bacillus licheniformis
atggataaggtgatacaagaattaaaagaacttgaagtcggcaaagttctggaaaacgagccgctcagcaaccatacaacgattaaaatcggaggaccggctgacgtgctggtgattccgaaagacattcaagctgtcaaagatacgatgaaggttgtcaagaagcacggcgtcaagtggacggccatcggcagaggctcgaatcttctcgttctcgatgaagggataagaggcgtcgtcatcaagctcggccagggactcgaccatatggaaatcgacggcgagcaagtgacggtcggcggcggctactctgtcgtaaggcttgcgacaggcatcagcaaaaaagggctttccggccttgaatttgccgcaggcattcctggttcggtcggcggagcggtttacatgaatgccggcgcccacggctcagatatcagcaaagtattggtgaaagcattgatcctttttgaagacggaacgatcgaatggctgacgaatgaagagatggcgttcagctaccgcacatccatccttcaaaacaagcggccgggcatttgtcttgaagccgttctccaattggagcaaaaagaacgcgatcagatcgtcgcgcagatgcagaaaaacaaagactaccgaaaagaaacgcagcctgtgtccaacccttgcgcaggcagcatcttcagaaacccgctgcctgaacatgcgggccggctagttgaagaggctggtttgaaaggccatcagatcggcggggcaaaggtttcggagatgcacggcaatttcattgtcaacgcaggcggcgcaacagcgaaagacgtccttgatttgattgcattcattcagaaaacgattaaggaaaaatacgatatcgacatgcacactgaggtcgaaattatcggagaaaaacggtaa

SEQ ID NO: 1860 - DNA, 789 bp, Bacillus licheniformis
gtgaaacccggtattgataaagaaaaagtagtgaatatagaagaacgtattcccaaaattaaagaacagcgaaagcaaaaggcaaaccgccggctgatcacctttattctgctctttttcacgatgatgctgatcatcatttacctgcagacgccgatcagcaaagtctcgaaggtagagatcaaaggaaacaaaaacgtttcaaaggaacagatcatttccctttcttcaatccataaaggacagacggaattttggagtctgagcaagcaaaaagccgcagaaaagatcgagcagaataaactgatcaaaaaagccgaaatttctaaacaactgaccaacaaaatcgccatctccatcgaagagtataaaagcattgcgtttttgcaaaaacataatgtgtactactccgtgcttgaaaacggcacggtgcttcctgaagaggtgacgccgactgacatcggaccaacccttaataactgggaggaagacgaaaagctcgttcaaatggcaaaacagctgaacaagctttccgattccgtgaaaaaatcgatttccgagatcaactatacgcctcaaaaatcaaacccttggctgatcaaactgtatatgaacgacggctatatcgtgacagcttcgctgaaaacgttcggacagaaaatgaacagctatccggcgatcgtaaaagagctgccgaaaggggaaaaaggcattatccatatggaagtcgcgacttattttgaacctctgaaaaaaacggatgaaagcaaaaagggagacggaaattga

SEQ ID NO: 1861 - DNA, 693 bp, Bacillus licheniformis
ttgaagaggcacacagtcaatctttcactcgccatgcttgtcctcggcttcctgctgtctttctcctatcaattcgccagggaaaacaaagaccatgaagaaactgctgaaaattggaaagaggaatattccctgcgcgaccggctgatttcccaagaaaagcaaaataagaagctggaacaggagctttacaaaaaacagcaggaagtacagaaaacagagacggctttgaaaaaggaaaaaaaagagtactacaatattgtggaagatgttgagaggtacagaatgttcgtcggggaaatcggcgttcagggcgaagggatcaaagtgacgctgaaagacgcttcgtacatcccagagggtgagaatgtcaacaactatatcgtccatgaaagccacattttccgcctgctcaatgagctgtggatttccggggcggccgcggtgtcgatcaacggacagcgcgtgacacatcattcctacatatcgtgcaacggccctgtcatcacggttgacggcaaccagtatccggcgccgtttgttatttcggccatcggggatgcggatgtgctgatgccggcgctgaacattgcaggagggcttgtggaccagctgagccgcgatcatatttcagtcagcatcgaaaaacaagataatatcgagatggagccccttttgaagcaaggggaatga

SEQ ID NO: 1862 - DNA, 726 bp, Bacillus licheniformis
ttgaagaaaaataatcgtttcatcagtttgagcatcttgatgctcattttcggcattatgctgtccgtgcagttcaattcgctgaaggcgccgaaggtccgcgatacgcgggacatttgggacctcagggaggacttgaaggaagaacagaaaaaacagcttgatctgatcagcgaaattgacaagtatgaaaaaatgctgaacacatacagtcatcaagaagaaacctcgcggacaaaagcgttgaatgaaacgcttcaaaacttaaaaaaacaggccggcttcacagatgtcacagggaacggaatcatcatcaccatttctcagctcttctcggaagaattgacaggggaatcgattcaaaatccccctcccgaccttctgaaaaagctgattaatgaactgaatatgtatgaagcggaagaaatatccatcaacgacagaagggttgtcaacacgacggtgatccgcgatatcaacggaacaaccaaaatagacggttatcctttggacaactatccgataacggtaaaagtcatcggcaaaaacgccgataaactatatagccgaatgaatgcttcatccctgcaggatctgttcgcgggagaaaatctggatttgcaaatcaaaaggcctgaaaaacaaatcaaaatcaaagcttacgaaggttcaatgcaagttgcgccattgaaaccgctcgaaaaatcaaaaggagagaattcctaa

SEQ ID NO: 1863 - DNA, 354 bp, Bacillus licheniformis
atgtggcttccggttttagggcttttgctcggaattacaatcgggttcagcacgaatttcaccattccggatgagtactcaaattatttgtccctggcgattctggcatcgctcgatacgttgatcgggggaataagggcccatttggaaagtgtatacgatgaactagtttttgtgacaggctttttcttcaatattattcttgccataagtttggcttttctgggcgttcatcttggtgtagacttgtatttagtcggtatgtttgcatttggcgtgaggctttttcaaaacatcgcggtcatcagaagaatactgctcgccaaatggacggcatcgaggagaaaaaattaa

SEQ ID NO: 1864 - DNA, 1299 bp, Bacillus licheniformis
atgaacaacaatgaactttacgtcagtctagacatcggtacgtccaatattaaagtgatcgtcggtgaaatgtcagacgattctcttaacattatcggagtcggaaatgttccctcagaggggctgaaaaaaggatcaatcgttgatatagatgaaacggttcattctataaaaaaagcgtttgaacaagcagaaagaatgataggttttccgctgacccacgcgatcgtcggggttaatgggaactacatccatattcaagatacgaacggtgttgtggctgtctcaagcgagaataaagaaatccacgttgaagacgtgcgccgggtgatggaggccgctcaagtcgtttccatcccgcctgaacagctgatcgtcgatgtgattccgagacagtttatcgttgacggaagaggcgatattacagatccgaaaaagatgctcggcgtccgccttgaagtggaaggatcgctgatcacgggctctaaaacgattttacataacctgctccgctgtgtggaaagagcgggaattgaaataacggatatttgccttcagccgctggctgccggatctgtcgctttatcaaaggacgaaaaaaacctcggagtggctttaatcgacatcgggggaggatcaacaacggttgccgtatttgaggacggccaccttcttgcgacccgtgtcataccactgggaggagaaaacatcaccaaggatatttcaatcggattgcgcacctccacggacgaagctgagcgggtgaaaaagcagtttggacatgctttctacgaagaagcgtcggaagaggaaacatttgaagtcgccgtgatcgggacggaccaaaagcagacctttactcagcgggaagtggcagacattatagaagccaggcttgaagaaatctttttattcgtggcagaggaactgcggaacatgggaataaaagaattgccgggaggctttgtgcttacagggggacaggctggaatgccgggggtcctcagcctcgcacaggatgttcttcaaaataacgtcagagtggctagcccgaattatatcggtgtaagagaacctcaatacatgacaggagtcggcctcatccaattcgcttaccgcaacgcaaaaatccaaggtagaaaagtagggtttaagatgccgaaacaagcggttcaggaagtcgcggcaactcatcaaaaagaagtgcagcagcgaccgaagccaaaatccaagcggcaggctcaagctgagaaaaagccgagcaaaatgaagaaaatatttaacttcttttgggaatag

SEQ ID NO: 1865 - DNA, 1134 bp, Bacillus licheniformis
atgttagagtttgaaacaaatatagacggcttagcatcgattaaagtaataggagtaggtggcggcggtaacaatgccgtcaatcggatgatcgaaaatgacgttcagggagtcgagtttatcgcagtcaacacggatgctcaggctctcaacctgtcaaaagcggaaacgaaaatgcagatcggtgcgaagctgacgcgcgggctcggcgccggagccaatccggaagtcggcaaaaaagccgcagaggaaagcaaagaacaaattgaagaagcgctgaaaggtgcagatatggtgttcgtcacagccggaatgggcggcggaacaggaacgggcgcggcacctgtcatcgcacaaatcgcaaaagatctgggcgcattgactgtcggcgttgtcacaaggccgtttacctttgaaggaagaaaaagacagcttcaggctgcaggcggtatttcagcaatgaaggaagccgtcgacaccctgatcgtcattccgaatgaccgtcttcttgaaatcgtcgataaaaacacaccgatgcttgaagcgttccgtgaagcggacaacgttctccgccaaggtgttcagggcatttcagacctgatcgcaacgcctggactgatcaaccttgactttgccgatgtcaaaacgatcatgtccaacaaaggttctgcactgatgggtatcggtgtagcgacaggcgaaaaccgcgctgcggaagccgctaaaaaagctgtttccagcccgctgcttgaaacggcgattgacggcgcccaaggcgtgctgatgaacattacaggcggcaccaacttaagcctatacgaagttcaggaagcggcggacatcgttgcagctgcatctgaccaggacgtcaacatgatctttggatctgtcatcaatgaaaacttaaaagacgagatcgtcgttacggtgatcgcgactggatttatcgaacaggatcaagattcatcaaagccgcagagacctttaaaccaaggcttaaaacagcatcatcagcctgctccgaaacgggagccgaagcgcgaggagccaagcatgccgcatcgcagcccatcacagcctgccgaggatacgcttgacatcccgactttcttaagaaaccgcaataaacgctaa

SEQ ID NO: 1866 - DNA, 195 bp, Bacillus licheniformis
atgacaagaaaaaaggaaaatctgtacattcgggagaaaagagagagattagatgcaaggcttttgagggagccgcttccatcaagaagacaattgatgcttttggaggggaaggaacatcggctgctgttccagcgcgcaaaaaaagccgccgacttcttgtcggcagctttccaatgtattgtagacgtttag

SEQ ID NO: 1867 - DNA, 1510 bp, Bacillus licheniformis
gtgaagaaaaagccattattccgcacgttcatgtgcgctgcactcatcggttcacttctcgctccggttgctgtgcaggctgatacaggcacggcagcgaagacaaaggaacaaagcaaaatatctagcgctctttataaacgttttgagaaagaaggtaaagtgacctttttaattaaaatgaaaagccaggcgaaccttcagcaagcggcaaccgcggctgaaaaacgggcgaaagcaagtgttatgaccgtgaaaaaagcaaaagagatcaaacgctcggcagtgctgacttccctgcgtacaaaagctgaaagaacacaaaaagatttgaaatcgtttttggaaaaagaagagaaaaaaggaacagctaagaaagtggaatctttctatattgtaaacggcatcgccgtgacggcgacaaaagatgttatggaaaaagcggcttcatttcctgaggttgaaaaggtgctgcccaatcaaaaaatcaagctgggcaataccgaaaaacctacagtagaatcgaaaacaaccgcggatccgcacccctgcttccaacattgagcaggttcatgcgccggatgtctggaaaaagcgctataaaggcaaaggagccgtcgtcgcttcaattgacaccggcgtagagtgggatcatccggcgttgaaaacaaagtacagaggctacaacccttctaaaccgaacagtccagacaatgagttcaactggtttgatgcggtaagcaataagaaaacgccatatgatgacttgggccacggcacacatgtgacaggcacgatggtcggctcagaagccggcggcaaaaaccagatcggtgtcgcgccgacggcgaaatggatcgctgtcaaggccttttcagaggacggcggagatgaaaaatcccttttggctgcaggagaatggattttggccccgaaagatgcgaaaggaaaagcgcaccctgaaaaggctcccgatgtcgtcaacaactcttgggcaggggaacgcggactcgatgaatggtatttggatattgtcaaagcttggcgggcagctgatatcttccctgcatttgcagcgggcaatgtcagcgaattcgaaccgggcggaccgggttcagttgaaaacccgtccaactatccgcaatctttcgcgattggcgcagttgacagctcaaacgcgttagccgacttttcattgcaagggccttcgccatatgacgaaatcaagcccgatatttctgcacctggcgtcagcatccgctctgcttatccgggacataagtatgctgcaatgaacgggacatcgatggcgaccccgcatgtatccggcatcgtcgccttaatgagggaagccaatccggacctcacagtcgatgaaatcgagcgcatcctgctgaaaacggcgacgcctctgactgacaaaacgtttaaaaaatccccgaacaacggctacggatacggcttggtcaacgctttaaaagcttttgacgcagcaaaaaaaactaaatga

SEQ ID NO: 1868 - DNA, 4299 bp, Bacillus licheniformis
ttgaaaagaaagctgagaaaaaaggcgttttccaccattttaagcggtttgttaatcggctcgctgttcatgcccgccgtttcagatgccgcggcaaagcccgcacttacttccatgaaagaacaagcagccgcagggaaggggaaaatttcaaaaactcttgtcaaacagttcaaaaaagaagatcaagtcacatttttgattaaactgaaagatcaagtcgatacaccaaaagtggccaaacaggcggaaaagaacgcgaagaaaaagtcgctgagcgctgctaaaacagaatatcaaaaacgctcggctgttgtttccgctttaagagtcaaagcggatgagtcgcaaagcgatctgaaacgttatttgaaaaagcaggaaaaacaggggaacgtaaaaaaaatcagatcctattatattgtcaacggcatggcagtccatgcgacgaaagaggtcatggaacaagtagcggcttttccggaagtagaaaaagtgcttccgaacgaaaaaaggcagctgatcaaaccgactaaacagtctgtgaaaaaatcagcagccaaggatgaaaaagaaatcgaatggaatatcaatcgagtcgacgcaccaaaagcctggaaattgggatatgacggatcgggcacggttgtcgcgtcgattgatacgggcgtgcagtgggatcatccggccttgaaagaaaaataccgcggatatgacccgaagcatcccgatcagcctaaccacgaattcagttggtatgatgcggtttcaggcgcttctgaaccatttgacgatctggagcacggcacgcatgtaaccgggacgatggtcggctcagagcctgacggccaaaaccaaatcggcgtggcgccgggtgcgaagtggattgctgtgaaagctttttcagatgacggcggaacggacgaagaccttattgcagcaggtgaatggattttggcgccaaaagataaagacggcaacccgcaccctgaaatggcgccggatgtcgtcaataactcatggtcagggggagccgggattgatgagttttacagggatatcgtaaaagcgtggcgagctgccggcatctttcctgagttctctgcggggaacgtcgatttcgccaatccgggaggacctgcttcgattgccaatccggcaaactaccctgaagcgttcgcaaccggagcgacagacatcgataatcgcttagccgatttttcacttcaaggtccttccccgtatgatgagactaagcctgaaatatcggcgcctggtgtcaacattcgctcatctgtgcctggaagcggctatcaagacggctgggacggcacttcaatggctggcccgcatgtcgcagccgccgccgctcttatcaagcaagccgattcgtcgatcactgttgatgagaccgaaaagattttgatggaaactgcaacaccgctcacagacagcaaatttaccgaatcgccgaacaacggatacggccacggactcgtgaacgtgtttgacgcagtgtccgctgtgacaggcgggttgggcagagcggaaggacaagtcggaaaagaaggcgaagacaaaagtccgccggccttaaaccatcaagagatcaccgaaatttactcaggctcgaaaacgcctcttaaagttgatgtagaagacgatgtcagcatcatatcggtcaaattgagctataaaacagatgacgccgattgggagacgatcgctgccaaacaaacttccggcgactataaaaaaggaacgtacgaggtggctgtaactgtttctgaagggaaaaccctttcctacaagtggattgtcaccgatttcggaggcaacaaaacggaatccaaagtgtacgaagtcccgatttccccggctgtgacaacagggtataaacaagatttcgagaattccgccagcggctggctcacatcaggcgtgaagaattcatgggagcgcggaattcctcagtcaggcccgaacgccgcagcatcgggaaaaaacgtattcgcaacaaatctgacagggccgtatgaaagttcggctaatatgaatcttctcatgcctcctgtcagcgttccaaaaaatcaaaagctttatctcacatacaaatattggcacgatattgaagaggactttgattacggcttcgtttacgtacagcctgaaggaaaaggtgaatggatcccggctgccgagtacagcggcaagacatcagaatggaaagacggacagatcgatttgtcggaatacgggggacagacgattaaggtcatgttcaaccttcaatctgacgacagcattgaaggtgacgggctgtacatcgatgatgtagcgcttgtcaaggaagtgaagagcgccggtacgaaaaaacgattgggcgttgaaaaacagccggccaaaatgaaggataagaaaacaaagaaacgaatgattgatccgaaaaaagcaaaaccggcagaagcccttcaggaaaaaaccgaaacgaaaaaagcagctcctgcggttcttccggtgcgcgctcaggtcagcgtgctggaaacgggcaaatcgacatattccaaccaggcaacaggcgcatacagcttggctcatgcacctggaacctatacgctgaaagcggaagcgtacggatatgaatcaaacgcccaaaccgtaaaaatcgagtccgacaagacaacaacggcagactttgttttaaaagaactaaaaaaagggacgctcaccggaacgataaaaaataaaaaaacgggcgaacccgtccggcatgcaaagttgtatatcgttgaagatgcagctgtaaaaccagtccagacggatgatgacggaagctattcattaacggcctatgaaggctcgtatacggtaaaggtctctgcaaacggatattacagcagcgagttttccgttgatttaaaaggcgatgtctcgaaagatatcgatctcgatcctttcatcggctatccgggggaaataggctatgatgacggaaccggggaaaacgcctgggctttctatgaatccggcaacgggctggccgttaaaatgacgcttgaaaacgggcaggaaaaagccatgctgaaaggcggtttgtttaaattctgggatacagaattccctgatccgggcggcactgattttgcagtagaggtctatgatgcttcgggtgaaaaaggctctccgggcaaaaaaatcgccggcccgttcaaggctgaagcgctccgcacaggcgaatggacgaccgttgatttaggtgacgaaggcatcatcgtcggaaaagacttttacctcgtatacgtccagaaagaggatctggccaactcacctggacttgctacagacgaagacggagaatattccggccgcaactggcagtatacggacggctcatggtcaaaagcgccatcagaccaaggcaactttatgatccgcgctttggtcgactatgaattgtcggtgcctgtgattacgtttcctaaagacggattcatcaccaaccaaaagaacgctgtcattgaagggacatcctcgccgaatacgaccgttcatctctttaacggggatgaagaagccggaacagcggaaacggcggcagacggcactttctcaaaagaaataccgttgaataaaggggaaaatgtcatcaccgcgaaatcgtcatcggcttccggaacgactgatgcttcagaaccggtccggatcgtccttgaccagaaaaagccgaagcttacaatcgacacgccggaaagcggctcaaaactcaataaagagaccgtcaccgtgaaaggaacagtatcagacgatcacttagaatctgttcatgtaaacggcaaaaaagcagctgttgacaatggcgaatattctgcaaggattatgcttgacaacggcaaaaatgaaatcaaagtaacggcatcggatgcggcaggcaacaaaacgaccaaaaaggtcacggtagatgtcaactttgaagcgccgcaaatcaccggcttgaaaccgaccgaagatctcgagctcaaaacgggagaaaccgtgaaaatcgagtttgaaagcgccgctgatttggatgctgtctttttgatcagaatgccgctgaccaatttcaaaaccgctgcccaaaacgtaacggagctgccgatcagagaagtctcaaaaggaaaatatgaaggatattggaccgctacttcaactgcaaaagcaaaaggagcggaaatcgaggtcatcgtcagagatgattacggcaatgaaacgagacaaacggcaaaaggcaagctgtatatcaatgaaaagctgaaataa

SEQ ID NO: 1869 - DNA, 930 bp, Bacillus licheniformis
gtggaaatctatttagatgcgatatggctgttaaacttttgttttgacttgctgcttttaatgatgaccgcatttattttaaagcgaagggttaaaaagcggaggctgatcctaggggcatttgtcgcgtcaagcatcgttctgtttatgtttacacctttttcaccgtacgtccttcatcctgccggcaaactgtcgttttcggttgtgatcgttcttgtggcatttggttttaagcggttccggttttttttgcagaatttgttttctttttattttgccacttttttaatgggaggagggattatcggagcgcattctttgcttgaaacggattcgatcatggaaaacggcgtctttatgacgaattggtccggttttggagaccccgtcagctggctgtttgtctgtgtgggttttgcggctgtatggctgttttcaaaaaagcgttttgaagatgctgaagcgaagaaaattcaatacgaagaacgcgtccgcctagaggcctgcattggtgaacatacgcttcatttcaccggattgattgactccggaaaccagctctacgatccaatcacaaaaacgcccgtcatgatcgtcaatattgaaaaattgaaagttgtattgggagaagaggcaagtgtgaccatcaaggaaatgagcccgcttgatgccgtcgggaaactggatgaagcactgccgtatatcgggcggatccgcctgattccgtactgcggggtcggccatcagcatcagtttctgctctgcttaaagccggatcatgtgctcgtttgtacggaaagagaagtgattgaagcgccgaaatgcctgattggcatcagcacatcaccgctttccgctgacggcgaatttgacgccatcgtccatccgaaaatgctggccggaaacccggtcaaacacgtttcttaa

SEQ ID NO: 1870 - DNA, 720 bp, Bacillus licheniformis
atgaaaaaactaaaattaaggttaacctatctatggtacaaacttttaatgaaactggggctgaaaagcgacgaaatttattatatcggcggaagcgaggcgcttcccccgccattgtcaaaagatgaagagcaggtgcttctccataagctgcctgacggtgatcaggcggcacgagcgattttgattgaacgaaatctcagactggtcgtgtacatcgcgagaaaatttgaaaatacaggcatcaatatcgaggatttaatctccatcggcacgatcgggctcatcaaagcggtgaatacgtttaatcccgagaaaaaaatcaaactggctacatatgcttccagatgcattgaaaatgaaattttgatgtatttaagaagaaacaataaaatccgttcagaggtatcattcgacgaaccgctgaacatcgattgggacggaaatgagctgcttctctcagatgtgctcggaacagaaaacgacattattacaaaagacatcgaagcaaacgttgacaagaagctgctgaaaaaagcgcttgaacagctcaatgacagagaaaaacagatcatggagctccgtttcgggcttgtcggaggggaagaaaaaacacaaaaagacgttgccgatatgctcgggatctcccagtcatatatttcccgacttgaaaaaagaattattaaaaggctccgaaaagaattcaacaagatggtttaa

SEQ ID NO: 1871 - DNA, 780 bp, Bacillus licheniformis
gtgtcgaggaataaagttgaaatctgcggggttgatacatcaaaactgcccgtactgaagaacgaagagatgagaaagttattcaagcaaatgcaggatgaaggagacacaacagcaagagaaaagcttgttaacggcaatttgcgccttgtcttaagcgtcattcaaaggtttaacaacagaggagaatatgttgatgacttattccaagtcggctgcatcggactaatgaaatcaattgataattttgacctgagccacaatgttaagttttcaacatatgctgtaccaatgatcatcggagaaatccgcagatatttgcgcgataacaacccgatccgcgtctcacggtcactcagggatatcgcgtacaaggcgctgcaagtgagagaacggctgatcagtgagacaagcagggagccgactgctcaggagatcgctaaagagcttgaagtgtcccatgaagaaatcgtttttgcgcttgacgccattcaagatcctgtatctttgtttgagccgatttacaatgacggaggagatccgatttatgtcatggatcaaatcagcgatgagcgcaacaaggattcgcaatggatcgaagagctcgccttaaaagaaggcatgagacggctgaatgaacgggaaaaaatgatcctcagaaaacgcttcttccaaggcaagacgcaaatggaagtcgctgatgagatcggaatctcccaagcccaggtctcaaggctggaaaaagccgccattaaacaaatgaataagaacattcactaa

SEQ ID NO: 1872 - DNA, 798 bp, Bacillus licheniformis
gtggttctgcagcttgagcatgcttcactaaaacgaaacggagagtggatattaaaggatattgattggacggtggaaaagggggagcactgggcgttatacggattgaacggagccggcaaaaccgcactgctcaatatgctgtgcgcttattattttccgacaacaggaaaagtcaccgtgttagggcgcgaattcggaaaaacggagcttggcgagaagcttcggcgaaaaatcggccttgtttcagccgccctgcagcagaagctttatcctgaagacagtgcatttgaaattgttttaagcggcgccttcgcttcgatcggcctttatgaatcgccttcacagtctgtcagagagaaagcggtcgccctcttggaggaattcggctccatccgctatgcggacaggagatatgaaacgctctcccagggagaaaagcaaaaggtgctgatcgcaagggccttgatggccgatcctgagctgctgattctcgacgaacctgtcaccggtctagattttatcgcgagggagcaggtgctggatacggttgaacaaattgccaagaaagacagtgcgccgtccatgctttacgttactcaccatgcagaagaaattctccccgctttcagccaaaccctgctgttaaaaaaaggggaagtgtttgcgttgggaaagacaagagagatgatgtccggcgaggttctgtccgaatttttcgatatgcccgtccaggcggtatggacggaagatcggccgtacttgtccaagaaaaaaactgcaaacctcaatgtttaa

SEQ ID NO: 1873 - DNA, 855 bp, Bacillus licheniformis
atgaaggagcatgaaacgatgtttcagtgcccgctatgcgccgcgaacatggcgatcagcgagttaaaaagccttatatgttcaaacagacatacgtttgatatcgcaaaaggagggtatgtcaatgtcgcgacgcattctccttctgttaaatatgatatagatttatttgatgccagaagaatgttagcagccgccggcttttttgaaccgatgagaggcgcgttgacagaccgtcttaaacaagccggcctgccgttttgcaattttgtcaggatcctcgatgccggctgcggggaaggttcgcatttgacgcgaatcgctgaaacgctagaagcgcgtttcggaacgcctgtccttggagtcgggctggatttggcgaaagccgggattgtatcggcggctaagcaagaaagagaggcgatctggtgtgtcgccgatctggctgccgcaccgtttcggaatcgttcattcgacgcgatcctcaatatattgtcgccttctaattacgcggaattcgagcggctgttatcggatgacggcatcgttttgaaagtgattccgagaagcggccatctgaaagaactgaggagatttttgtacgacggctcggacaaacaagcctatacgagcgaggatacggctgagcgcttcgcgtctcattttgatctgatcgacagaacggagatcgcctacagcaaacgtttagaccgaatccagctcccgccgctcatcaagatgacgcctttatcatggcgcgcgcgaaaggagcggatcaatgcctttctaaagaaggaatccgctgttatgaccgtccatctcgatattttagccggcaggaaaaaaacgaaataa

SEQ ID NO: 1874 - DNA, 232 bp, Bacillus licheniformis
atgatgaatatttctgatttccagataaaagatgtcgttaacgtatcaaacggaaaaaagctcggcagcatcggcgatatcgatataaatgtaacgacaggcaaaatacaggcgatcgtcatcggaggaacggggaaagtttcggatttttcggaaaagaagaggaaatcgtcattccgtggcgaaatattgttaaattggagaagatgtgattcttgtgcgtttaagctga

SEQ ID NO: 1875 - DNA, 840 bp, Bacillus licheniformis
atgaatacatataacccctttcgtcttgatgctccgtcaatgcttttgattgaggaatggaatcagacggcggaaaccggcggagccgtcacagccggatttacgacaaaaaacggcggagaaagcgaaccgccttttcactcattgaatacagggctgcacgttcaggatcatgaacagcatgtcatcaataacagaaaaaaggttgccgacatcctaaaaacagatctgcacgactgggtatttgctgatcagacgcatgaagaccggattcataaagtgacggatggcgatcgcgccagcggcgctttccgatacgatacggcgctgaaggctacggacggactttatacagacaggccaaacctgtttttggcgctttgctttgccgactgcgttcccgtttatttttacgatccggtccgctcgctggtcggcatcgctcacgcgggcttgaaaggcaccgcacttgggatcgccgccagcatggttgacatgtggatcaggcgggaagggtcgaatcccgcagacatccgtgccgtgatcgggcctgcgatcggttcgtgctgctacactgtcgacgatcatgtaatagacaaaatcagaaatcttcctcttcagcaagaagacaaagcctttttgacgataaaagaaggggagtaccgtctcgaattaaaagaagtgaacaggcagctgcttgtacacgccggaattccaaacggccagatcgaagtgagttccctttgtacgagctgcgagcgttcactgtttttctcccatcggagagaccggggaaaaaccggacggatgatgtccttcatcggattaaaggaggtatag

SEQ ID NO: 1876 - DNA, 696 bp, Bacillus licheniformis
gtggatgtaaaaagcaatttacgacatataaatgacaggatcaacgaagcgtgtatcaaagcgggcagaacgcccgacgaaatatccgtcatcgctgtcacgaaatatgtttccccggaacgggcgcaggcagcgctggatgcaggaatcaggcatttgggtgaaaaccgtgataccgggctgcttcacaagctcgacgttctgaaagacagcgaaccggtatggcattttatcggaaccctgcagacgagaaaggtaaaagcaatcatcgatcatgtctcatatatccattctttagacaggctttcactggccgatgaaattcaaaagagggcaaaaaaaccgattgactgttttgtccaggtcaacacatcccttgaaccttcaaaacacggcatggcaaaagaagaagttcttccttttgtaaaaaaactgtctggatacgaaaacattcggatcgcgggattaatgacgatggctccttttacggatgatgagaaggcaatcagaagctgttttcgcttgctgagagagctgcgcgacgaggtgcgcggccttgatcaatggaacgctccgtgcagcgagctttcgatgggtatgtctaacgactatgcgatcgcagtcgaggaaggcgcgacattcgtcagaatcggatcttccttagtcggaaatgaaactggaggtggacaatcatga

SEQ ID NO: 1877 - DNA, 417 bp, Bacillus licheniformis
ttggatgatgaggaatacgaatacgagtatattgaaacagacagggaggaaatccctgaagagcatgaatcaaaagacagaaccgcctaccagtctaaagcggctgggaagcagaatgtcgtaagtttgcaaagcgttcagaaatcttctaaagtagtgttaagtgagcctcgggtgtacgcggaagcccaggaaatcgcagaccatatcaaaaaccgacgcgccgtcgtcgtgaacctgcagcgcatccagcacgatcaggcgaaaagaatcgttgatttcttgagcggaactgtatatgctctcggcggcgatattcagcggatcggagcggacatctttttatgcacgcctgagaacgtcgatgtttccggcacgatttccgagctcatagaagaagaacatcagaggtggtaa

SEQ ID NO: 1878 - DNA, 270 bp, Bacillus licheniformis
atgatcctactttatcaaattttaagcacgcttttaaccgtctattcttttgcgctcattatttacatttttatgtcttgggtgcctaatgcaagggaatcttcattcggccgggtgcttgcttcactttgcgagccttatctcgaaccgttcagaaggatcattcctccgctcgggatgattgatatttctccgattgtggcgattttcgtcctgaaattcgcagatgcagggcttcttgcggttttcagaatgctcggcgctttttaa

SEQ ID NO: 1879 - DNA, 777 bp, Bacillus licheniformis
atgagcgatatttaccagcatttcagaaaagacgaagagccgtttatcgaccaggctcttgagtggaaaagaatcgtagcggaacagtactggatgaagctgaccgattttttggatccgcgggaacaggtgatcctgcagtctgtcatcggtcagtcggacgaagtgaggcttgaatttttcggggggttccctgaggctgaacgaaagcgggctgtgctgttccccgaatatgccgagccgtctgccgaagattttcagcttcaagcctgggaagtcatctacccgcaaaaatttgcctccatcgagcatcgcgagcttctcggctcattgatgggcatcggattgaagcgccaaaagttcggcgatctgatcttttcggacggaacatggcagtttatctgttcggaagaagtcgctgattttgttttcacccagctgacacaaatcggcaaggtgaaagtttcccttgaaaaaattccgctttcaaagcttaaagtaccggagcaggatgtcgaaataagggatgatacggtttcatctttgaggcttgatgcgatttgctcggcaatgagcaggcaatcccggcagaaagcacaggttcttgtgaaaaacggcctcgtgaaagtgaactggaaagtcatcgaagacccttcatatgcactggctgaaggggatatggtttcgatccggggatttggccgcttcagaatgaaaaacattgacggcaaaacgaagaagggcaaatggagattgacgtttgaaaaacaaaaatga

SEQ ID NO: 1880 - DNA, 495 bp, Bacillus licheniformis
atgcctttgacgccaaatgacattcataataaaacatttacgaaagcgttccgcggctatgatgaagatgaagtgaacgaattcctggcccaggtgaggaaggattatgagatcattctgcgcaaaaaaaatgagcttgaaacaaaggtgaacgagcttgacgagcgtctcggccatttttcgacgatcgaagagacgttgaataaatcgatccttgtcgcacaggaagcggcagaagacgtaaagcgcaattccgagaaagaagcgaagctcatcatccgtgaagctgagaaaaacgcagatcggatcattaatgagtctctttcaaaatcgagaaagatcgctatggaaatcgaagagctgaaaaagcagtcaaaagtgttcagaacccgtttccaaatgctgatcgaagcgcagcttgacctgttgaaaaacgatgactgggatcatttgcttgaatacgaagtagacgcagtaatggatgaaaaggaatag

SEQ ID NO: 1881 - DNA, 2769 bp, Bacillus licheniformis
atggattataaagacacgctcttaatgccgaaaacagattttccgatgagaggaaacctgccgaaccgcgaacctgaaatccaggggaaatgggaggatatggacatttacagcctcgttcagaaacgtaccgaaggccggccgatgttcgtgcttcatgacggaccgccgtatgcgaacggcgatattcatatggggcatgcgcttaacaaagtactgaaggatttcatcgtccgttcgagatcgatgagcggctatcatgcgccgtacgttccgggctgggacacacacggcctgccgattgaaacagcgctcacgaagaacaaaaaagtgaagcgcaaagaaatgacagttgccgaattccgcaaactttgcgaagaatatgcatggcagcaaatcgaaggccaaaaagcgcaatttaagcggctcggtgtcagaggagattgggaaaatccatacgtgacgcttaagcctgagtttgaagcgcagcaaattaaagtattcggcgaaatggcgaaaaaaggctatatttacaaagggaagaagccggtttactggtctccttcaagtgagtctgctctggctgaagcggaaatcgagtaccatgataaacgctctccgtctatctatgttgcatttgatgtaaaggatggaaaaggcgtattaacaaacggcgaaaagattgtcatctggacgacaacgccgtggacaatcccggccaacctcggcatcgccgtacatcctgaactggagtacagcgtcgttgctgccggcggcgcgcgctacgtgatggcaagcgcattgattgaaagcgtggcaaaagcgatcggctttgaagatcatgaagtcgttcagactgttaaaggtaaagatttggaacatatcgtcgcagttcatcctctatacggcagagattcgcttgtgatgctcggcgaacacgtaacaacagatgccggtacaggctgcgttcataccgctccaggacacggggaagacgactttatcatcggtcaaaaatacgggcttgacgtgctttgtccggttgatgaaaaaggacatatgacgagcgaagcccctggttttgaaggactgttttacgatcaggccaacaagccgattacagaacagctcgaagaaaaaggcgctttgctgaagcttgatttcatcactcactcctatccgcacgactggagaacgaaaaaaccgactattttccgtgcaaccgcccaatggttcgcttccatcaaagactttagaggcgagcttcttgaagcggttaaagaaactaaatgggtgcctgaatggggcgagacacgcctctacaatatgatccgcgaccgcggcgactggtgtatttcaagacagcgcgcatggggcgtgccgattccggtattttatgcggaaaacggggagccgatcatcacggacgaaacgatcaaccacgtttctgaactattcagggagcacggttcgaacatttggtttgaaaaagaagcgaatgaactgcttccggaaggctttactcaccctggaagcccgaacggcaagtttacaaaagagcaggacatcatggacgtctggtttgattcaggttcgtctcatcaggccgtactggaagagcgcgaaggtcttgtaagacctgccgacttgtatctggaaggatctgaccaataccgcggctggtttaactcatcgatttcgacagcggttgccgtaacaggcaaagcaccttataaaggcgtgctttcgcacggttttgctcttgacggagaaggccgcaaaatgagtaaatcactcggcaatgtcgttgttcctgcaaaaatcatgaaccagttcggggcagatattttaaggctgtgggttgcgtctgtcgactatcaggcagatgtccgcgtgtctgacgcgatcttaaagcaagtcgcagaagtgtaccggaagatccgcaacacgttccgcttccttcacggaaacattgctgattttgacccggcgaaagatgcaatcgctgtggaagatctgagagaagtcgatcagtacattttgatcaagctgaacagcctcattgaaaaagtcaaaaaagcgtatgaagaatacgattttgcggtcatttaccatgctgtccacaacttctgtgcgatcgagctcagctcattctatatggactttgctaaagacgtcgtttatattgaacacgccgatcataaagaccgccgcagcatgcagaccgttttttacgaaacgctgcttgcgcttgtcaagctgatcgcgccgattctgccgcatactgcggacgaaatgtggagccacttcacattcgtatcggaaaaaagcgtgcagcttacagatatgccggaaacaagagacattccgaatgcaaaagagacggaagagaagttcgacagcttcatgaagctgcgcgacgatgttcttaaagcgcttgaaacagcacggaatgaaaagatcatcggaaaatcttcggttgccagcttgacgctgtatccgaatgaagaagctaaagcgctgctttcttcaatcaaggaagacgtcaaacagctgttcatcgtgtcggagcttgccatcggcggaacggaagccgatgcgcctgaggatgcgcagtcgtttgaaacaggaaaaatcgtcgttgctcaggcagaaggcgagacttgcgagcggtgccgcatggtttccaaagaaatcggcgaggatcccgatcatccggaactctgccctcgctgtgctggaattgtgaagacgtattatcaaaattaa

SEQ ID NO: 1882 - DNA, 366 bp, Bacillus licheniformis
gtgaacgagcagctggcggcaattcataccgaacttcttcaaatgaaggaagagttggaagcaaggctttttgaatactccttttttcagcaggattctcagggcatcagttcgtatcagcaggcaacacttatgtatcatgtaaaagaagagcttcaggacgtgcttttggccctttcaaaaatcgaaaacggaacatacggcatttgcgaagaaacaaatcaggctattccgctggcaaagatggctattctgccgacggcgcgcactgcgaacgattttttatatcatgcccaatttgaaaaaaagacgcttcctatttgggctgagacggatgaaacgttcaaccgggcgctctactcataa

SEQ ID NO: 1883 - DNA, 123 bp, Bacillus licheniformis
atgaaacgttcaaccgggcgctctactcataacattctgcaagaggggagggcatttgccctcttgcaggatgtcaatgaatattcctttactccttttctttttcttgttaaaatgcttaaa

SEQ ID NO: 1884 - DNA, 462 bp, Bacillus licheniformis
gtgccttattacataattgcgctgctcattatcggtatcgatcaatttacaaaatggctggtcgtcagcaaaatggagtacggtgaaagcatccccgtcatcgatggcttctttcagattacgtcgcacaggaatacaggtgcggcatggggcattttggccgggcagatgtggtttttttacatcattacgacggtggtgatcatcggcattgtatactacattcaaaaacatgcaaaaggacaaatcctgctcggaatcgctctcggtttgatgcttggcggtgctgtcggcaatttcatcgaccgcgtgttcagacaagaagttgtcgattttatccacgtgacgatcgtcaattatcactatccgattttcaacattgccgattcatctttatgcatcggagtcctgctcttatttatacaaatgctgttagacggaaagaagaagaaggagctgtaa

SEQ ID NO: 1885 - DNA, 915 bp, Bacillus licheniformis
atggagcattatgatatgaccgttcatgaagaacataaaggtgaacggattgacaagtacttgaccgcagttgaagcggattggtcgcggactcaagtacagcagtggattaaagaagaccgtgtgctggttaacggaaatgcggtgaaagccaattataaagttcaggaaggggatgcggtgtcagtccaggttcccgaaccggaaccgctggatgtcacggctgaaccgatggatcttgatatttattatgaggaccaggacgtactggtcgtcaacaagccgcggggaatggtcgttcatccggctcccggccatttgacagggacgctagtcaatggtttgatggcgcattgtgacgacctgtcaggcatcaacggcgtgatgagaccggggatcgtccaccggattgataaggacacttcaggcctgttgatggttgccaaaaacgacatggcgcatgagtcgctcgtgaaccagcttgtcaacaaaacagtaacgagaaaatacaccgcgctcgtccacggcgtcatcccgcatgaccacgggacgatcgacgcgccgatcggcagggataaaaaagacaggcagagtatgacggttacaagggaaaatggaaagcatgccgtcactcattttgaagtaatcgaacggttcgacgattttactgtcgttgaatgccagcttgaaacggggagaacccatcaaattcgcgtgcatatgaaatatatcggctttcctctcgcgggagatccgaaatacggaccgaaaaagacggtcgatttcaacggccaggtgctgcatgcgggcgtattggggtttgaccatccgcgtacgggagaatatgttgaatttgaggcgcctctgcctgacgacatgaaaaacctcctcgacaaaattcgaaataaacgttga

SEQ ID NO: 1886 - DNA, 549 bp, Bacillus licheniformis
atgcaagagcaggaaaaggctgttgtgcttgacgaacaggcgatcagaagggcgctgacaagaatcgcccacgaaatgattgaacgaaacaaaggaatgaacaactgtatccttgtcggaatcaaaacgagaggcatctatctggccaaacggcttgccgaacggattgagcaaatcgaaggaaacaaagtcaccgtaggagagctggacatcaccctttaccgggatgatctctccaaaaaaacgtccaatgaagagccgcttgtcaaaggagcggacattccggcggacatcaccgatcaaaaggtgatcctcgtcgatgacgtgctttacacgggacggacggtcagagcggccatggatgcgctcgtcgatgtcgggcggccttcatcaatccagcttgcggtgcttgtcgaccgcggccacagagagctgccgatcagagccgactttatcgggaaaaacatcccgacgtcgaaaaccgaaaaggtcatggttcaattggaggaagttgacggacgcgaccttgcggcgatttataaaaagtga

SEQ ID NO: 1887 - DNA, 135 bp, Bacillus licheniformis
atgcattccagtgagtttgcaaagagggatggaacgaaagaaagccgccttaccgtgcggcggtctttgtctgcctctttgcgcaatttaagcaaagaggcttttttaatgggcataaatcatttcaggatatga

SEQ ID NO: 1888 - DNA, 1305 bp, Bacillus licheniformis
atgagtcagaaaaaagtgaaccttggtgtcagagaagtaccaaaacctttgaattggatatctttcagcctgcagcatctgtttgccatgttcggagcgacgatccttgtgccgaagcttgtaggattaagcccgggcgtggccctcattacaagcgggcttggaacgcttgcgtatctcttgattacaaaaggacagatcccggcttacttaggttcatcctttgcatttattgccccgattatcgcggcaaaagccgccggaggccctggcgcggccatgatcggcgcatttatggcaggcatcgcctacgggttgatcgcccttctcatccagcagcttggaacggactggctgatgaggcttctgccgcctgttgtcgtcggtccggtcattatcgtcatcggactcgggctggcaagcacggctgtcaatatggccatgtatgaagattcgggagcaaaagtgctcgtctacagcgccaagcattttggcgtcgcaggattcacactcgcgctcaccataatctgcgcgattttcttgagaggatttttcagcctgattcctgtcttgatcggaattatcggcggatacttgttcgccctgacccagggaatcgtcgacttccagatggttcttgacgccaaatggtttgctgttccggacttcgtgcttccgtttgtcgactatacgccgagcgcggcggctgtcggaatcggaatcgccatggtgcccgtcgctttcgtgacaatgtcagaacatatcggacaccaaatggtattaagcaaggtcgtcggccaggattttattaagaagcccgggcttcaccgctcgattttcggcgacagcgtcgcaacgatgcttgcatcatgcatcggcggacccccgacaacgacttacggagaaaacatcggcgtactcgccatcacaagagtattcagcgtatttgtcatcggcggagcggctgtcattgcactgtgcttcggatttatcggcaaaatttcggccctgatcagctctgttccttccgcagtcatgggaggcgtttccttcctgctgttcggtatcatcgcatccagcggactgcgcatgctgattgataataaaattgacttggaaaacaagcgaaacctgatcatctcatccgtcattctcgtcatcggagtgggcggcgcatttatcaagatctcagggtttgagctgtcaagcatggcgcttgcggcgatcgtcggagtagttttaaaccttgtcctacctgaatcaaagggagatcaggacggaattgaaatagaagagcatatttaa

SEQ ID NO: 1889 - DNA, 921 bp, Bacillus licheniformis
atgaaacacttgaccgcaatgaatgagcttagtcttgaggatattcacgagctgattgaagaggcgagagagctgaaaaaaggcaagtccgattccgttctctccggaaagttcgctgccaacctgttttttgaaccgagcacaagaacgcgcttcagcttcgaagtggctgaaaagaaactcggcatgaatgtgttgaacctggacggtgtttcaacgagcgtacaaaaaggagaatcgttgtacgataccgtcaagaccctcgaatccatcggcgctgatgtatgtgtgatcagacactctcatgatcattattacgatgaactcatcggacatgtcggcattccggtgatcaatgccggagacggctgcggtcagcatcccactcagtctttgctcgatttgatgacgattcacgaggaatggggcagatttgccggactgacggtatccatacacggagatatcaagcacagcagagtggcaaggtccaatgccgaagtgctgacaagactcggagcaaaggttcttttctcaggtccagacgaatggcgggatgaagacaatccatacgggacatatgtgtcgcctgacgaagcggtcgcacattcggatgtcgtgatgcttctccggattcagcacgaacggcatgagaaaaaggcggcagaacgcgattatctcgaaacattcggattgtcgctcaagcgggcggagctcttgaaaaaagacgcggtcatcatgcaccccgcacctgtcaaccgaggcgtcgagattgacagtgcactggtcgaatccggccggtcgaggattttcaaacaaatggaaaacggagtatatatcagaatggcggttttaaaaagagcgcttctaaacggcgaaaacaaaaaaaggggagatcaggcttatgtcttatttaattaa

SEQ ID NO: 1890 - DNA, 1287 bp, Bacillus licheniformis
atgtcttatttaattaaaaacggcttcatgctcgacgaaaaaggcgaaaaagtacagcgcgatatcagggttgaaggcgatgcaatcagcgagatcggaagccttgaggccgcttcgggggaaacggtcatcgatgcggatggacttttcgtctcgccagggcttgttgaccttcacgttcacttcagagagccgggcggcgagaagaaagaaacgatcgaaacaggtgcaaaagccgcagcgagaggcgggtttacaactgtcgccgcaatgccgaatacccggcctgtccccgatacgaaagagcagatggagtggcttgtcaaccgcattgacgaaacggcatcagtgagagtgctgccgtatgcttcaatcaccatcaggcaaacaggtcgggaaatgaccgatttcgaagggctgaaagacgccggcgcgttcgcgtttaccgatgacggcgtcggcgttcaaacggcggggatgatgtatgaagcgatgaaaaaagcggcttcgattaataaagcgatcgtcgctcactgtgaagacaattcactgatctacggcggcagtgtacacgatggggaatttgccaaagccaacggtttaaacgggattccttcggtgtgcgaagcggttcacatcgcaagggatgtgcttcttgccgaagcggcaggctgccattaccacgtctgtcatatcagcacgaaggaatcggtcagggtcgtccgcgacgccaaaaaagcgggaatccgcgtgacggcggaagtgacgccgcaccatctgctcctttcagacagcgacattcccggccttgatacgaattataaaatgaatccgccgcttagaagtccggaagacagggaagcgctccttgaggggcttagagacggaacaattgattttatcgcaacggatcatgccccgcatacagaagaagaaaaacaacagacaatgagccttgcgccttttggaattgtcggcttggagacggcttttccgctcctttacacgcactttgtcaaaacaggcaaatggacgctgaaacagctgcacgattatatgacggtcaaaccttgcgaggcgttcgggctgccgtacgggaagcttgaagccggacggtccgcggatattacgctcattgatcttgaacgcgaagaaaaaattgataaaagcacctttctttctaaagggaaaaacacgccgtttgacggcatcagctgcttcggctggccggctatgacaatggcaaagggaaaactcgtttaccaagaggggagacttgtaaaatga

SEQ ID NO: 1891 - DNA, 1095 bp, Bacillus licheniformis
atgaaaagacgtcttatattagaaaacggaacgatttttgaaggggaagcattcggcagcctggaaaacaccatgggagaagtcgtcttcaacacggggatgacaggctatcaggaaatcctctcagacccgtcatactgcggacaaattgtcaccctgacctaccctttgatcgggaactacgggatcaacagagacgactttgaatccatcaccccttatgtaaaagggtttatcgtaaaggaattatgtcaacttccatcaaactggcgctctgcttatacacttgatgaatatttaaaaatgaaaaacatcccgggactctcagggatagacacgagaaagctgacaagaatgatcagaacggcaggtacgctgaaaggggtatttgccggccctgaagaagatgctggggctttggttcaaaagctgaaagaaacgaaccttccgaccgatcaggtcagccaagtatcaacaaaaacggcatatccgagccctgggagagggaagcgaatcgtgctcgtcgatttcggaatgaaacacggcatcttaagggagctgaacaagcgcaaatgcgatgtgatcgtcgttccccacaatataacggcagaagaagtgatgcagctgaagcctgacggcgtaatgctgtcaaacggacccggagatccaacggacgtaccggaagcgattgcgatgatccaaaacattctcggcaaggttccgctgttcggcatctgtctcggccatcagctgtttgccctcgcctgtggagcaaagacggagaaaatgaagttcggacaccgcggttccaaccatccggttaaagagcttgaaaccggcagagtatcaattacggctcaaaaccacggctataccgtatcgtctgttgaaaacacgccgcttgaagtgacccatgtggcgataaacgacgacacaatcgaagggcttaaacataaacacgaaccggcttttacggttcaataccatcctgaagcttcaccggggccggaagacgcaaaccatttatttgatcaatttttagacatgattgaaaccacagagaaagaaggggaagcggtatgcctaaacgcgtag

SEQ ID NO: 1892 - DNA, 3213 bp, Bacillus licheniformis
atgcctaaacgcgtagatatcaaaaagattttggtgatcggatcggggccgattattatcgggcaggcggcggaatttgattatgcaggcacacaggcctgcctcgctttaaaagaagaaggctatgaagttattctcgtcaactcgaatccggcgacgatcatgacggatacggaaatggccgaccgcgtgtatatcgaaccgctgacgcttgaattcttaacacggatcatccgcaaagagcggccggacgccatattgccgacattgggcgggcagacgggcctcaacttggcggtcgaactgtcagagcacggcatcttggctgagtgcggcgtcgaagtgctcggcacgaaattgtcggcgatccaaaaagcggaggaccgcgatttgttcagaagcttgatgaatgagttgaatgagcctgttccggaaagcgagatcatccactcgctcggcgaagcgcgcgagtttgtcgagcgcatcggtttccccgtcatcgtcaggccggcatacacgcttggcggaacaggcggaggcatctgctcaaacgaagacgagctgaaggaaatcgttgaaaacggcttaaaaatgagcccggttcatcaatgcctgcttgaaaagagcatcgccggctacaaagaaatcgagtatgaagtcatgagagactcgagcgaccatgcgatcgtcgtctgcaatatggaaaacatcgatccggtcgggattcataccggggacagcatcgttgtagcaccgagccaaacgctgagcgaccgcgaataccaaatgcttcgcaatgtctcgctgaaaatcatccgcgcgcttgaaatcgaaggcggctgtaatgttcagctggcgcttgacccggacagctttcagtactacatcatcgaggttaacccgcgggtcagccgttcttctgcgcttgcctcaaaagcgacgggctatccaatcgcaaagcttgccgcaaaaatcgctgtcggtttgtctcttgacgaaatgatgaatcctgttacaggaaaaacgtacgcgtctttcgaacctgcactcgactatgttgtgtcaaaaataccgcgctggccgtttgacaaatttgaatcagcaaaccgcaggctcggcacgcagatgaaagcgacaggcgaagtgatggcgatcggaagaacgtgggaggaatctctcctgaaagcggtccgttctcttgaagcggatgtctaccatctggaactgaaagatgccggtgagatctcgaatgaagtgcttgaaaaacggattaaaaaagcgggagacgaacggctcttttacctggccgaagcgttcagaagaggatacacagtcagcgacctccacgaattttcggcaattgacctgttcttcctccacaagcttgagggaatcatccgctttgaagagaagctgaaagccggacgcggcgacctcggccttttaaaagaagcgaaagagctcggcttttcagaccgctttatcagccttctctgggagatgcctgaacgaaagctttatgatcttagaaaagaagcaggcatcacgcctgtttataaaatggttgatacatgcgcggccgaatttgaatcggagacgccgtatttctacagcacgtatgaagaagaaaacgaatcggtcagaacggacaaaaacagcgtcatcgttcttggctccggtccgatccggatcggccagggggtcgaattcgactatgcgaccgtgcattcggtctgggcgattaaagaagccggctatgaagccattattatcaacaacaatcctgagacggtttcaacagacttcagcatatccgacaagctctactttgagccgcttactgttgaagatgtcatgcatatcatcgatttggagcagccgaaaggcgtcgtcgttcagtttggcggacagactgcgatcaaccttgccgacgagctcgcagaaaggggcgtcgccattctcggaacatcccttgaagatttggaccgcgccgaggaccgcgacaagttcgaacagacgcttgaaatgctgcaggtaccccagccgcttggaaaaacggcgacatctgtggaaggcgccgttgaaatcgcagccaatatcggctatccggtgcttgtccgcccatcgtatgtactcggcggacgtgcgatggagatcgtctactatgaagcagagcttctccattatatggaaaatgcagtaaaaatcaatccgcagcaccctgtcctgatcgataaatatttgaccggaaaagaaatagaagtggatgccatttctgacggtgaaacggtcgtcattccggggattatggagcacatcgaacgggcgggcgtccactcgggggattcgattgccgtttacccgccgcaatccctttcagaggacatcaagaaaaagcttgaagcatacacgattaagctagcaaagggcttaaacatcgtcggcctgctcaacattcagtttgtcctttcaaaagatgaggtttacgtccttgaagtcaacccgagatcgagccgaacggtgccgtttctcagcaaaatcaccggcattccgatggccaatctcgcaacaaaggtgattctcggcgggaagcttgccgatatgggctatacagaaggcctccaaaaagagcaggaaggcgtatatgtgaaagtgccggtcttctcgtttgcgaagcttagaagagtggatatcacgctcggaccggaaatgaaatcgaccggggaagtcatgggcaaagacagcacattggaaaaagcgctatataaaggactgatcgcttcaggcattcaaattccgaactacggctctgttctcctgacagttgctgataaagataaagaggaagggctgttgatcgccaagcggttccatgcgatcggctataaaatcttggctacggaaggaacggccggctatttaagagacgcatccgtacctgttaaaaccgtcgggaaaatcggcgaagaaggtacaaatctccttgatgtcattcgaaacggggaggcgcagttcgtcgtcaatacgctgacaaaagggaagcagccggcaagggacggcttcagaatcagacgcgaatccgttgaaaacggcgttgcctgcctgacatcccttgatacggcggaagcgattttgcgggtgcttgaaagcatgagcttccgcgccgatcatatgccggcgattaaaatcgcccaaaaggcggccgtcagatga

SEQ ID NO: 1893 - DNA, 777 bp, Bacillus licheniformis
atgagaaaagggtatatgacagtccgttcaaacaagtgcatcgcggatcatatttatcaaatggtgcttgaaggggagattgccgaagtttgcggcgctcccggccagttccttcacatcaaggtctcagactccctcacgccgcttttgaggcggccgatcagcatcgctgatatcaacaaagccgcccggcaggtgaccatcatctttcgcaaagatggggaaggcacgagactcctttctttaaaacaggaaggagatcagctcgatgttctcggtccgctcggcaacggttttccggctgaatcgcttgaacaggggaaaacggctcttctcgtcggaggagggatcggtgttccgccgctttacgagctgagcaaacagctgacaaacagaggggtgcacgcgatccatgtgttaggatttgcttctgcaaaagatgtcttttacgaacaggaattcagccgtttcggccgggtgtatgtggcaaccgcagacggcacccgcggttcaaagggatttgttacagatgtcattgaaaacgaggggcttcagtgtcagtttgactgcataatggcctgcggaccgacgccgatgctgaaagctttaaaacagcgctatccggataaagaggtatatctgtcaatggaggagcgcatgggatgcgggatcggcgcttgctttgcctgtgtctgccatacggaagaaagcgaaacgtcttatgtgaaggtatgccttgacggtcctgttttcaaagcccaggaggtgctgttatga

SEQ ID NO: 1894 - DNA, 939 bp, Bacillus licheniformis
atgatgcttgaaatcaatttgccgggccttcaattgaaaaatccgatcatgccggcctcaggctgcttcggattcgggagagaatttgcgaacttttacgatctttcgcgtctcggtgcgatcatgattaaagcgacgacgagcgagccgcgcttcgggaatccgacgccgcgcgtcgccgagacgcaagccggcatgcttaatgccatcggcctgcaaaatccgggtttaaaggctgtcatggaacgcgaattgccgtggctcgaacagttcgatacaccgattatcgccaatgtcgccggctcgcagatcgaggattatgttgaggtggctgaagaaatcagcaaagcgccaaacgttcatgcgctcgagctgaatatttcctgtcccaatgtgaaaaccggaggcatcgccttcggcacgcagccggaaatggccggcgagctgacgaaagcggtgaaagaggttgcgagcgtccccgtctatgtgaagctgtcgccgaacgtcgcgaacattaccgacatcgctcttgccatagaagaagcgggagcggacggtttgacgatgatcaacacgctgatcgggatgcggctcgacttaaaaacgggaaagccgattttggcgaacaaaaccggcggattatcaggacctgccgttaaaccggtggccatcagaatggtgcatgaagtcagccaaaaggtcagcattccgatcatcggcatgggcggcgtccagtcagccgaagatgtgcttgagtttttgctggcgggtgcgagcgcagtcgccgtcggcacggcaaacttcgttaatccgtttgcttgtcccgacatcatcgacgatttgccgcgcgttttagaaaaatacggataccgttcgttgaacgagtgtatcggaaggagctggaaggatgaacaatacgccgcccatcatcgcgcttga

SEQ ID NO: 1895 - DNA, 720 bp, Bacillus licheniformis
atgaacaatacgccgcccatcatcgcgcttgattttgcatcagcacaggaaacatatgcgtttttggaccggtttcaaggagaagagctgttcgttaaggtgggcatggagcttttttatcaggaaggacctgccatccttgaaaatctgcaggagcgcggctgccgcattttcctcgatctaaagtgccacgacattccaacgaccgtatacaaggcgatgaaaaggctggcgggatttggcgtcagtcttgtcaatgtgcacgcagcaggcggaaagcaaatgatggagtcggcgcttgaaggccttgaagcggggactccgggaggccaaaaacgcccttcattaattgccgtgactcagctgacaagcacgtcctcagaaatgcttcagcgtgagctcctgattgaaacgccgcttctcgatacagttgtccactacagccggctggctgaagaaagcggtcttgacggcgtcgtctgctccgttcatgaagccgaacacatttaccgggctgtgtctgtagattttctgaccgtgacacccggaattcgcatggcagatgacaaaaacaacgaccaggtccgggtggcaacgcctggctacgcaagggaaaaaggcgtgtcggcgatcgttgtcggccgttcgattacccaggcggaagatcctgtgtcagcctacagaagaataggacatgagtgggagggaaccaaggcatga

SEQ ID NO: 1896 - DNA, 630 bp, Bacillus licheniformis
atgaaaacagacattgcaaaccatttattaaaaatcaaagcggttttcctgcgcccgaacgaaccgtttacatgggcgagcggcattctgtcgcccatctactgcgacaaccgtttgacgctttcatatccggaagtaagagatgatatcgcttcagggcttgccggactgattcaagacaaatttcccggagccgagatgatcgccggtacagcgaccgcgggaatccctcatgccgcgcttgccgctgacaggctgagcctgccgatgtgctacgtcagaagcaaaccgaaggcgcacggcaaaggaaaccaaattgaaggggccgttgtaaaaggacagaaagtcgttgtgatcgaagatttaatttcaacgggaggaagcgttcttgaagccgccgccgccctcacagaggcgggatgtgaagtgctcggcgtcgccgccattttcacttacgggcttccaaaagccgccgccgccttcagcgaagcaggcgttgaataccacacgctgactgattacgatacgctgaccgaggctgcgcttgccggtggatatattactgaacaggatgccgccaaactgaaagaatggaaagcggatcctgaaagcaagtcttggatgaactga

SEQ ID NO: 1897 - DNA, 144 bp, Bacillus licheniformis
gtgaagacagatgaacagcttgaaaaggtgatcatcaaaatgaaagacatgctgaaagacatgaattacggatcgatcacattcgttgttcaggacggcaaagtcattcaaatcgaaaaaaatgaaaaaataagattgaaatag

SEQ ID NO: 1898 - DNA, 543 bp, Bacillus licheniformis
ttgatttataaggtgaaaaaagatgcagttatcgtttttcttgatacagggcttcattttaaagaaacgtatgaaacgatcgacgccgtcaaagaacgatatccaggccttcagattatcatgaaaaaaccggagcttaccgtcgaagagcaggcgaaagaatatggggacgaactatggaagaccgctccgaattcctgctgcgaaatgaggaaggtcatccctctccgcgagacgctttcaggctacccggcgtggctgtctggtctgcgccgcgagcaatcgcccggacggagcaaaacgaattttttgaacaaagatgaaaaattcaagtctatcaaagtttgtccgctcattcattggacgtggaaggatatttggagatatgtgacaaagcacgatctcccatacaatccgcttcatgatcaaggctatccgagcatcggctgcgctccgtgcacctctccggcctttacaatggatgatcttcgatccggccgctggaacggatcggctaaaacagaatgcggattacacgagtaa

SEQ ID NO: 1899 - DNA, 1065 bp, Bacillus licheniformis
atggaacttgccgccattttatttagcatgttttttgcgatgaatatcggagcgagcggtgcagctgcttcaatggggatcgcctatggatctgaagctgtcaaaaagaagtttcacgccctcctgatctgtgcagcgggcgttctctcgggcgctgtcatcggcggaggaaacgtcgtgaaaacgatcagttcaggcatcattcccgaacgggtgatttcgcttgaaatcgtctgcattattatcggatcagcggcgctgtcgctctttatcgcaaatgtactcggcattccgctttcgacaagtgaagtgacagtcggatctgttgtcggagtaggtgtcgcataccaggttttgtatgtcaaatctttgcttgtcatcgtctcattttgggtcattgtaccaatcgtcgcttttgcatttacatttgcgatggcaaaaatcatgaaaaaaacgatcaaacgtccagcctcgggaaaaaaagcaaaggttttggcggtcattctattgatcacagggttttttgaagccttctcagcgggcatgaacaatgtcgcaaacgctgtcggacctctggtggcggcgcatgttttgacagtcggggaaggaacgctctacggcgggctgtttgtcgcgctgggcgcccttttactgggcaggcgcgttcttgaaacaaacggcaaaaagattacgaggttttcaaaaggagagggaatcatcctttccggaacgggggccgggcttgtcattaccagttcaattttcggtttaccggttccgcttgcgcaagtcacatcatcttctattatagggatgggaatggcaaaaaacggcggcaacgtctttcataaacaagtggtcaaaacgatgctgaaagtatgggtcgtctcgccgttcctttcattaagcctatcttatatgctggtcagccttttattaaaaggagactactacgctcttattgttgtcacaagcgttctgctggcatctgtcggaacgatcagcctgatgagagcggtcaaaaaagagcacagctccgtccatgaacaaggcggaggaatttaa

SEQ ID NO: 1900 - DNA, 1137 bp, Bacillus licheniformis
atgagtttagcaccacacggcggtgtattggttaaccgcgtcaatgaagcatacgattttcaacatatcgcacatgaaattgagcttgatgtaatggctttttcagatttggagctgatcggaatcggtgcgtacagcccgctccaaggctttatgacagagaaagactatctgtccgttgtcgaaaatatgagactatcaagcggcgaagtatggacgcttccgatcactctgcctgttgacgagcaaaaagctttaagcttaaaagcgggtgacaccgtccgccttacctataatggggaaacctacggcgtcattgagatcgaagatatctatacgccggacaagaaaacggaagccgtcaatatctataaaaccgacgaactcgaacatccgggcgtcaaaaaattgtttgaccgcggcagcgtttatgtgggcgggccgatcacgctcattaagcggagtgtaaaacaattcccggcgcacacattcgaacctcttgaaacaagaaaaaaattcgcggaactcggctggaaaacgatcgtcggattccagacgagaaatccggttcacagagcgcacgaatacattcaaaaaacggcgctcgagacggtagacggccttttcctcaatccgctcgtcggggaaacaaaatcagacgatattccggctgatgtccgcatggaaagctatcaggtgctgcttgacggctactatccgaaagaccgcgtcttcctcggcgtttttccggcggcgatgcgctatgcggggccgaaggaagcgatcttccatgcccttgtgagaaagaactacggatgcacgcactttatcgtcggaagagaccatgccggagtcggcgattactacggcacatatgaagcgcaggagctgttcgatcagttcgcgccggaagaaatcggcattacgccgctgaaattcgaacacagcttctactgcaatgtctgcggttcaatggctacggcgaaaacgtgccctcacggcaaagaacatcatgtcattttatccggcacaaaggtgagggcgatgctgagaagcggcgagttcccgccgagcacattcagccgtcccgaagttattcaaacattaatcaaaggcttagcggccggggtttcttaa

SEQ ID NO: 1901 - DNA, 594 bp, Bacillus licheniformis
ttggtaaataaagatattgtctggcatgaagcgtccattacaaaacgggaatatcatgagaaaaatcaacataaaagctcaatcatttggctgacgggcttaagcggttcaggaaaatcaacgattgccaacgccgctgcgcgtgagttgtttgcacaaggctaccaggtcacggtgcttgacggcgacaacgtcaggcacgggctgaacaaggacctcgggttttccgatgaagaccggaaggaaaacatccgccggatcggcgaggttgcgaagctctttgtcgaacaggggacgatcgtcattacggcgttcatttctccttttaaagaagatcgcgggcttgtcagacagcttgtcgaggaagatgagtttcacgaagtctatgtgaaatgcgatttggcgacgtgtgaagagcgcgacccgaaaggcttgtacaaaaaagcgagaaacggagaaattccatttttcacagggatcgattcgccttatgaagagcctgaaacgcctgagcttgttcttgatacaggcgcacataaccgggaagagtgcaaaaaccagctcgtccaatacgtgaaagatcaaacgaaataa

SEQ ID NO: 1902 - DNA, 774 bp, Bacillus licheniformis
atggggaaagtatatatcgttggggcaggtcctggagaccccgatttactgacgatcaaagctttaaaagccatccagacagccgatgtcattttgtatgacaggcttgtgaataaacagattttacagcacgccaaggagggagcggatctcatctactgcggaaagcttccggactaccacatgatgaagcaggaaacgatcaatcattttctcgtcaagtatgcgaaaaaagggaaaaccgttgtcagactgaaaggcggcgatcctttcgtattcggcagaggcggcgaggaagcgcaaaccctcgctgagcacggggttgcttttgaaatcgtgccgggaatcacctcgggaatagctgccgctgcttatgcgggcattccggtgacacaccgggaagcgagttcaaacgttgctttcgtgacaggccattatcaaaaagaagaaaactttgaagagaagtggaaagcgttagccacagggatcgatacgcttgtcatttatatggggattaaaaacgtgaagcaaattgaaaggcttctgatcgaaaacggcagagacccgtcaacgccagccgctttcatccattggggaacgacagacaaacaaaaaacggtgctttgcacggttgaaacgcttgccggtacagtcgaaagcgaaaagattgaaaacccgagcctgattgtcatcggggatgtcgttcaattcagctcgcagttaagctggtttgaacctgagctgaaagatccggcattaagcgaggcgctttaa

SEQ ID NO: 1903 - DNA, 786 bp, Bacillus licheniformis
atgaaacaagcgattttatatatcggccatggaagccgtctgaaaagagcccaaacagaagcagccgcttttttggagagctgcaaagaaaacatgtccgcccccattcaggaaatatcttttttggaattggcggcaccggatatcgaaaccggctttaaagcgtgtgtggaaaagggggcgacgcatatcgcggccgtgccgcttctcctcttgacagccgcacatgccaaaagggacatccctgaagagcttgcccgtgcttcctcacagtacccttccgtcagcgtcgcttacggaaagccgatcggcgtcgatcaggaagtcgtcaaagcggtttttacaaggatcgaagaaacggggacgccatatgaacatgcaagagtcgtgttgatcggaaggggaagctctgatccggatgtcaaacgggatgtttatgatatttgcgaacggctgagagacctcacaccagtggatgaggtcattccctgctttatgacagcctgtgagccgcactacctggatgtgtttaaacagcttaaagaacgggacggaaaaacgacattcatcgttccgtatctgctgttcaccggtatgctgatgaacgagattgaaagggaaaccgcaaagctgaaagaaacgaatccgaatgtcgtgctgacggattacctcggcttccacccccatgtaaaaaacgcctttttgcaccgcgtagaggaagcggttatcaacaaagccggccgctttgattttacaggagcatcagatgctgccgctgcacattaa

SEQ ID NO: 1904 - DNA, 495 bp, Bacillus licheniformis
atgctgccgctgcacattaacatgaaaggcaaagccgcagtcattgcgggcggggggaagattgcggcgcggcggctgaaaacggtgctggcagaaggtgcatccgcgaccgtcatcagccctgaagcatcagaagagatgctcggattgattaacgaacacggcatcgaatggaagaagaaaaaggcggaacccggtgatttcaagaatgcatttctgatcattcttgcgaccgatgaccatgaggcaaacaagcgtctcgccgcatcggcagctcctgagcagctcgtcaatgttgcgagtgaagcggagctgggaaatgtatatgttccaaaaataatcaacagaggaaacataaccatatccgtctcaacaaacggagccagcccgcgccacacgatcaggctggccggacagatcgatgatttgatcgatgatgagctcgtccaagagatcgacgagcttttccgaaaaagaagaggcctgaacccttga

SEQ ID NO: 1905 - DNA, 1734 bp, Bacillus licheniformis
atgtcttttgacggcatttttacatacggaatgatcgaggaattaaatgaggcgattcgaggcggacggatcgcaaaaatccaccagccgtttaagcacgagctagtgtttcatatcagggcaaacgggaagaaccgcaaattgctgctctccgcccatccgagttatgcgcgggtacacctgacaaacgaaacctacgacaacccgagcacccctccgatgttctgcatgctcctccgcaaacatctggaaggcggctttatcgaccaagtcgagcaaatcggcatggacagaatgatggtctttcatatcaggagccggaacgaaatcggcgacacgctgacaagaaagctgatggtcgaaatcatgggcaggcacagcaacatcgtgttaacagacggagaaaaagacgtcatcatcgacagtttgaagcatctgtcacctgcgatgaacagctaccgcaccgtgctcccgggatacgattacattctccctcccgcgcagaacaaattgtctccgcttgaagcggagactgaagatattctccgccatctgaatttccaggaaggcaaacttgacaggcagatcgtcgataccttctccggcgtctcgcctctgtttgcgaaggaagccgtctttcgcgcgggtctagccaacagggcgacactgccaaacgtcttgacggagatgttcagcgaaatcaaaagccggcgttttcagccccagcttgtcaccacagaagacggaaaagaatatttttaccttcttgagctgacccatataaaaggagacaacaggccctttcatacgctgagcgaacttcttgaccgctactatttcggaaaagcggagcgtgaccgcgtcaaacagcaggctcacgatttagagcgtttcgcggcaaacgaaaagaaaaagaacgaaaataaaatcaaaaagctgaaaaaaacgcttgagcagtccgaacacgcgcaagactatcagctgtacggagagctgttgacagcgaacctgtaccagctagaaaaaaaggggacaaaggaggcgaaggtcatcaactactatgatgaaaacggggggaaaatcacgattccgctcaatcctaataaaacgccttctgaaaatgcacaaagctattttacaaaatatcaaaaagcgaaaaattcggtagaagtcgtgaaggagcagatcaaattggcagaagaggaaatcgcttatttcgaccagctgattcagcagctttcatctgcctcaccgaaagatataaccgaaattcgcgaagagctcgccgaaggaaaatacttgcgggccaagcagcaagggggccagaagaaacagaaaaaacaggcgccgacgctcgaagcatatgagtccagctcaggagaaacgattctcgtcggcaaaaacaacaagcagaacgaatatttaacgatgaagcttgccgcccgcgaccacatctggcttcacacaaaagatattccggggtcgcacgtcgtcattcaatcgaccgatccggacgagcaaaccattctggaagcggcgcagatcgctgcatattacagcaaagcgaaaaactccgcttcggttcccgtcgactatacaaaaatacgccacgtcaaaaaaccgaatggcgcaaaaccggggtttgtcacctacgacagccagcaaaccgtttttgtaacacctgatgaagacttgatcatcaagctgaaaaaaataataatgccaaaagcctga

SEQ ID NO: 1906 - DNA, 2682 bp, Bacillus licheniformis
atgaaatggcacgagatgggacaaaccgaattgttaaatataacaaaaacgtccatcgacaaaggtctaacagaaaaagaggccggaaagcggctggaaagacacggaacaaacgaacttcaggaaggggaaaaaacatcggcggtcgcattgtttttttctcaattcaaagatttcatggttcttgttttgcttgcggccacgttgatttcgggtttcctcggcgaatacattgacgccatcgcgatcatcgcgatcatcgcgatcatctttgttaacggcattctcggattctttcaggagaggcgggcggaaaggtcgctcgaggctttgaaagaactgtcagctcctcaagtggctgtgctccgggaggggaattgggtgaaaattccttccaaagagcttgtcccgggagatgttgtccgttttgcaagcggagacagaatcggcgccgatctcagacttgtcgagacaaagagccttgaaatagaagaatcggcccttacaggtgaatcgctccccgtgtccaaacaggcagatgcttttcaggcgtcagatgtatcgctgggcgatctgaagaatatggctttcatgggaacgcttgtcacaagggggagcggaatcggcgtcgtcatcggtacgggtatgaactctgcgatggggaaaatcgccgatatgcttgaatctgccgggaatacggcgaccccgctgcaaagaaggcttgaagagctcggcaaaattttgattgtcgccgctttgttcctgacactgcttgtcgttgctgccggcgtcattcaggggcatgatttatacagcatgtttttagcgggagtttcccttgccgtcgctgccatacctgaagggctgcctgccattgtcacggtcgctctgtctctcggcgtgcagcggatgatcaggcaaaagtcgatcgtcaggaagctgcccgcggttgagacgctcggctgcgcgtccattatttgctccgataaaaccgggacgatgacgcagaacaaaatgacggtcacccatgtctggtcaggcgggaagatatggaacgtgtcagggatcggctatgagcctgaaggctctttcagcatgaacgggcgcgatgtgcaagcaaagcatcataaaccgctccagcaggtactattgttcggcgcattatgcaattcatcttcgattatcgaaaaagacggggagtttcgtcttgatggcgatcccaccgaaggggctttgctgacggcggctcgaaaagcaggctttacggacaaatatgttgatgaacattttaaaatcatcgaggagtttccgtttgattcaacgcggaaaatgatgtctgtcattgtggaagacaagagcggcaagcgctttgtcattacaaagggcgcgccggatgtattgatgaagcgttcgtcgcatacgctgacagaagaaaagcgagaaatcttcacaaaggaaaggctcgctgaaacaagcgcggcgctggaaactcttgcgtcacaggcgctgagaacgattgccgtcgcgtataaaccgatcaaagatacagaaaatcccccgctcgaaaaagcggagtcaggcttaactttcatcgggctgttagggatgatcgatccgccgcggcccgaagtgaaaacagcgattaaagaatgccgggaagcggggatcaaaacggtcatgatcaccggcgaccatgtgataacggcgacggcgattgcaaaagatctcggattgctgcctccgcgcggaaaggtcatggacggccagatgctgaacgaactctcgcaggaagaattggcggaaattgttgacgatgtttacgtatttgcaagggtgtcgcccgaacataagctgaagatcgtgaccgcctaccaggaaaacggccacatcgtcgccatgacgggagacggagtcaatgatgcccctgcgattaaacaggcggatatcggcatatcgatggggattacgggaacggatgtcgccaaggaggcgtcctcactcatccttgtcgatgataattttgcaacgattaaatcggccatcaaggaaggacgcaatatctatgaaaatattagaaagttcatcagatacttgctcgcatccaatgtcggcgaaattttggtcatgctgtttgcaatgctgctcgctctgccgctgccgcttgtcccgatacagattctgtgggtcaaccttgtaacggacggcctgcctgccatggcgctcggcatggatcagcctgaggacgatgtgatgcagagaaagccgcggagtccgaaagaaggcgtgtttgcaagggggctcggctggaaggtcgtatcgcgcggattcttaatcggaatcgcgacactcggggcgtttatgttcatttataaccgcaatccagaagcgcttgagtatgcacagacggttgcatttgcaacgctcgtccttgcgcagctgatccacgtgttcgactgccgaagcgagcggtccatctttgaccgcaatccgtttgaaaacatttatttgctcggtgcagtgctgtcttcgattcttttgatgcttgtcgttatttattatccgccgctgcagccgattttccatacggttccgattttaatggcagactggctcctgattgtcggaatgtcggcgattccaacttttttactggccgggtcacttttgacaagaaaaaaatag

SEQ ID NO: 1907 - DNA, 876 bp, Bacillus licheniformis
atgatacggagtatgaccggtttcggcagcgcgagcaaaacgaaggatgggctgacagcagctgttgagctgaaatctgtcaactatcggtttaaagaagtaaacgcccgcatgccaagacctttgctctatttagaagacaaaataaagcaaacgatttttaaacatatacaaagggggcggctggagctgtttgtttccgttgacgacgaggctctggtcacccggaaaatccaggttgactggccgctgcttgaagagtaccagaaagccgcgcgcgaaatgaaagaccgctgcgggctttctggagacatcacgcttcaagacgcctttcagtttgagcatgtcatccaagttgaagaagagccaatccaaaatgacaagcttgaagaggttcttctagaagcggtcgaggctgccgttctagaattgtgcagcatgcgcgaagcggaagggctgaggctgaaggacgactgccttcagcatattgaaaggcttgaaaagctgacagacgacatcgcagagcttgctcccaaggtcgtcgaccactatcgggaacgccttgaggcgcggcttgaagaatggtcaacagacggtctcgatgaaagccgcctgctgacggaagtcgcactgtttgcagaccgttcggatatcacggaagaagtgacgaggctgaaaagccatttccgccagttccgcgatatttgcaaagcgggaggagccgcggggagaaagctcgatttcctcgtccaggagctcaaccgtgaagcgaacacgatcggttcaaaagcgaatgatcaccagatcacaaaacatgtggtcgaaatgaaaagctctattgaaaaaataaaagaacaagtgcaaaatatagaatag

SEQ ID NO: 1908 - DNA, 270 bp, Bacillus licheniformis
atgacgattaaactgatcaatatcggctttggaaatatcatatccgcgaatcggctgatctcgattgtgagtcctgagtccgcgcctattaagcggatgatccaggatgccagagaccgcggcatgcttatagatgctacatatggaagaagaacccgtgcggttgtcattatggacagtgaccatatcatcttatctgccgtccagcctgagacagtagcacaaaggctttccgttaaagaagaaattatggatgaagggcagggataa

SEQ ID NO: 1909 - DNA, 615 bp, Bacillus licheniformis
atgaaagaaagaggtttgttaatcgttctctccggcccttccggcgtcggaaaaggaacagtcaggcaggcgctgtttgctcaggaggacacaaaatttgaatattcgatttcggtgacgacaagaaaaccgcgtcaaggcgaaagagacggcgtcgactacttttttaagacgcgcgaagagttcgaagagatgatcgagaacaacaagctgctcgaatgggccgaatatgtcggcaactattacggaacacccgttgactacgtcgaacagacgcttgaaagcggaagggacgtttttcttgaaatcgaagtccagggtgcgctgcaagtcagaaaggcatttcctgaaggcttgtttatctttttggcgcctccgagcctcgccgaattgaaaaaccggattgtcacaagagggacagaaacagaagccctgatcgaaaaccggatgaaagcggcgaaggaagaaatcgaactgatggacgcctatgactatgttgtcgaaaatgacagcattgagcttgcgtgcgaaagaatcaaagcaatcgttctcgccgaacatttacggcgcgaccgagttgctccaagatataagaaaatgctggaggttgaataa

SEQ ID NO: 1910 - DNA, 201 bp, Bacillus licheniformis
atgctagatccgtcaattgactctttaatgaacaaactggattcaaaatacacgctcgttaccgtatccgcacggcgcgcccgcgaaatgcagatgaacaaagacacgcagatcgaaaatccgaagtcgcataaatttgtaggcaaagcattggaagaaattgatgccggactgcttacattcgaaaaggaaaatcgctaa

SEQ ID NO: 1911 - DNA, 1218 bp, Bacillus licheniformis
atgctgaaaaatcgcaacatcctgctgggagtaagcggaggaatcgcggtatacaaagcggccgccttaacgagcaagctcgtgcaggcaggagccaatgtgaaagtcatcatgacaaaatccgcctgtgaatttgtgtctccgctcacctttcaggcgctttcgcgcaatgaagtatataccaatacgttcgaagaaccgaatccccgtgtcatcgcccatatcgatgccgcagattgggcggatctcgtgatcgttgctccggctacggccaatgtgatcggaaaactcgcctcaggcatcgctgacgacatgctgacgacgacgcttttggcgacgacagcgccggtgtggatcgctccggcgatgaacgttcatatgtacgaccacccggccgttcagcggaacatcagcgttctttacaaagacggctaccggtttatcgaaccgagtgaaggctaccttgcgtgcggctatatcggcaaaggcagactggaagagcctgagcggatcgtccagttggcagagtcgtatttttcaagcgaaaaaagcggtttgcttgaaggaaagcgcgtcgtaattacagcggggccgacaagagaacaagtcgatcccgtccgctttttctccaaccgttcgacagggaaaatgggctatgctttcgctgaggaagcggcacgaatgggagcgcacgtgacgctgattgcaggcccgacatcgcttgatgatcccgcaggggtcgacgtgattcatgttgagtccgcagaagatatgtatcaagcggctctgtctgttttcgatgagagcgacatcgtcattaaaacagcagctgtcgctgattacaggccaaaacatgtccacgatcaaaaaatgaagaaaaaggacggcggcctcgtcattgagcttgaacggacgaaggatattttaaaagcgctgggagagcggaaaacaaagcaaatcttggtcggctttgcagccgaaacgcagcacgtcgaagactatgccaaacaaaagctggagacgaaaaatctcgatatgattgtcgctaacaatatcacggctgaaggcgccggttttggaacggaaaccaacatcgtgacggtgtttcatcgagacggcaaaaagacggcgcatcctctaatgtcaaagcgggaggttgccgccgcagtcttgaaggaagccgctgagcttgccggacggagcgggacgtcttcatga

SEQ ID NO: 1912 - DNA, 2418 bp, Bacillus licheniformis
atgaacttcgctgaagtgatcgtcgatgttacaacgaaaaatatcgacagaccgtttgattaccgcatccccgacaaattcaaaggtatgattaaaaaagggatgcgcgtgatcgttccgttcggcgcccgcaaaatccagggatttgtcaccagcgtgaaagaatcgtcggagcttgccggccgttcggttaaggatatcgaggatatccttgatctggcgcccgttttgacggaggagctgcttgagctgtcagactggctgacagaaaaaacactttcttttaaaattacggctttgcaggcgatgctccccgcggctatgaaagcaaaatacggcaaagaaatcaaggtgatcggcgataaaccgcttcccgaaccgctaaaaaccttgttctcgcaaaaagagacgctttcttattccgatataaatgaccacggaacattaaagctgattcagcgccaggttcaagaaggcaatcttgaagtggcgtataaagtaaagcagaaaacaaacaaaaaaatgcggagaatgatcgcccccctttgcgcgaaagaacatttaaaagaagcgcttgccggcctctctccgcaagctgtcaaacaaaaagcgatccttcagtttttcatcgaccgcaaagagggcggcgctgttccggcaaaggatctgatcgacaaaacggggggctcttccgcgtccttgaaagcgctcatcgacaaggggctgttaaaggaaagcgaagaggaggtttacagggatccttatcaggacagaatgttcaaaaaaaccgaaccgcttccgctgactgaagagcaggcgcaggcctacgaggcgatagcggatgcaatcgaagaaaagcggcacgatgtgtttcttcttcacggagtgaccggaagcggaaaaacggaagtctatctgcaatcgatcgaaaaggtgctggaagccggcaaagaagcgatcgttctcgttccggaaatttccctgacgccgcagatggtcaaccgctttaaagggcgctttggctcgcaggtagccgtactgcacagcgggctttcaacaggagaaaaatatgatgaatggcggaaaatccaccgcaaagaagtccggcttgtcgtcggggcgcgctcggcgattttcgcgccgtttgaaaatctcggcatgattataattgatgaagagcacgaaacatcgtacaagcaggaggagatgccgagataccatgcgaaagaagcggcgattcaaagggccgaataccaccagtgtccggtcgtgctcggcagtgcgacgccgacgctcgaatcgttcgcgagggcgaaaaaaggcgtgtacaagcttctttctctcaagcaccgcgtcaatcaccaagtcatgcccgacgtgtctctcgtcgatatgagagaggaactgcgcagcggaaaccgctcgatgttttccaaagacttaatggccgggcttgaggaaactcttgaaaaaggagagcaggccgttctgtttttaaacaaaagaggctattcctcatttgtcatgtgcagggactgcggatatgtcatccagtgtcctcattgtgaaatttcattgacgtaccacaggtatggacagcgtctgaagtgccattactgcggctatgaaaccggcatgccgtcaagctgccccgaatgcggaagcgagcatatccgctactttggtacaggcacacagcgggtcgaagaagaattgacgaaggttctgccggctgcaagggtgatccgcatggatgtcgatacaacctcaagaaagggagcgcatgaaaagctgctcacatcctttggcagaggcgaagccgatatcctgcttggaacgcagatgatcgccaaagggctcgatttcgaaaacgtcacgctcgtcggtgtcttgagcgcggatacgatgcttcacatccccgatttcagagccgctgaaaaaacgttccagctgatgacgcaggtgagcggaagagcggggcgccacgaaaagccgggcaaggtgatcattcagacgtacacaccttcccattacagcattcagctcacaaaaacgcatgattatgaaacattcttcaggcaggagatgctgcacagaagggaacaggcctatcctccatattattatttggcgctggtcagcgtatcgcacgaggaagtgacgaaggcggcactcgtgactgaaaaaatcgccacctatttaaaaaagaacatttcaagcgaggcgaagattctcggccctgtcgcatcgccgatcgccaggatcaaagatagatatcgctatcaatgcgtgataaaatacaaacaggaaaaccagcttacatcgttgcttaaaaacattatggatcattacaaacgagacattgaacaaaagcaattggcgatttcgatcgacatgaatccatatatgatgatgtaa

SEQ ID NO: 1913 - DNA, 483 bp, Bacillus licheniformis
ttggcagtaaaaccgatcgtaacgtatccggcggaggttcttgagacccctgccgaacccgttgcgtcttttgataaatcattaaagaaactactcgacaatatgtatgatacgatgcttgagctggacggagtcggactggccgctccgcaaatcggcgtttcaaaaagagcggcagtcgtcgatatcggcgatgacacgggaagaattgaactggtcaacccggaggtcatcgaagagagcggtgaacaaacgggtcctgaaggctgtttgagctttcctgatctatacggtgaagtgaagcgttccgattatgtaaaggtcaaggcgttcgaccgccgcgggaaaccttttacgattgaagctgagggctttttggcgcgtgcgctgctgcacgaaatcgaccatttggacggtattttattcacatcaaaagtaacgcgctattatgatgcggaagaacttgaggaaatggaaggatga

SEQ ID NO: 1914 - DNA, 951 bp, Bacillus licheniformis
atgacaaggatcgtttttatgggaacgccggatttttccgtcccggtgctcggcacattgattgatgacggctatgaggtagtgggtgtcgtcacccagcctgaccgcccgaaaggcagaaaaaaggtgatgactccgccgcctgtcaaggaggaagcgctgcgccgcggcattcccgtgctccagcctgagaaagtgagggaagaagcggaaacggacaagattttggcgcttgaacccgatttaatcgtaacggcggcattcggacagatcctgccgaaaaagctcctcgattatcctaaatacggctgtatcaatgtccatgcctctcttctgccggagctgcgcggaggagccccgatccattacgccattctggaaggcaaagagaaaacaggcgtgacgatcatgtacatggtcgaaaaattggatgcaggcgatatgctcgccaaggttgaagttgacatcgaagaaacagataatgtcggcacgctccacgataagctgagcaaggccggagctgcgcttctttccgaaacggttccgagaatcattgacggttcggtaaccccggaaaaacaggatgaacagaaagcgacatacgcgccgaacattaaacgcgagcaggaactgatcgactggtctaagcccggcgaagtcctgtacaaccaagtcagaggcttgaatccttggcctgtcgcatacacggtcttaaacggccagacgctgaaagtatgggccgcgaaaaaatgccaagccttaaaacaggcagagccgggggagatcgtcaccgttgaaaaagacggcattgtcgtcgcaaccggaaatgacaccgcgttaaaattaacggaagtgcagcctgccggcaaaaaaagaatgaaggctgaagattttgtcaggggagcgggtcttcaagccggaatgaaattgggtcatgacgatgaaaaataa

SEQ ID NO: 1915 - DNA, 1347 bp, Bacillus licheniformis
atgaaaaataatgtgagagaagtcgcgcttgatgcactgattaagcttgaccagaatcaggcatacagcaatcttttgcttcagtctgccatgaaagcgaacgatttaagcgacaaagacagaggccttttgacagaactcgtttacggcacccttcagaataagctggcgcttgattatatgctgaagccgtttattaaaaagccggaaaaggtgaaagactgggtcatccatctgttgagaatgtcgctgtatcagatggaatacctggagaaaatccctgaccgggccgctctttttgaagccgttgaaatcgctaaaagacgcgggcataaaggaatatcttcatttgttaacggtgttctgcgctccgttcagagggaaggagtgccttcctttgcggatattgccgatccgattgaacgccttgcggttgagacaagccatccggagtggcttgtcagagaatggacggatgcctacgggttcgaagcggcagaacaaatctgccggattcatatgatcccgccgaaacagacgatccgcgtcaacaggctgaaaaacgaccgggatacgcttctttcccgtctgaatgaagcggggattgaggcggaagaaggcgacttgtccaaagacgctgtcaaactgctgaaaggaacgattgcgtccactccttttttcaaagaaggcgaagtcaccatacaagatgaaagctcaatgctagtagcgagagcccttggacctgagcggggagaaacagtgctggatgcatgcgcagctccgggaggaaaatccactcatatcggcgaactgctcgaagatacgggaaaggtcgtctccctggaccttcatcagcataaagtaaagctgatcaaagaagcggcaggccggattggactttccaacattgaagcaagagcgctggatgccagaaaagccggagaagtcttcgaaccggaacagttcgaccggatcctcgtcgatgccccgtgttcgggattcggcgtcatccgcagaaaaccggatctcaaatacagcaaaacgcccgaagacagcgcgcgtctcgccgggattcagcttgcgattttaaacgaaatcgcacctttattgaaaacaggcgggacattggtttacagcacatgcacaatggacccgaccgaaaatgaacaagtcatgcatgcttttttggaagaacacgacgaatttgaagcggaccccaccctcgccgagcggctgcccgaaaaagcggcgccgtatgtcaaggatggaagcattcaaatccttccccactactttggaacggacggcttctttatttgcagcatgagaaagaagggatcacaataa

SEQ ID NO: 1916 - DNA, 1086 bp, Bacillus licheniformis
atggaatcgaaacaaaaagtaagaaaagaattgcggacagaaagaccgtccatctattcttttgaaatagaagaactgaaaagctggctatcggaaaacggcgagaagccattccgcgccgcgcaaatattcgaatggctatacgaaaagagagtcacgtcatttgaaaagatgacaaacctttcaaaagagctgcggacaaagctgaatgagcatttcgtattaacgacgctgaaaacggccgtcaaacagacttcccaagatggaacaatgaagtttttattcgagcttcatgacggctacacgatcgagaccgtattaatgcggcacgaatatggcaattctgtttgtgtaacgacacaggtgggctgccggatcggctgtacgttctgcgcatcgaccctcggcggcttaaagcggaacctggaagccggagagatcgtcgcacaggttgtcaaagtgcagcaggcgcttgatgaaacagatgaacgcgtcagctcaatcgtcattatgggaatcggcgagccgttcgataattttcaggaaatgcttgcgttcttgaaaatcgtcaaccatgataaaggactgaatatcggagcgcgccatatcaccgtatcaacgagcgggatcattccgaaaatctacgagtttgcagacgaaaagctgcagatcaactttgcgatttctctgcacgcgccgaacactgagatcagaagccggctgatgccgatcaacagagcctacaagctgcccgatctgatgaaagcggtcgattactacattaagaaaaccggcagaagggttacgtttgaatacgggcttttcggcggtgtcaacgatcaggttgaacacgcggaagagctggctgaattgctaaaaggaatcaaatgccacgtcaacttgattccggtcaactatgtacctgaacgagactatgtcagaacaccgaaagaacagattttcgcctttgaaaaaacattaaagtctcatggagtaaatgtcacgatcagaagagagcaaggccatgatattgacgctgcctgcggacagcttcgtgcaaaggagcgccaggaagagacgaggtga

SEQ ID NO: 1917 - DNA, 765 bp, Bacillus licheniformis
ttgaaaacagccttaaaaacggacaggggaaaaatacgccagcacaatgaagacgatgccggcattttcacagaaaaaaacggactggtattagctgttgtctgcgatggaatgggaggtcatctggccggcgatgtcgccagcaggatggccgtctcagcccttcgtgatatttgggaggaaaccgaagaagtcccggcttcgccggctgaaagcgaagcgtggctgaaagagcagatttcagccgtcaaccaaaaacttttcgaccattcgagggcccacgaagagtgccagggaatggggacaacggtcgtctgcgctttatacacgggaaaaacgctgacggtcgcccatatcggagacagccgctgctatctcctgcaaggcggaagtttcatacagctgacggaagatcactcgcttgtcaatgaactcgtgcggactggggggatttcgaaggaggatgctgaacaccatccgcggaaaaacgtgctcacaaaagcgctcggcacagatcccgaagtgaaggtagaagcccacacatttgaaatcgaaccgggtgatcaagtgctattatgttctgacgggctgacgaataaagtggatgatgagacactgaaggatatgctcacgactctttcttctgcggaggagaaagcggatcagctcgttcagctggccaatgacaacggcggcgaagacaatatcaccgtcgcgctattggaacttccttctcaaattgaagaaggtgaagacaagtgttaa

SEQ ID NO: 1918 - DNA, 1974 bp, Bacillus licheniformis
gtgttaatcggcagacggatcagcggacgttacgaaatcctgcgcgccatcggcggcggggggatggcgaacgtttatttagcgctggacatcatcctcgaccgtgaagtcgcgattaaagtgctgcggtttgacttcgttcacgatgccgattttatcaggcggttcagacgggaagcgcagtccgctgcaagcctcgaccacccgaatatcgtcagcatttatgatgtcggagaagaagatgacatctattatatcgtgatggagtatgtcgaggggatgaccctgaaagaatacataaatcgaacaggcccacttcatccgaaagaagcggtccaaatcatggagcagatcgtatccgccatcgcacatgcccatgataaccagattgtccaccgggatattaagccccacaacattttgatcgaccatatgggccacattaaagtgactgatttcggcatcgccatggcgctcagctcgacgaccatcacgcacaccaactcggttttgggctctgtccattatttgtcgcccgaacaggcgagaggcggattatcgacgaaaaaatccgatatctactcgctcggcatcgtgcttttcgagctgctgacggcgcgtatgccgtttgaaggagaatcggcggtcagcatcgcgctgaaacatctccaatcagaaacgccgtcggtgaaaagatggaacccggccgtgccgcaaagcatagaaaacgtcgtcctgaaagcgatggcaaaagatccattccatcgctatgaagcggccgaagagatggaaaacgatttgaaaacggctttcgacccggaccggctcaacgaaaagcgcttcacgattccatccgatgatgagatgacgaaagctgttccgatcatcaagaatctgccggaaaacgggagcagctcgcaatccggcggcggagaagaggaagcggctccattatcaaaaaaagaaaagaagaagcaggcaaaagcaaacaagaagaaaaaaagaaagaaatggccgcttatattgctgacggtgtttttcgttctggctgcgtcagccgtcttggctttaacggtgtttccgtcgctctttattccgaaagatgtggccgttcccgatgttgccggccttgaatatgaagaagccgtcatcaagcttgaagacgaaggatttgaagttgatccgaatgctgaagacattgccgacgataaaattgaagaagggctgatcgtgaagacggaccctgcagccggcgatatcgtgaaggaaggttcaactgtcaagctatataaaagctcaggcaaagagaaaactgaagtcgatgatgtggtcggccagaaagtcgatgtcgccaagaagcttcttgagcaaaaaggctttaaaaacatcaagacagaagaagtgcacgatgaagaagaagcgggaaccatcatcgaacaggaccctgcagccggaaccgaaatcgttgccgccgacgacgaggtcaaattaacggtcagcctcggtccggaagccattactttaagggatttaaaaacatacagcaaacaggcggcttcgggctatttggacgaccatcagcttgtccttgtcgaaaaggaggcgcattctgaagacgtgccggaaggtcaggtcattaaacaaaagccggaggcgggggcatcagtcaagccgggagacaaagtcgaggtcacgttttcgctcggacctaaacaaaagcccgtcaaaacggtgaccgagaaaattgatattccttatgaaccgggagcggcgggcgaagaacaaaacgtccaaatttcgatcgatgatgaagaacacagcatttctgacgtctacgaaaatttcaaaatcacagcgccggcagagcggacgatcaaattcaggattgcgcccggccaaaaagggtattatcaagtaacgatcaacgataaagtagtcaggtcaaaaacgattgaatatcctgaggatgaataa

SEQ ID NO: 1919 - DNA, 885 bp, Bacillus licheniformis
atgcctgagggcaaaatcattaaagcattaagtggattttactatgtattggatggcgatcaggtcattcagtgcagaggaagaggggttttcagaaaaaataaagtaacccctctcgtcggcgacgatgttgtctaccaagccgataacgataaggaaggctacattctcgagattaaagacagattcaatgaattggtcagacctccgatcagcaacgtggatcaggcggttctcgtgttttcggcaaaggagccgacattcagcacgtcgcttttggatcgttttttagtgctggttgaggcgggtgatattaggccgatcatatgcatcacgaaaatggaccttgtggatgatgacgcgctgaaagagcagattcatcaatatgccgaagactaccggaacatcgggtacagcgtctatttgacatcaatgaaaagcggaagaggcatcgaagacatcatcccccattttcaggataaaatcaccgtattcgccggccagtccggcgtgggcaagtcttcgcttttaaatgcgatcagccctgaccttgaactgaaaaccgccgggatttccgcccacttgggaaggggaaaacatacgacgcgccatgtggagctgatcgatataaacggcgggctcgtcgcggacaccccgggcttcagctcgcttgagtttgccggtattgaagctgaagatttagggcagacatttttggaaatcggcgaaaagagcgccgaatgcaagttccgcggatgcctgcatataaaagaaccgaactgcgccgtcaaacgcgccgtggaaaacggtgaaatcgcccagtatcgctacaaccattatgttgaatttttaacagagatcaaagatagaaagccgaggtattaa

SEQ ID NO: 1920 - DNA, 657 bp, Bacillus licheniformis
atggtatatgttgctccttctattctttcagccgattttgcccgtctaggggaggaaattcgagatgttgaacaaggcggcgccgatttcatccacatcgatgtgatggacggccatttcgttcccaacctgaccatcgggccgcttgtagtggaagccgtccgcccgatcactgagcttccgctcgacgttcatttaatgatcgaagcgcctgaccgctatatacctgcttttgcaaaagcgggcgccgatattttgtccgtccatgttgaagcatgcccgcaccttcacaggacgatccagctcatcaaagagcaaggggtcaaagcgggagtcgtcttgaatccgcatacccctgtgcagcagatcgagcatgtgcttgaagaccttgatctcgtattattgatgacggtgaatccgggcttcggcggacagtcgtttatttcctcggtcctgccgaaaatcaggcaggtcaaggagatggctgagcaaaaaggacttgccgatctgctgattgaagtggacggtggcgtcaacaaaaatacggcaagacagtgtattgaagcgggagcgaacctgcttgtcgcaggatctgccgtttataacgaaaaagaccgcaaaaaagccatttccgatataaaaggtgcgcttgggtaa

SEQ ID NO: 1921 - DNA, 645 bp, Bacillus licheniformis
atgaaaacgatcaatattgtagcgggaggccccgatcatcttattcccgacttgctgcagtatcaggccggggatgcgctttgggtcggggttgacagaggcgctgtcacccttttggatgcggggatcgtgcctgatgaagcattcggggattttgacagcatcacagacgagcaaaaaaaagcgattgaaaaggccgctccccgcctccatatttatcaggcggaaaaagatcagacggatttggaccttgcgttgagctgggctgtcggacagcgtccttcatttattagaatgttcggcatttcgggaggcagagcagaccattttctcgggaatctgcaccttctttataccgcgatgaagcaaaacgtcaagaccgtcatgatcgaccgccaaaatacgatcagcatgcatcccccaggctcctataccgtcatgcatgatcaaacaaaaccgtatatttcattcctgccgtttgcggagacggtaaaaaacctttctctcgaaggatttaagtattctttaaataagtgtcatattgctctcggttcgacactatgtattagtaacgaactcatccattcacaaggtgctttttcgttttcagaaggcatattaataatgataagaagcactgattaa

SEQ ID NO: 1922 - DNA, 78 bp, Bacillus licheniformis
atgaaattttacaccatcaaattaccgaagtttttagggggaatcgtccgggcgatgcttggctcgtttcgcaaagac

SEQ ID NO: 1923 - DNA, 186 bp, Bacillus licheniformis
atggcacgtaaatgcgttattacaggcagaaaatcacgttctggcaactctcgttctcacgcgatgaacgcttctaaacgcacatggggcgctaacgttcaaaaagtgcgcatccttgtgaacggcaagcctaaaaaagtatatgtatctgctcgagctttgaaatctggaaaagttgagcgtgta

SEQ ID NO: 1924 - DNA, 363 bp, Bacillus licheniformis
gtgtccattgaattccgaacaaaatacggacagattgatatatcaaacgaagtggtcgccatggttgcaggaggcgcagcgatcgactgctacgggatcgtaggtatggcatccaagaaccaaattaaagacggactgactgaaatcctcagaaaagaaaactttgcaagaggcgtcatcgtccgccaggaagaggatcgtattcatattgacatgtacatcattgtcagctacggaacaaaaatttcagaagtggcacataatgttcaaacaaaagtcaaatatacgctcgaccatacagtgggtcttgcagtggattccgtaaatatttacgttcaaggagtacgagtgacgaacccgtag

SEQ ID NO: 1925 - DNA, 1671 bp, Bacillus licheniformis
gtgtctatacgaaatctggatggaaaagcttttgcagatatgattctgtacggcgcacaccatctgtctcaaaacgcaaatgtagttgatgcgttaaacgtatttccggttccggacggagatacgggaacgaacatgaatctgtcgatgacatccggtgcgaaagaagtggagcaaatcgacaccgccaatatcggcaaagtggcacaaagcctgtcaagggggcttctgatgggggcgcggggaaactcgggcgtcattttatcccagctgttcagaggctttggcaaatcgattgaacagaaatcggaaattaacgcgaaagaatttgccgccgcgttccaggccggagtggacaccgcctacaaggccgtcatgaaaccggtcgaaggcacgatcttgacggttgccaaagatgccgcaaaaaaagcagtgctcgccgctcaaactgaaaccgatatcatcaaggtgatggaagctgtcgtaaatcaagcggaggcttctttggagcggacgcctgagctgcttccggttttaaaggaagtcggtgtcgtcgacagcggcggaaaagggcttctttacgtgtatgaagggtttctcgcttctttaaagggagaaaagctttctgataaagcggcagctcttccgtcattggatgaccttgtcagcgccgagcaccataaaaacgctcaaagccacatgaatactgaagacatcgaattcggctactgcacggagtttatggtaaagctcgacagcggcaaaagaaactttaatgaagatgcgttccgccaggatttaagccgcttcggtgattcgcttctcgtcgtctcagacgaaaatatcgccaaggtgcacatccatgccgaatatccaggggaagtcatgacttacgcgcaaaaatacggcagcttaatcaacatgaaaatcgaaaatatgagagaacagcacagcgcgattctcagccagaacaaacaggagacagcaccggcagaaaaagcaccggcagataaacagccgtacggcatcgtcacagtggccatgggtgaagggattgccgagcttttcgaaagcatcggcgccacaaagatcatagaaggcggccagacgatgaatccgagcacggaagacatcgttcaggcgataaaagacgccaatgcggacacggtcgtgattctgccgaataattcaaacattgtcatggcggcgaaccaggccgcggatgttgccggacaacatgtaattgtcatcccgacgaagaccgttcctcaaggaatggccgcactgctcgcattcaacccggccctttcagcggacgagaatgaagccgctatgctcggtgcgatcggcgaggtgaaaagcggacagatcacctatgcggtcagagacacaaacattgacggcatcgatattaaaaaaggcgattttatgggcatattaaacgggaaaatcgttgagacggcgtcagaccagttaacagcagcgaaaaagctgatcgcaggcatgatcgatgaagacagcgaaatcgtcaccgtgatcaaaggggaagacgccccggaagaagaggccgaagaactcgcagcctacatcagcgagacgtacgaagacgtcgaagtagaagtgcacgacggaaaacagccgctgtattcctacattctggctgtcgaataa

SEQ ID NO: 1926 - DNA, 663 bp, Bacillus licheniformis
atgaagtacagaagtgtgtttgatattatcgggcccgtcatgatcggaccgtcaagttctcatacggccggcgcggccagaatcggcagagtcgccagaagcgtgtttgggagggagccgaaacaaattattgtatcgctctacggttcttttgccgaaacgtataaaggacatggaacagatgttgcgatcatcggcggccttttggattttgatacatttgatgaaagaatcaaagattcgatccgtctagccgaagaaaagggaatcgccatagagttccgggaagaagaagcggtaccgaagcatcccaatacagcccgcatcctcatctctgatgatgaaggctcccttgaactcgcaggcatctcaatcggcggagggaaaatcgagatcattgagctgaacggcttcgaactcagattatcgggtaatcaccccgctattttagtcgtccataacgaccgctacggaacgattgcaggcgtagccaatgtgcttgcgaagttcgcaatcaacatcggccatatggaagttgcccgcaaagacgtcggccaggaagcgctcatgacgattgaggtcgatcaaacgattgatccggctgtttttgatgaattgagagcgctgccgaacatcattgaggtgacccagatcgctgactaa

SEQ ID NO: 1927 - DNA, 903 bp, Bacillus licheniformis
atgtttcgaaatgtgaaagaattaattcaactgacaaaggaaaagaacgtgtccatctctgaaatcatgatcacacaggagatcgaggtgacaggccggacgcgggaagatatattcaagcagatggaagccaacttggctgtcatggaagacgctgttcaaaaaggcattgagggcgtcgtatcgcactccggattgacgggcggagacgccgttaagcttcaggcctaccttaaatcgggcaaagggctgtcaggggctgtcatccttgacgctgtcagcaaagcggtagcgacaaatgaagtcaacgctgcgatgggaacgatttgcgcaacgccgacagccggatcggccggcgttgtcccggggacgctctttgcggtaaaagagaaacttcacccgacgaaagagcagatggtccgctttttatttacatcgggagcgttcggattcgtcgttgccaacaatgcgagcatttcgggagccgccggaggctgtcaggctgaagtcggatcggcctcgggcatggcggctgccgccatcgtcgaaatggcgggcggaacccctgaacagtgcgccgaagcgatggccatcgctttaaaaaacgtactcggtctagtctgcgatcctgtcgcagggctcgttgaggtgccgtgtgtgaagcggaacgcgatgggcgcagccaatgcgatggtcgcggctgatatggcgcttgccggcattacaagccgcattccatgcgatgaagtgatcgatgcgatgtacaaaatcggacagacgatgccgacggcactgagggaaacaggccggggcggtcttgccgcaacaccgacgggcaaagaattggagaaaaaaatattcggaggagcgtcagctgcacgtggaacacaatctgcaacttag

SEQ ID NO: 1928 - DNA, 2049 bp, Bacillus licheniformis
gtggaacacaatctgcaacttagtatatctgttataaaaggcgtcgggacggaaacggaaaaaacgttgaacgagctcggaatctatacggttctcgatcttttaaactacttcccgtaccgatatgacgattatgaattgcgcgatttggaagatgtggcacacgatgaacgagtgacggtggaagggaaggttcacagcgagccttctcttgcctattacgggaaaaagcggagccgtctcacgttccggcttttggtcgggaactatttgatcacagcggtttgctttaacaggccttatttgaaaaaaaagcttgcgatcggctcgattgttaccgtaaccggaaaatgggacaagcacagacaatccgtgatggtgcaagagctgaaaaacgggccgcaccagggtgatcagtcgattgaacccgtatactccgtcaaagaaaacatcaccgtaaagacgatgaggaaattgattcaggaagctgtccgcagccatttgccgtttgccgaagatcctcttccggaaaagcttcggaccgcctacaaacttctgtcttaccaggaggcggtaaaggcgatgcacaagcccgagtcgagggaagctttaaagcatgcgcggcgccgttttgtatatgaggaatttttgctgtttcagctgaaaatgcaggctttgcgaaagttcgagcgggaagcgtccgacggaatcagccacacctttcggctcgaagacgtcaattcgtttgtcaaaagccttccgtttcctttgacaaacgcgcaggcgaaagcgctcgacgacatattaagggacatggcttcagggtataaaatgaatcggcttttgcaaggagacgtcggttcaggcaaaacagccgtcgccgcgattgcactatacgcctcgctgctttccggattccagggggcgatgatggttccgaccgaaatactggcggaacagcacgccgattcgcttgtatccctctttgagcagcacgacgtcaatgtggcgcttttaacaagctctgtgaaagggaaaaggagaagagagcttttagaaagattaaaagaaggagaaattgatattttggtggggacgcacgcccttattcaggacgatgtccactttaaacagctcgggctcgtgatcaccgatgaacagcaccgcttcggcgtcgagcaaagaaaaaaactgagaagcaaagggaaagatcccgatgtcttgtttatgacggcgacgccgattccgagaacactggcgatcacggttttcggggaaatggatgtgtccgtcatcgatgaaatgccggctgggcgaaagcggatcgagacgtattgggtaaagcacgacatgctcgaacggattctcgcgtttatcgataaagaactgaaaaaaggcagacaggcgtatgtgatctgtcccttgattgaagagtcggacaagctcgacgttcaaaatgcaattgatgtgcacagcatgctgactcatgccttcaggggaagatggcagatcggtctcatgcacggaaagctgtcaaatgacgagaaagaacaggtaatgaggcagttcagcaaaaacgaatgccagattctcgtttccacaaccgtcgttgaagtcggggtaaacgttccgaatgcgacggtcatgctgatctatgatgccgaccggttcggtctttcccagctgcatcagcttcgcggccgggtcggacggggcgatcaccagtcgtattgcatcctgatggcagacccgaaatctgagacgggaaaagagcgcatgagcatcatgtctgagacgacggacggctttgagctttctgaaaaagatcttgaactcagagggcccggggactttttcggcaagaaacagagcgggatgccggagtttaaagtcgccgacatggttcacgactaccgcgcgctggaaacggcaagaagagacgctgcagaacttgtctcttcaaaagcgttctggacggatgccgaatataaaagcctgcgggaacacttgcaaaacagcggggttatggacggagaaaagctgagctga

SEQ ID NO: 1929 - DNA, 567 bp, Bacillus licheniformis
atgagaaaaagtaagagagaacgccaagaattgctgcagcagacgattcgtacgaccccgtttattacggacgaggagttagcggagaaatttaacgtcagcattcagacgattcgcttggaccgtttggaactttccatacctgaactgagagaaagaatcaaaagtgttgccgagaagtctcttgaagatgaagtcaagtcattgccgcttgacgaggtcatcggcgagatcattgatttggagctggatgagcacgcgatttcaattcttgagatcagaagggagcatgttttcagccgaaatcaaatcgccagggggcaccatttgtttgcccaggccaactcgctcgccgtcgccctcatcgacgatgagctcgcattgacggccaaagcggacatccgctttacaaggcaggtcaagcaaggcgaacgggtcgttgcaaaagcgaaagtcgtgaagcttgataaagataaaggcagaacggttgttgaagtgaacagctatgttgccgaagagcctgtgttttcaggcgaatttgtcatgtatcgttcaaaacaatcatag

SEQ ID NO: 1930 - DNA, 993 bp, Bacillus licheniformis
atgaaaattgctgtagatgccatgggaggagacaatgctcccaaagcggttattgaaggcgtgatgaaagcggtcgaagattttgaagacctcgagatcacgctgatcggcgaccgggaaaaaatagccgcccatttaacagaacacgggcggatcaccgtcaaacacgcggaagaagtcatcgaagcgacagacgagccagtcagagccgtcagaagaaagaagaattcatcgatggttctgatggccggagaagtcgccgaaggcagggctgatgcctgcatttccgccggaaacaccggagcgcttatgacggccgggctctttatcgtcggccggattgaagggattgaaaggcctgcgttggcaccgacattgccgaccgtctccggagacggctttctccttcttgatgtcggagcgaatgtggacgccaagcccgaacatctcgttcaatacgccattatgggatctgtttacggagaacaggtgctgggcgtcaaaaatccgcgcatcggacttttgaacgtcggaaccgaagataaaaaaggaaatgagcttgccaagcagacctttcaaaaattgaaggaaaccgatttgaatttcatcggcaatgtggaagcccgcgatatgctggacggagtcgctgatgtcatcgtcacagacggctttaccggtaacgttgccttgaaaacggtcgagggcgcggcgctgtccatttttaaaatgctgagaacgacgctgacttcgagcttcacggcgaagctcgccgcttctgcactgaagccgaagctgaaagaaatgaaaacgaaaatggattactctgaatacggcggagccggattgttcggcttaaaggcgcccgtcatcaaagcgcacggatcatctgacggacgcgccgtttatcacgcgatccgccaggccagagagatggtcagccaaaatgtcgcggcatttatcgaagaaaaaattcaacaaaaagcagatgaatag

SEQ ID NO: 1931 - DNA, 960 bp, Bacillus licheniformis
atgggcaagattgcttttctattcccgggccaaggttcgcagcatatcggcatgggacacgaattgtatgaaaaagaaccgaatgcgaagaagatttttgaagaagcggatcaaacgcttgaaacaaaactgagcaccctcatgtttgaaggggatgcaaaggaattgacgcttacatacaacgcgcagccaagccttttaacggcgagcatcgcagcgcttgaaaaactgaaggaatacggcattaaagccgactatgcggcaggtcacagcctcggcgaatacagcgcattggtcgctgccggcgccttgtcgtttaaagatgcggtttatgccgtcagaaagcgcggcgaattcatgaatgaagccgtgccggcgggagaaggcgcgatggcggccattctcggcatggacagccaggcgctgaaagaagtgacggacaaaatttccgaagaaggaaaccttgttcagctcgccaatttgaactgccctgggcaaatcgtcatctcgggaacagctaaaggcgtggagctcgcttcagagcttgcgaaagaaaagggcgcaaaacgcgcgattcctctcgaagtcagcgggccgttccattctgagctgatgaagctggcagctgataagcttcgtgaagttcttgatgcgtgcacgatcaacgacgcagccattccggtcgtctccaacgtaacggccgactttgtaacggataaagacgacattaagaataaactgattgaacagctgtattcccctgtacgctttgaagaaacaatcagccgcctgattgacgaaggcgtcacgaccttcattgaaatcggtcccggaaaggttttgtcagggcttgtgaagaaagtgaaccgcagagtcaaaacgattgctgtatcagacccgaacacaattgaacttgccgttcaaacgttgaaggaggaaaacgaaaatgctggaaaataa

SEQ ID NO: 1932 - DNA, 744 bp, Bacillus licheniformis
atgctggaaaataaaacagccgttgtgacaggagcctcaagagggatcggccgcgcgatcgccctggacctggcgaaaaacggagcaaatgtcgtcgtcaactacgcgggaaatgaagcgaaagcgaacgaagtcgtagacgaaatcaaagcgctcggccgcgatgcgtttgcttttaaagcggacgtttccaatgcggatgaggttcaggcgatgatgaaggaagcggtcggacgcttcggcacgcttgacatccttgtcaacaatgcgggcattactaaagacaatctgttcatgagaatgaaagaagatgaatgggacgacgtcattaacataaacttaaaaggtgtgttcaattgttcaaaagctgtgacaagacagatgatgaaacaaagaagcggccggatcatcaatatcacctcggttgtaggcgtcgtcggtaacgccgggcaggccaactatgtcgcggctaaatcaggcgtgatcggcttgacgaaaacgctggcaaaagaactggcgtcaagaaacatcactgtgaatgcgatcgctccgggattcatttcgacggaaatgacggacaagctgacaaaagacattcaagacgaaatgctgaagcagattccgcttgcgcggttcggcgagccgtctgacatcagcagcgccgttgttttcctcgcatctgaccatgcgagctacatgaccggccagacgctgaacatcaacggcggaatggctatggtttaa

SEQ ID NO: 1933 - DNA, 234 bp, Bacillus licheniformis
atggcagacgcattagagcgtgtaacaaaaatcatcgtagaccgcctcggcgtggatgaagctgacgtcactcttgaagcttcttttaaagaggatttaggcgctgattccctggatgtagttgagcttgtcatggaacttgaagacgagtttgatatggagatttctgacgaagatgctgaaaagattgcaacagtcggtgacgctgtgaactacataaatagtaagcagtaa

SEQ ID NO: 1934 - DNA, 750 bp, Bacillus licheniformis
atgtcaaaacattcacatttcagagacaaaaaaatgtttcaaaaaaaagcggagcagtttaaaaagtttcaggaacggatttcggttcaatttcaaaacgagaagcttttatatcaagcgtttacacattcatcttatgtgaatgagcatcgaaagaagccatatgaagataatgagaggcttgaatttttaggagacgccgttttggaactgacgatttctcaatttttatacgccaaatacccggcgatgagcgagggtgatttgacgaaattgagagcggcgatcgtatgcgagccttctttggtttccctggcccatgagctttctttcggagagcttgttctattgggaaaaggagaggaaatgactggaggaagaaagcgtccggcgcttttagccgatgtgtttgaagcttttatcggtgcgctctatctggatcaggggctcgaagccgtcgtgacttttctgaaagcgtacgttttccctaaaatcgacgatggtgctttttctcatgtgatggattttaaaagccagctgcaggaatttgtacagcgcgacgggcgaggcatactggagtataaaatccttcaggaaaaaggaccggcgcacaaccgcgaatttgaagcaaatgtatcgctaaaaggagaagtacttggggtgggaagcggccgttccaaaaaagaagctgaacagcatgccgctcaagaagcgctcgcgaagctgcaaaaacaccatatgaaacaataa

SEQ ID NO: 1935 - DNA, 3561 bp, Bacillus licheniformis
atgttcctcaaacgtttagacgtgataggatttaaatcgtttgcagaacgaatttctgtagattttgtaaaaggcgtgacagccgtcgtcggcccgaacggcagcggaaaaagcaacatcaccgacgcgatccgctgggtgctcggtgaacagtccgccaaatcgctcaggggcggcaagatggaagatatcatttttgccggcagcgactcgcggaaaaagctgaaccttgccgaagtgacgctgacgcttgacaacgatgaccgctttttgccgatcgattttcacgaagtcagtgtgacgagaagagtctacagatcgggggaaagcgaatttctcatcaacaaccagccgtgccgcctgaaagatatcatcgatctttttatggattcagggcttggaaaagaagcgttttccatcatcagccaaggcaaagtcgaagagattttaagcagcaaggctgaagagcggagaagcatcttcgaagaagcggccggcgtattaaaatacaaaacgagaaagaaaaaagccgaaaacaagctgtttgagacacaggacaatttgaaccgggtcgaagacatcctccacgagctcgagggacaggtggagccgctgaaagtgcaggcatcgatcgccaaagactaccttgaaaagaaggatgagcttgaaaaaatcgaaatcgcgttaacggcgtatgacatcgaagagcttcacggaaaatgggaagcccttcagcaaaaagtcgaaaaggcgaaagacgaagaaatgtcctcttctgcggccatccaggcaaaagaagccaaaatcgaagaggcaagagacaaaattcaagcgctcgacgaatcggtcgatgagcttcagcaagtgctgcttttgacaagcgaggaactggagaagcttgaaggccggaaagaagtgctgaaggaacgcaaaaaaaacgccacgcaaaacagagctcagcttgaagaagcgatcgtccagcgcagtgaaaaagagcgaaccctgaaagagaaaatcgccgcgcagaagcttgtgtttgaaaagctcgagactgaagcaaaagagcttgcccgacaggtgaaagaaaaaaatcaggctttatccggatacagcgaaaatgtagaggaagaaatcgaacagctgaaaagcgattatttcgagctgttgaacgaacaggcttccgtccgcaacgagcttcaatttcttgaagaccaaatgacccaatctgcggcacagcagaaacggctcgcacaaaacaatgaaaaatatttaagcgagcggaaggaaatcgccgaccaaaagatgaaaaccgaacacgaattcagcctcgtggacgagcgtcttcacagccagattcaagcattcagggacgcgcaaaaaagctatgaacagaaaaaaagccagtacgaaaaaaaggaatccgccctttaccaggcttatcaatacgttcagcaggcgcgctctaaaaaggaaatgcttgaagcgatgcaggaggacttttcggggttttatcaaggcgtcaaagaagtattaaaggccaagagcgagcttccgggaattcgcggcgcgattgcagagctgttaaagacggacgagcggtatgaaacagcgatcgaaatcgcgctcggcgcaacagcacagcatgttgtcacagaagatgaagacgccgccagacgggcgattcaatatttgaaaaagcattcgttcggaagggcgaccttcctcccgctttccgtcatcaaagagcgccgcatccagccgagagacatcgagacggcgaaagaaaacccgtcgttcatcggcatcgccagcgagcttgtttcatttgatccggcctaccggagcgtcgtgcaaaatctgctcggcaccgtgctgatcaccgagcatttaaagggcgccaacgaccttgccaagcggctcggccacagataccggatcgtcacccttgaaggggatgtcgtcaatccgggcggttccatgacgggaggagctgtcaagaaaaaaagcagctcgcttctgggacgaaacagggaactggaagcccagacaaaacgcctcgccgagatggaagaaaaaaccgaattgctcgaaaaagaagtgaaagccctgaagcagaccattcaggagcttgatgccaagctacagtcacttcgcgaggacggagaacgcctaagatccgagcagcaggaaatcaaaggccgtctgtacgaactcgaaatcgccgagaaaaacgtcaacagccatttggagctctatgaccaggaaaaatcggctctgcttgaaggggacgaagacaagaagcggcgtaaagaagagcttgaagaaaagctcgcatcgatcgccggcgagctgcagcgccttgattccgaaatcgaagccatgacggagcggaaacagacgcagacctcgacgaaagaagcgttgcaaagcgagctgaccgatttgaaagtggtgctggcgaaaaccgaacagtcgtgtgcaaacgaacgggaaaagctcgcaaggcttgaagaagagtatgccgagaatgcggaagcgctcaaggtggccgaagaggatctttctttcttaacgacagagatgtcctccaattcttccggtgaggaaaaacttgaagaagctgcgaaaaagaagctgaacgataaaaataaaaccgcagagctcatcgcctcaagaagagaacagcggatgaagctgcaaaaaggccttgaaaccgaagagctcgaactgaaagaaatgaagcgccagtataagcagatggccggtctcttaaaagatgaagaagtcaagctcggccgcatggaagtcgagctcgacaacctgctctctttcctgcgggaagagtacggcctttcatttgaaggggcaagggaaaaatatcctttggagctttcccctgaagaagcgaggaagcgcgtcaagctgatcaagcttgcgatcgaagagctgggaacggtgaaccttggcagcattgaggaattcgaaagggtcaatgaacgctacctcttcctttcagagcagaaagacgacctgctcgaagcgaaaaatacgctctttaaggtcatcgaggaaatggatgaggaaatgacgaagcgttttgcggaaacatttgcgcagatcagctcccattttgaagacgtcttccgggcgctgttcggcggcggaagagccgagctcaagctgacagatccgaatgacctgctccaatcgggcgtcgatattatcgcccagcctccgggcaaaaagctgcagaacctgagcctgctttccggcggggaacgggccttgacggcgatcgcgctcctgttttcgatcctcaaagtcagaccggttccgttctgcgtgctggatgaagtcgaggcggcccttgatgaagcgaacgtgttccgctttgcccaatacttgaaaaaatacagccatgaaacccagttcatcgtcatcacccaccggaaaggaacaatggaagaagccgatgttctttacggcgtgacgatgcaggaatcaggcgtttccaagctggtctcagtcaagcttgaagaaacaaaagaattagttcaataa

SEQ ID NO: 1936 - DNA, 987 bp, Bacillus licheniformis
atgagcttttttaaaaaactgaaagaaaaaatcacacagcagaccgattcggtctcaggcaaatttaaagaaggcctggcgaaaacgagaaatacgtttcaggagcgggtcaatgagcttgtctcccgctaccggaaagtggacgaggatttttttgaagagcttgaagaggttctgatcggcgctgatgtcggcgttgcgactgttatggagctgattgacgagctgaagagcgaggtcaagcgaagaaatattcaggacccgaaagaggtgcagtccgtcatttctgaaaagctcgttgaaatctatgaaggcggggagcaggaagcatcagagctccgcgtcgaagacggccgcctaaacatcattttattcgtcggcgtcaacggcgtcggcaaaacgacgacgatcggcaagcttgcccatcaattcattaaagaaggcaaaaatgtcgttcttgctgccggagatacattcagggccggcgcgatcgaccagcttgaagtgtggggagagcgcgtcggcgcgcatgtcgtcaaacaggcggaaggctcggatcctgcggctgttatctatgacgccgttcaagccgcgaaagcgcgcggcgccgatgtcctgctttgcgacacggcaggacgcctgcaaaataaagtgaacttaatgaaagagctagaaaaggtaaagcgcgtgattcagcgcgaagtgcctgatgcgcctcatgaagtgctgctcgtactggatgcgacgacagggcagaacgcaatgacacaggcgcgcgaattttccaaagcgactgatgtctcaggcatcgtgctgacgaagctcgacggaacggcaaaaggcggcatcgtcctcgccatccgccatgagctgcagattccggtcaagtttgtcgggctgggggaaaaaatggatgacctgcagccgtttgaagcagagtcatatgtatacggcctgttttccgatctgatcgagaaagaagagtag

SEQ ID NO: 1937 - DNA, 324 bp, Bacillus licheniformis
atgacgcttgaaaaaacaacgagaatgaattacttattcgatttctatcagtcgttgttgacatcaaaacaaaaaagctacatgtcgctttactacttagacgatttctcccttggcgaaatagctgaagaatatcatgtctcaaggcaggcggtctatgacaatatcaaacggaccgaagccatgcttgagcaatatgaagaaaagctacttttgtttaaaaaatttcaagagcgcaaaaagatttttgaagcgctgagaaagctgactgacggtcagcctgaggcggagtccctgattgatgcgcttgagaaattagattag

SEQ ID NO: 1938 - DNA, 1341 bp, Bacillus licheniformis
atggcattcgaaggattagccgaccgactgcagcaaacgatctcaaaaatccgcggaaaaggaaaagtaacggagcaagacgtcaaagagatgatgcgcgaagtccgtttagcgctccttgaagcggacgtcaattttaaagtcgtgaaagattttgtgaaaaaggtaagcgaacgagctgtcggacaagacgttatgaaaagcctgacgcccggacagcaggtcattaaagtggtaaaagaagagctgacggagctgatgggcggcgaggaaagcaagattgccgctgcaaagcgtccgccgaccgtcatcatgatggtcggtctgcaaggggccggtaaaacgacgtcgactggaaagcttgccaacctgcttcgcaaaaaacataaccgcaatccgctgctcgtggcagcagacatctaccgcccggcggcgatcaaacagctggaaacgctcggcaagcagctcgatatgccggtattttcactgggtgacaaggtcagtccggtggagattgccaagcaggccatcgaaaaggcgaaagaagatcatcacgactacgttctcatcgatacggcgggacgccttcatattgatgaagagctgatggatgagcttgagcaggtaaaagaaaccgctcagccggaagagattttccttgtcgttgactccatgacgggtcaagacgcggtcaatgttgccaaaagctttaacgaacagctcggtgtgacaggtgtcgtcttgacgaagcttgacggcgatactagaggcggagcggccttgtcaatccgcgccgtgacaaacacgccgatcaaattcgccggaatgggcgaaaagcttgatgcgctggagccgtttcatcctgaacggatggcttcgcggatactcggaatgggcgatgtgctcacccttatcgagaaagcccaggccaacgtagacgaagaaaaggcgaaggaactcgagcaaaaaatgaaaaatatgagctttacgctcgacgactttttggaacagctcggacaggtccgcaatatggggccgcttgaagacctgattcaaatgatgcccggcgcaggcaaaatgaaaggcttaaaaaacgtgaaggttgatgaaaaacagctcagccatatcgaagcgatcatcaagtcgatgaccgggaaggaaaaagagcagcctgagatcatcaatgcaagcaggcgcaaacggattgctaaaggaagcgggacatcggtccaggaagtcaaccgtcttttaaagcaatttgaagaaatgaaaaaaatgatgaaacagatgacaaacatgacaaaaggcaagaaaaaagggtttaaactgcccttcatgtaa

SEQ ID NO: 1939 - DNA, 273 bp, Bacillus licheniformis
atggcagtaaaaattcgtttaaaacgtatgggagctaaaaaatctcctttctatcgtattgttgtagcagattctcgttcaccgcgtgacggccgcttcatcgaaacagtcggaacttacaacccgcttgcaaaaccagcggaagtcaaaatcgacgaagagcttgcgcttaaatggcttcaaacaggagctaaaccgtctgacacggttcgcaacctgttctcaaaagaaggcattatggaaaaattccacaacgctaaacaaagcaaataa

SEQ ID NO: 1940 - DNA, 231 bp, Bacillus licheniformis
ttggaagagctgattgtatcactggtcaagccgcttgtggatcacccggatgatgttcaggttttcaaagaggaaaatccagagcggattatgttccgcctgtctgtcaacagagaggataccggcaagatcatcggcaaaaaagggcgcactgcaagagcgatacgctctgtcgtatttgcggcaggcgcacagtcttctaagaaagttcaacttgagatcgcagactaa

SEQ ID NO: 1941 - DNA, 387 bp, Bacillus licheniformis
atgcaaattatccaacgtgttaccgtcatgcaggttttgactgaaaacagcaaaaaaaagctgctggcttcttttgaagaaagaaaggaaatccttgagcgcgaatgcaaccagctctattttcagctcaggaaacacgaaaaggaacaccacaatccggcggcgactgaatcatttaaaaaagaaattgaaaaacgacaggacaagattaaaatgatcgtttttcaaatcaatcaaatccacacactgccgcttggcagcgaagtaaaggaaaaagaaatcgacgctttaatggacattgaagtcggggataattggcatgatatgacggcgggaaaaacaatcgtgattaaagacgggatcgtcattgaaattcgtccgaggtga

SEQ ID NO: 1942 - DNA, 525 bp, Bacillus licheniformis
atgctgaaacaatggtttaatgtagggaaaattgttaatactcatggggtaaaaggcgaagtccgcgtcatttcaagaaccgattttcctgaggagcggtacaagcccggaaacgcgctctacttgtttctggaaggaaaagacgagcctgtccaggtgaccgtcagcgcccacaggcttcacaaacagttccaccttttgcagtttaaagaggttgaaacgctcaccgaagccgaaaaattaaagaatgccttgattaaagttcccgaagaccaattaagccagttggcggaagacgaatactactttcacgaaatcatcggctgcgatgttttctcggaagacggggatttaatcggcaaggtgaaagaaattttaacgccgggcgccaacgatgtctgggtcgtggccagaccgggaaagaaagacgcgctcatcccttatattgacgccgttgtcaaagagattaacgtagcggataaaacgatcaagattcatatcatggaaggattacttgacgaatga

SEQ ID NO: 1943 - DNA, 732 bp, Bacillus licheniformis
atgaaaatcgattttttaacgctttttccggaaatgtttgaaggcgtgctcggctcgtcgatcctgcaaaaagctcaggacaaggacgctgtccgttttcgcgtggtgaactttcgggcctattccgacaacaagcatcaaaccgttgacgattatccatacggcggcggagccggaatggtgctgaaaccgcagcccgtctttgacgcggtcgaaaagctgacggctgaagccggagggtctccgagaatcatcctcgtctgcccccagggtgaacgctatacccagcagaaggcggaagaactggcgcgggaagagcatttaatgttcatttgcggccattatgaagggtatgatgaacggatcagggagcacctgtctacagacgagatttcgatcggagatttcgttttgacagggggagagctgccggcgatgatgatcgcagacagcgttgtgcggcttttgccgggcgtgctcggcaaggaagaatcgcaccttgaagactctttcagcacagggcttcttgaacaccctcattacacgcggccggcagattataaaggcttgaaggtgccggacgttctgacatccgggaaccatgcgaagatcaaagaatggcggcggaaggagtctctcaggcgcacatttttaaggcgtcccgaccttctggaaaactatcctttgtcagaagaagagcgaaagtggatttctgaatggaaaaaccggtag

SEQ ID NO: 1944 - DNA, 117 bp, Bacillus licheniformis
gtgcgcaattgttcttttgtgatttcttcaatcaatttttgcatcgtcttcaactccttccaacagatgctcttgcgcgagttaaccggcacagcggaacatcgttttcaaacttaa

SEQ ID NO: 1945 - DNA, 348 bp, Bacillus licheniformis
atgcaaaaattgattgaagaaatcacaaaagaacaattgcgcactgatttgcctgcgttccgtcctggtgatactttacgtgtacacgttaaagttgtcgagggtaaccgtgagcgtatccaggtttttgaaggtgtcgtgattaagcgtcgtggtggcggaatcagcgaaactttcacagttcgtaagatttcttacggtgtcggagttgagcgtacattcccattgcacacaccgaaaatcgcgaaaatcgaagttgtccgtcatggtaaagtacgccgtgcgaaactttattacttgcgcgaacttcgtggaaaagcggctcgtattaaagaaatcagacgataa

SEQ ID NO: 1946 - DNA, 117 bp, Bacillus licheniformis
gtggaaaagcggctcgtattaaagaaatcagacgataatgataacgaacgaaaagagcttgttaaccataacaagctctttttttgtcaaacaagtataaatgcatcgcaccattaa

SEQ ID NO: 1947 - DNA, 852 bp, Bacillus licheniformis
atggtgatccaatggttccccgggcatatggccaaagcgaggcgggaagtaacggaaaaactcaagctgatcgacattgtatacgaactggtcgacgccagaattccgatgtcttcaagaaacccgatgatcgaagacattttaaagaacaagccgagaatcatgctgctcaacaaggcggataaagcggactcctccgtgacaaaggcttggaagcagcactttgaaaaagacggaattcctaccctcgccatcaactcggtcaacggacaggggctcaatcaaattcttcctgcatcaaaagagctgctgaaagaaaagtttgataaaatgaaagcaaaaggtgtaaagccgcgcgcgatcagagcattgatcgtcggtattccaaacgtcggcaaatcgaccttgatcaaccggcttgcgaaaaaaaacatcgccaaaacgggcgacagacccggagtaacgactgcacagcagtgggtgaaggtcggaaaagagctggagcttctcgatacaccggggattttatggccgaagtttgaggacgagcttgtcgggctgaggctcgcggcaacaggcgcaattaaagattcgattatcaacttgcaggatgtcgccgtctacggtttgcgctttttggaagagaattaccccgaacgcttaaaaaagcgctatgacctggaggagattcctgaagaaattgcagcgctttttgatgagatcggaaaaaaacgcggctgcctcatggccggaggcgagatcaattacgacaagacgacagaagtcatcatccgcgatatccgcaccgaaaaattcggcccgctttcttttgaaaagccggaggatatgtaa

SEQ ID NO: 1948 - DNA, 768 bp, Bacillus licheniformis
gtgaaaacattaaccgtcaaagaaattaaagaacatcttcaatcggtgagcgatgaaaaggacccttttatagagcagtgcaaaaatgatgagcgaaaaagcgttcaagcgctcgtcgacgcctggctgaagaaaaatgaaaggctttcggccatgcgggaagagtggcaggcgatgacgtcttttgaacggtcgctgagagcgcggggctatcaatatatcgccggaatcgacgaggcgggcagagggcctctcgcagggccggttgtcgccgccgctgtcatcctcaaagaagattgtgaaatattagggctgacagattcgaaaaaactgtcaaagcaaaaaagagaagactattattcatacataatggaagaagccgcagcagtcggcgtcgggatcgcggacgcccatgagatcgatgagctgaatatttatgaagcctccaaagcggcgatgctgaaagcggtccaagcgctggacgtcgcaccggattatcttctgatcgacgccatgtcgcttgcggtcgatagagagcagtcatcgattattaaaggggatgccaaaagcgcctcgatagcagcaggcgcatgcatcgcaaaggtgacgagggacaggctgatggatgaatacgctgaaaagtatcctctctacgggtttgaaaagcataaaggctacggaacgaaggagcatctgaatgccctggcgaaatacggcccgtcgccgatacaccgaagatcgttcgcccctgttaaagcacatgaataa

SEQ ID NO: 1949 - DNA, 1689 bp, Bacillus licheniformis
atgatgctgaacgatgtacataacagcttaagaaaacaatttgaacaagcggattctctccagcggatcagcggaacggagacggatcagaaaaggctgatgctcggcaaagtgctccgctttatcagcgagcagttcgccgaaatacaaatcggcaatacgaaatggcaggggaagcttgaggcacccctgaaagcgggcgctcattactggttttcgtatgaaaagaagccggatgaagcgacaggccgccttcaggtcgttgaagcgtttgacaaaaacccgaagaccgtgcaggatgccgcctttaagctgttgaacgggctttctctgaagcggacgaaggaagccgtctttctggtcggagcgttgctgaaggagcagcagccgatcagggaaaacgatttaagagccgccatcaagtggcttgaaaatctgccgaagtccgatgcccaaaaaggcgccgatgccgtcatgttcgctcttaaacgcgaacttcccgtccaccccggcgtgctcgattcgattatggccgtcaaaagccccgttccgctcaatgagcagattgcgagaacgcttgatatgatcgcgaacgccgctcagccatccccaggcatggaaaagctgaaacaggcgcttttgccagttttacaagcggagactgaggtgcatgccgaaaggctgattcaaaagcttgcggaacacatcagatcgctggaaaaaggagaactgcaggccgttctgccattaaagccgcaggttcagtcagaaggcggaaaacctccgcaaaaagcagacgctggcggcgcatacggacaggaagcaaaagcagcccagcacaatccgcaaatcgcagcagctaaagacgtgttcgctaaattggcggcacaagccgaaacgaacgggacgcatattgcaagagaagcggcaggcgtcatcagagcgcttgaatcgcgcggagctctcggacaagctccggccgttctggaaggattcacgccaaaagagacggaacttttgcagcatatcatgaaagaaacagcgcctgcattgacgaataaagccgatgtattatccgttctcctcaagatcaaagatgttttaggcgtcagagatgagctctcattgttgagagcgatggaaaacggcgccgttctcaaagagcagggcctgcaatctttaaagctcgtgctgaatgaaatgaggcatgcttccgatcttccggctcctgtaaaacaggaagcggaccaaatctttcaccgtttaaacggacagctgtttttgcagaatgatcagcctgcccagagccagctttttctgtcgtaccctctgttttcaaagaacggcgtccaggatttgaacgttttcttaaaagggcagaaaaaagacgacggaaaaatcgacccttcccagtgccgcctcatgttttaccttcagttggaagcccttgaagagacggtgatcgattgtttgatccagcaaaacgtcatgacggttacaattgaaacaaagttcgatttggagtctttgattgaaccgctggtcccggctttaaaggaaaacctgaaagagctgggctacagcttgtcaggcgtctcagcaaaaaaacgggaaaacatgaagctcgctccgtttttggagtcccgttttgaacaaattacagagagcgcagtggatgtgaaaatatga

SEQ ID NO: 1950 - DNA, 282 bp, Bacillus licheniformis
atgaaggaatctgttccattaagaagagctgttgcgcttcactacgatgaaatgaaggacaaggcgccgaaggtggttgccaaagggtcgggatacacggcggagaagatcattgaagaggcgcagaaagccggtgttccgattcaggaagatgcgacgcttgtcgaattgatgcgccacttggagcttgacgaccacattcctgaagcgctttacgagatcgtcgccgagatcttttcattcgtctatacgcttgatgaaaaaatgaaaaagagggaatga

SEQ ID NO: 1951 - DNA, 1161 bp, Bacillus licheniformis
atgaatatccatgagtaccaagggaaagaagtactcagaaaatacggagtggctgttccggaaggtaaagtggcatttacagcagatgaagcggtcaaagcagcggaagcgctgtccagctcggtttatgtcgtgaaagctcaaattcacgccggcggacgcggtaaagctggcggggttaaaattgcaaaatcaaaagaagaagtcaaagcctatgcggaagaattgttgggaaagacgcttgtcactcaccagacgggtcccgacggccaacaaataaaacgcttacttattgaagaaggctgcgatatcaaaaaagaatactatgtcggtctagttctcgacagggcgacttcacgcatcgtgctgatggcctctgaagaaggcggcacggaaattgaagaagtcgctgaaaaaacaccggaaaaaatcgtcaaagaagtgatcgatccggctgtcggactgcagagctaccaggcgagaaaaatcgccttcgccatcaatattccgaaagagcttgtcggccaggccgttaagtttatgatggggctgtacaaggcgtttactgaaaaagactgttccattgctgaaatcaatccgctcgtcgtcacaggggacggaaaagtcatggcccttgacgccaagctgaactttgacagcaatgcgctatacagacaaaaagacatcttggagtacagagatctcgatgaagaagatccgaaggaaatcgaagcatccaagtatgatttaagctatatttcgctcgatggaaacatcggctgcatggtcaacggagcggggcttgcgatgtcgaccatggacattatcaagcactacggaggggaaccggccaacttccttgacgttggaggcggcgcgacagccgaaaaggtaacggaagcgttcaagatcattttgtctgatcaaaacgtcaaagggatctttgtcaatattttcggcggcatcatgaaatgcgacgtcattgcagaaggcgttgttgaagcgacaaaacaagtcggtctgacattgccgcttgtcgttcgccttgaaggcaccaatgtcgatctcggcaagaagatcctcgatgattcaggactcaatattacgtctgcggaatcaatggctgacggcgcgcagaaaatcgtatccttagtgaagtaa

SEQ ID NO: 1952 - DNA, 903 bp, Bacillus licheniformis
atgagtgtatttattaataaagacacaaaagtcattgttcaggggataacgggttcaaccgctttgtttcacacaaagcagatgcttgaatacggaacgaaaattgtcggcggagtcacaccgggcaaaggcggaacagaggtcgaaggggtgcctgtgttcaatacggtcgaagaggctgtaaagcagaccggggcaaatgcgtctgtcatttacgttcctgcggcttttgcggccgatgcgattatggaagcgacagatgctgagcttgatcttgtcatctgcattactgagcatattccggtgcttgatatggtaaaagtcaaaaggtatatggaaggcaagaaaacgagactcatcggtccgaactgcccgggagtcattacgcctgaggaatgcaaaatcgggatcatgcccggatatatccataaaaaaggccatgtcggcgttgtgtcgcgttcaggaacccttacatatgaagcggttcatcagctttccgaagcaggagtcggccagtcgacagcagtgggcatcggcggagaccccgtcaacggcacaaacttcatcgatgtgctgaaggcttttaatgaagatcctgatacacatgcggtgatcatgatcggcgaaatcggcggaacagctgaagaggaagcggctgaatgggtgaaagccaacatgaccaaacctgtcgtcggtttcatcggaggaaagacagcgcctccgggcaagcgcatggggcatgcgggcgccatcatttccggaggaaaaggcacggcggacgaaaagatcaaaacgatgaatgcctgcggaatccaagtggctgaaacgccttctgtcatgggagaaacattgattaaagtgctgaaggaaaaaggtctttacgaaacgtgtaaaacacactga

SEQ ID NO: 1953 - DNA, 903 bp, Bacillus licheniformis
atgaacgacagcagcgagcttttgatattgctccgccttcgcggcacactctccccttctctgctgaccaagtggtggaagcaggacccttccttgtctcttacgggcgaaaaaaaccatcttttaacgaagctttcattaaaaagatcagacttgtgctccatacgaaaactggcggaacaagaactgtctaatgttaaacggctcatccgttcttacgaggcggccggcgtccgcatgaccgccatatcttcccctgattatccagccagcctgaaaaccattcatgacccgcctcccgtcctttttttaaaaggaaacaaaaaacttctccatgaacaaagactgatcggaatcgtcggaactcgctgcccgtcattatacggaaaaagagctgcggtccagcttgtcagggagctttgcaaaaacagctggacgatcgtcagcggtcttgcaaaaggaattgacggtctcgcccatcaggagagcatccgttcaaagggaaggacaatcggcgttatcgcgggcggattcaacagcatatatccccgtgaacatcgccagctcgccggacaaatggccgaaagccacctgctggtatcagagcaccctcctcacattaaaccgcaaatatggcattttcccatgcgaaatcggctgatcagcggattaacggaaggaatcgttgtcgtccaaggcaaggaaaagagcggatcgctcattacagcataccaagcccttgagcaggggcgggaggtgttcgccgtgccgggtccgatctttgatgccaactctttcggtccttcaaggctgatccaggaaggggcgaaactcgtattaactattgaagacattttgaacgaacttccgccttcaaacgctcaatatacagagcctgtttag

SEQ ID NO: 1954 - DNA, 2076 bp, Bacillus licheniformis
atgtccgaatacttagtcatcgtggaatcgcctgcaaaggcaaaaacgattgagcgatacttaggaaaaaaatataaagtaaaagcctcgatggggcacgtcagagatttgccgaaaagccagatgggcgttgacatcgagcagaactttgaaccaaaatacattacgatccgcgggaaaggccccgtgttgaaagaattaaaaacggccgccaaaaaggcaaaaaaagtttatctcgcagccgaccccgacagggaaggggaagcgattgcgtggcatttggcgcacagccttgatttggacctgaattccgactgccgcgtcgtatttaatgaaattacaaaagatgcgatcaaagaatcatttaagcatccgcgcatgatcaatatggatcttgtcgacgcccagcaggcgagaagaattctggaccgccttgtagggtacaaaatcagtccgatattatggaaaaaagtaaaaaaaggcttgagtgcgggacgtgtccaatctgttgcgctccgccttatcattgaccgggagaaagaaatcaacgattttataccggaagaatattggacaattgaagggtcttttctcaaaggtaaagaaacgtttgaagcgagcttcttcggaatcaacggggaaaagcaccagctgaaaagcgaagatgatgtgaagcaaatcctatcccggatcaaagggaacaaatttgaggtcaaaaaggtaacgaaaaaagaacggaagcgaaatcctgcgctcccatttacgacgtcgacgcttcagcaggaagcggcgcgcaaattgaatttccgggcaaagaaaacgatgatgatcgcccagcagctttatgaaggaatcgatctaggcaaagaaggaacggtcgggttaatcacttatatgagaacggattcaacccgtatctcgaatactgctcaagaagaagcggcatcattcatcggcgaacagtacggaaaagaatttttgggtagcaagcgaaagccggccaaaaagaatgaaaacgcccaggatgcccacgaagcgatcaggccgacctcggtgctcagaaagccttccgatctgaaggcggtattgggaagagaccagcttcggctatacaagctgatctgggagcgctttgtcgcaagccaaatggctccggcgacactggatacgatgagcgtcgaccttgaaaacaacgggttgacatttcgggcaaacggcagtaaagtcaagttttcaggcttcatgaaagtgtacgttgaaggcaaagacgatcagatggaagagaagaataagatgcttccggatctcgctgaaggcgataccgtgctttcaaaagacatcgagcccgaacagcacttcacacagccgcctccgcgctatacggaagcaaggctggtcaaaacgcttgaagaactgggaatcggacgtccatccacatacgcgccgacgcttgacacgatccaaaagcgcgggtatgtcgcccttgataataaacgctttattccgactgagctcggtgaaattgtgcttgacttgatcatggagtttttccctgagattattaacgttgagttcaccgccaaaatggaaaaagagcttgatgacgttgaagacggaaacattcaatgggtgcagatcatcgattccttttacaaggactttgaaaagcgcgttgaaaaagctgaagccgagatgcaggaagtggagatcgaaccggagtatgcaggtgttgactgtgaagcgtgcggacatccgatggtctataaaatgggccggtacggcaaatttatggcctgctccaattttccggactgccgcaacaccaagccgatcgtaaaagagatcggcgtcaaatgcccatcatgcaaaaccggcaacatcgtcgagcgcaaatcgaaaaaacgccgcattttttacggctgtgaccgctatcctgaatgtgaattcgtatcatgggataaaccgcttgaacggaaatgtccgaaatgcgaggacatgcttgtggagaaaaagctcaaaaaaggcgttcaagtgcagtgcgttaattgcgattataaggaagaacaacaaaagtag

SEQ ID NO: 1955 - DNA, 1305 bp, Bacillus licheniformis
atgaatcaaacagtaaatgtcatcggtgcaggacttgcaggaagcgaagcggcatggcagcttgctaagcgcggtatcaatgtccgtttatacgaaatgaggccagtcaagcaaacgccggcgcaccatacagataaatttgccgaacttgtctgcagcaactcgcttcgggcgaattcattaacgaatgctgtcggtgtattaaaggaagaaatgcgggttcttgactcggccatcatcgctgctgctgacgaatgttctgttcctgccggcggtgcgcttgccgtagacaggcatgaatttgccgcaaacgttaccgaaaaagtaaagaatcatccgaatgtgaccgtgcttcatgaagaagtcacggaaataccggaaggaccgacaatcattgcgacaggaccgctgacatcagaagcgctttccgcaaagctccgggagctgacaggcgaggactatctatacttttatgacgcggctgcgccgattgttgaaaaagacagccttgacatggataaagtctatttgaaatcccgctatgacaaaggggaggcagcgtatttgaactgtccgatgacagaagaagagtttgacaggttttatgacgcccttgtgtctgcggaaaccgttccattgaaagaatttgaaaaggaaatcttctttgaaggctgtatgccgattgaagtcatggcgaagcgcggcaaaaaaaccatgctgttcggcccgatgaagcctgtcggacttgaagacccaaaaacaggaaagcgtccgtacgccgttgtgcagctgcgccaagatgatgcagccggcacgctttacaatatcgtcggttttcaaacccacctcaaatggggcgaccaaaaagaagtgctccgcctcattccgggactggaacaggcagaaatcgtccgctacggcgtgatgcacagaaatacgttcatcaactcgccgagtctgttaaaagcgacctaccagtttaaaaagcgggacgatctgttttttgccggtcaaatgacaggtgttgaagggtatgttgaatcagcggcttcaggtcttgttgccggtataaatgcggctcggctcatccagggaaaagaacctgtcactttttcaaatgaaacagcgatcggcagcatggcccattacattacggaaacaaacaagaaaaacttccagccgatgaatgcaaacttcggcctgttcaaagaattgggtgttaaaattaaaaacaagcaggaacgaaatgaacagtatgcttcgcgcgcattggagacaattcgaaatatttcgaaaacgctatag

SEQ ID NO: 1956 - DNA, 915 bp, Bacillus licheniformis
atggcaaatgttaagaattttttaactttattcattgaatatttacaaatagaaaagaattattcaaaatatacaattgtgggttacatttcttccattgaagactttgaacgctttttacacgttcagggcataaagggttttgaagacgtgacttatccggatgtgagaattttcttgacggaagcgcatgaaaaagggctcactcgcaggacgatcagcaagaaaatttcggctctgcgtagcttctataaatttttattaagggaaaagctggtaaaagaaaacccgtttctgcttgtcagtctcccgaaacaggataagcggattccgaagtttttatatgaaaaggaacttgaagaactgtttgaggtttcggatttgagtacaccgctcggccaaagaaatcaggcgctcctggaatttctctacgcgacaggcatgcgggtaagcgaactttgcagcctgaaggaatctgatttggatctgtttttagatacggttttggtccacgggaaaggcaggaagcaaaggtatattccatttggttcattcgcccgggaggctttggatctgtatttgcaaaatggaagacgcatccttctgttaaaagcgaaagagccccgcccttttatttttttgaatcaaaggggcgggcccttaaccccgaggggggttcgttacattttgggagaactggtcaagaagacttcgggtacattacatatacatccgcatatgctccgccatacatttgccacccatttgttaaatgagggtgcggatctgaggagcgttcaggaactgcttgggcattcaaatctttcttcaacccaggtgtatacgcatgtatctaaagatatgctcagaaagacatatatgtctcatcaccctcgggcacataaagggaaataa

SEQ ID NO: 1957 - DNA, 546 bp, Bacillus licheniformis
atgtcatcttttcacgcaacgacgatatttgccgtccagcacaacggaaaaagcgcgatggcgggagacggccaggttacgttcggtcaggctgtcgtcatgaagcataccgcaagaaaggtaagaaaactcttcaacggaaaggtcattgccggttttgccggttctgttgcagacgctttcacgctctttgaaatgtttgaagcgaagcttgaagaatacaacggcaatttgcagcgggcggcagtcgagcttgcaaaagagtggcgaagcgataaagtcctcagaaagcttgaggcgatgctgatcgtcatgaatgccgacagcatgctgctcgtttccggaacaggcgaagtgattgaaccggacgacggcattttggcgatcggctcaggtggaaactacgcgcttgcagccggaagggcgctgaaacgtcatgccggcagccagcttgacgcgaaagcgattgcgagggcttcacttgaaaccgcgggcgaaatctgtgtgtatacgaacgatcagatcattgtagaagaacttgaatag

SEQ ID NO: 1958 - DNA, 1404 bp, Bacillus licheniformis
atggaaaaaaagccgctgactcctaggcagatcgtcgaaaggcttgatcaatacatcgtcggccagctcaatgcgaaaaaagcggtcgccgtggcattgaggaaccgctacagaagaagtcttcttgatgaaaaactgcgcgaagaaatcgttccgaaaaacatattgatgatgggcccgacaggtgtgggaaaaaccgagattgcaagacgaatcgcgaaactcgtcggcgctccgttcgtcaaaatcgaagcgacgaagttcacggaagtcggttatgtgggcagagatgtggagtcgatggtcagggatcttgtggaaacgtcagtccgcctcgtcaaagaggaaaaaatgaacgaagtgaaaggcatcgctgaagaaaacgcaaataaacgcctcgtccgcctgcttgtaccgggaagaaaaaaacagacaggtgcgaaaaatccttttgaaatgctgtttggcggaaatcaggatcaagaaactggtgaagcggaaaagcaagaagacgcggatatcgaaaacaaccggaaacggattgcgcatcagcttgctctcggcgaacttgaagaccattatgtcaccgttgaggtggaggagcagcagccgtccatgtttgatatgctccaaggctcgggtatggaacagatgggcatgaacatgcaggatgcgctcagcagcctgatgccgaaaaagaaaaagcgccgcaagcttacggtcagggaagcgcgaaaagtgctgacgaatgaagaagcggcaaagctcatcgatatggacgaagctgcccaggaagctgtccagagagccgaacagtcgggaatcatctttatcgatgagatcgataaaatcgccaaaaagagcggtgcttcttcatcggcagacgtctcaagagaaggcgtgcagcgcgatattcttccgattgttgaaggatctaccgtcatgacaaagtacggtgcggtcaaaacggatcacgttctgttcattgctgcaggtgcattccacatggcgaagccttcagatctaattcctgagctgcaggggcgctttccaatacgcgttgagcttcaaaagctgagcatcgatgactttgtgaaaattttaactgagcctgacaacgctcttcttaagcagtataaggctttattgaagacggaaggtatatctcttgaattttctgacgatgctattcgtaagattgcagaagtggcttatcatgtgaaccaggacacagacaatattggggcgagaaggcttcacaccattttggaacgtcttttggaagaactgtcattcgaggctccggatgtgacgatggaagaagtggtcatcacgcctcaatatgttgaagaaaagctcggttcgatcgctaagaataaggatttaagccagtttattttataa

SEQ ID NO: 1959 - DNA, 780 bp, Bacillus licheniformis
atggctttattacaaaaaacaagaaagattaatgcaatgctgcaaaatgcggcagggaagccggttaattttaaagaaatggccgaaacgcttcgcgatgtgattgattcgaacattttcgtcgtcagccgcagaggaaagcttctcggtttctcgatcaaccagcagatcgaaaatgaccggatgaaaaaaatgcttgaagagcgccagtttcctgaagattatacaaaaagcctgttcaacattccggaaacgtcatctaaccttgacatcaacagcgaatacacagctttccctgtggaaaaccgcgatttgttccaagcgggtctgaccacggtcgttccgatcatcggaggaggcgaaagactgggcaccttgattctgtcccgccttcaggagaaattcgaggatgacgatctgatccttgccgaatatggcgccactgtcgtaggaatggaaattctcagagagaaagcggaagagatcgaagaggaagcgcgcagcaaagcggtcgttcaaatggcgatcagttcactatcttacagcgagcttgaagcaattgaacatatttttgaggagcttgacggaaatgaaggcctgcttgtcgctagtaaaattgcagaccgcgtcggcatcacccgctcggtcattgtcaacgcgctccgtaaacttgaaagcgccggtgtcattgaatcaaggtcactagggatgaaaggcacatacatcaaagtgctgaacaacaaatttttgatggagttagaaaaactaaagtctcattaa

SEQ ID NO: 1960 - DNA, 390 bp, Bacillus licheniformis
gtggatatattttcaggaacgatacatagactagagggagccttgaatcaagcgaacattaagcaaaaagtcataacgaacaatctggccaatgtagatacaccgaactacaaggcgaaaaaagtatccttcaaaaatgtgctgaatgaggagtcctcccggattaatgccataaaaacagactatagacacattgactttaaagggaatgagtcaaattattcagttgtgtcgagaaagaatacaacttatcaagaaaacgggaacaatgtggacgttgatcaggaaatgagtgaaatggcgaaaaatcaaatccagtatcaagcgctggttgaaagaataagcggaaaattcaactcgctaagaaccgcgattacaggaggtaaataa

SEQ ID NO: 1961 - DNA, 454 bp, Bacillus licheniformis
atgggggtattcaatagcatcaacatttcagcttcagcgttgactgcacagagagtcagaatggataccgtttcttccaacctggcaaacatggatacgacagagagcgaagctggttgacggacagtggcagccgtatagaagaaagcttgtatcgacggctccgaaaggcgaatccttttcatccgttctccaatcatcgatgaatgcatcggcgagagtcggcgaaggggtgaaggtgaccaagataagcgaagacaaaacaccgtttaagctcgtttatgatccgacccatcccgacgcaaacgaagacggatacgtgcagatgccgaatgtcgatccgctaaaagagatggtcgatttaatgagcagcacaaggtcatatgaagccaatgtcacagcaatgaacgcgacaaaaggaatgctgatgaaagcattagaaatcggaaagtag

SEQ ID NO: 1962 - DNA, 318 bp, Bacillus licheniformis
atggttaatggaatctctccgtttggagttcaatccgtgcaggcgggaacgaatgcaacaaatcagatcaagaacaagcaggacggttcagagaaccaagtcagcttttccaacgtgctgaaagattctatcaatgctttgaatcaatctcaaaatgaatctgataaactgacaaacgcgcttgctctcggtcaggatgtcaaccttgatgaagtgatgattgcagcccagaaggcaaacattacattgacggctgcgacggaattccgcaacaaagcggttgaagcttatcaggaaatcatgagaatgcaaatgtaa

SEQ ID NO: 1963 - DNA, 1602 bp, Bacillus licheniformis
atgaatcgtaatttattgcaaattaaaacgaaaataactgatttttggaaaaacagatcaaagctgcagaagattctgctgatcggcattgtcgctctggcagtcatcctgtcaatcatcattggaattgttgcctcgtcaaataaaatggtgccgctctataaagatttgtcagctgaagaaaccggccaaatcaaacaggtgctcgatgaaaaaggtattccatctgaagttgcgactgacggttcagtcatcaaagttccggaagaaaaagtcgatgaactgaaagtcgatcttgccgcagagggccttccgaaaagcgggagcatcgattattcattctttggcgaaaatgccggtttcggcatgacggacaacgaatttgacgttttgaaagtgaaagccacgcaaaccgagctatccaacctcatcaaaggaatagacgggattaaagattcgaaggttatgattaacctgccgaaggaatccgtctttgtcggagaggaaaagccggaagcatccgcttcgattgttcttcaggtgaagcccggccacacgcttgatcaaaatgaaatcaacggcctttatcatctcgtatcgaaaagcgtgccgaaccttgacccgaaaaacatcgtgatcatggatcaaaactccacatattacgatcaaacaggcaaagagtccggttcttacgccgacagctattcttcccaaagggaagtcaaggcccagatcgaaaaggacctgcaaagacaaatccaaaccatgctcggcacgatgatgggacaggataaagtggttgtatccgtcacatctgacatcgatttcacaaaagaaaacaggacggaagacctggttgaacctgtcgacaaagaaaatatggaaggaatcacggtcagcgcagagcgcgtcagtgaaacatattccggacagggagcacaagcgggaggcgtcaacggaacaggtgaaaacgatgtaacgaactatgctgaaacagaaggcggaacaggcaacggagactatgagaaaagcgaagaacgaatcaacaatgaagtcaacagaatccataaagaaatcgctgagagcccgtacaaaatcagagatctgggcgtccaggtcatggttgaaccgcctgatgcaaacaacccgcagtcactgcctgctgaaagggaggacgatattaaaaaaatcctctcaaccattgtgaaaacatcgattgacaagaactatgaagaagagcctctgacagatgaggatgttgaaaataaaatcgttgtttctgtccaatcgttcgacggcaagcagacaatcgatgaaggaacggaaacaggcggcataccgatgtgggcttacatcgcaggcggagcagcgcttgttgctgtaatcggcctcatcatctggcttgtcagaagacgtaaaaatagagatgacgaatacgaggaagaatggtatgaaacgcctcaggagccgattcgggttgctgatgtgaacaatgaaaaagagacagaagaaactgtcagacgaaaacagcttgaaaaaatggcgaaagacaagcctgaagaattcgccaaattactgcgcagctggctgaccgaggattag

SEQ ID NO: 1964 - DNA, 1017 bp, Bacillus licheniformis
atggcaaaaatgaaacaagacaggcttacaggcaaacaaaaagcggccattctcatgatatccttagggcttgatgtgtcagcttccgtttacaagcatttaacagatgaagagatcgaaaggctgacgcttgaaatatcaaatgtcagagctgtatcacctgagaaaaaagatgagattattcaggaatttcatgaaacggctattgctcaagaatatatttctcaaggcggcattcattacgccaagcaggtgcttgacaaagcgctcggcgaagacaaagccgccagcattatcaacaggctgacatcgtctcttcaagtcagaccgttcgattttgccagaaaagcggatcccgagcagattctgaactttatccagcatgagcacccgcagacgatcgcattgattctgtcttatctcgatcccgtgcaatcgggtcagatattgtcagagctgaatcaggatgtgcaggcagaggttgcaagaaggatcgctgttatggacaggacgtcgccggaaatcatcaatgaagtcgaacagattctggagcaaaagctatcgtccacattcactcaggactacacgcagaccggcggtatcgaagccgtagtcgaagtgttgaacggagttgacagaggtacggagaaaacgatccttgacgcccttgaaattcaggatcctgagcttgccgacgagattaaaaagcggatgttcgtctttgaagatatcgttacgcttgataaccgcgctattcaaagggttatccgcgatgtggaaaacgacgatctgcttctttctctcaaagtggccagcgaagaggtcaaagacatcgtcttcagcaacatgtcgcagcgtatggctgaaacatttaaagaggaaatggaattcatgggccctgtgcgtctgcgtgacgtagaagaagctcaatcgagaatcgtaagcgtcatccgaagacttgaagaagcaggtgagatcgtaatcgccagaggcggaggagatgatatcattgtctaa

SEQ ID NO: 1965 - DNA, 759 bp, Bacillus licheniformis
ttgtctaacattattaaacagcgattatcatcaataccgcaaaaagaaaggcggacgatttcattaaaggaagtcaaacttcctgagacagaaaccgaacttgataccggacaggatccggaatacctcctcgaccatgccagacaagaagccggaaaaatatacgaaaaagcgagcgctgaactcgaacaggtcagacggcaaatcgaagaggaacggtcaagctgggaaacagaacgcgaagcgctgatagaccaggcgaaacaagaaggctttcaagctggatttgaagagggaaaggccgaggcccgaagcgcttatcaagcgtatttggatgaagccaatgccatcgtccgggcggctagacgtgactatgaagaaaaaatcgaacaatcatccgaagaaattgtcgaacttgccgtgtcactggctaaaaaagtttggaatcaaaaggctgacgacaaagaagcttttacagccctcgtaaaacaggtgctgtcggaaatgaaggaattcgatgacattgccatctatgtagatccggagtactacaccgaggttcaaagccacaaaaacgaacttgagcagctcctccaatacggcgcccatatcgcgatatacgccgatgaaaaagcgccgaaaggaacgtgctatgttgaaacggctttcggaagaatcgatgcaggcatcgacactcaattgcagcagctgaaacaaaaactgctcagcctgcttgaaacggcaggtgttgtccggtga

SEQ ID NO: 1966 - DNA, 1314 bp, Bacillus licheniformis
atgctcaagcagctgcttgaatgtatagaaaccgcagattcctacaaacgatacggaaaagtcaaacaggcggtcggcctgatgattgaatccaaaggacctgaatgttcaatcggcgatgtctgcaaaatctatacaaaaggtgacgggccaaaggctattaaagctgaagttgttggcttcaaagaccaaaatattcttctgatgccatatttggaagcggccaatattgcccccggcagcattgtcgaagcgacgggcgaatcgcttagggtcaaagtcggctccgggttgatcggacaagttgtcgatgcattcggcaatccgcttgacggcagcgtgcttccgaaaggtctggctcaagtatcgacagaccaggcgccgcctaatccgatgaaaaggccgccgatcagagaaaaaatggcggtcggcgtcagatcgatcgacagtctgctgaccgtcggaaaaggacagcgtgtcgggatattcgccggaagcggcgtcggaaaaagcacgcttatgggaatgattgcgagagagacggccgcagacttgaatgtcatcgctcttgtcggagagcggggccgggaagtcagggagttcatagagaaagatctcggcgaagaagggctgaagcgaacgatcgttgtagtggctacatctgaccagccggcgctgatgcgtctgaaagcggcctatacagcaacagcgattgccgagtacttccgcgacaaaggacaaaacgtcatgttcatgatggactcggtgacaagggtcgccatggcccagagggaaatcggcctggcgacgggcgaaccgccgacgacaaaaggttatacaccctcagtgttcgctattttacctaagctcttagaacgaacaggaacgacggaaagcgggtcaataactgctttctatacggttcttgtcgacggcgatgatatgaatgaaccgatcgccgatactgtaaggggaatcttggacggccatatcgttcttgaccgagcccttgcgaataaaggccagtttccggcagtcaacattttaaaaagcatcagcagggtgatgtcgaacatcgccgagaaagaccatatcagagcagcgaaccggttcagggaaatgctgtcaacctatcaaaactcagaggatctgatcaacataggagcctataaaaaagggtcttccagagaaattgatgaggccatacaattccaccctaagctgatcagcttcctcaagcaggaagtggatgaagcggcatcgctggaagagagcatttccttattaaagagtcttacaggaagagaggattaa

SEQ ID NO: 1967 - DNA, 444 bp, Bacillus licheniformis
atggcttattcatttaaatttcaaaagctcctcgagcttaaagaaaatgaaaaagaccaatcatttgctgaatatcagcactcagtttccgaattcgaaaaggtcgcggaaaagctgtatgaaagcatgagccaaaaagaaacgctggaaaaaaacaaggaaatcaagatgcagacggggatgagcgttcaggaaatgcggcattatcagcaatttgtcacaaatcttgaaacgacaatctaccattatcaaaagctcgtcatgatgaagagaaatgaaatgaatgaaaaacagcacgatttgacggagaaaaatatcgagctgaaaaaatttgaaaaaatgaaagaaaagcagtttgaaatgtattcgctgcaaaacaaagcaaatgagttaaaggaaatggacgatatctccattgcccagtacataactcaaggaagctag

SEQ ID NO: 1968 - DNA, 612 bp, Bacillus licheniformis
atgaccgaagaaaaaaaagccggtaaatttcagacatttttgtttgtcatcgtcattccgctgatctttttaatcgttgtagcgttcgtcggcatgtggcttttgggcgtcaattttcaggatgtagcctcaaaaattcccgtcgtaaaagagcttgtgaaaaacggcgaggatcaggacatagatcacgcaactaaacagcaggagaacaaagcagaaaagctccaaaagacgatcgatgaacaaaaaagcgaaatcgaaacgctgacgagtgacttaaaaacgagtgatcaagagattaaaaggctgaaacaaaaaatcagctcgctcgaaaaaacggaaaaagatgaaaaagagcaggataaaaagaacgccgaaggtcaaggagacggaaaagtcgtcaaaatttatgaaagcatgcaaagcaataaagctgcaaaaattttaagcgaattaaaagaggaagaggcaatcaatattttagattctttaagcaaaaagaaagtgactgagatcctctcaaaaatgtctcctgataaagcggctgtattcacagaaaagcttgtgaaaaacgaggcgaaaaacgaagcgaaaaaagaagggggggaatag

SEQ ID NO: 1969 - DNA, 1380 bp, Bacillus licheniformis
ttgaggctttttgacgtaatctcctttgatgccaaacctgcggtggacactgcacctgcaaaaacgagcaggacgccgttgggcgcgctctttcagaatgtgctccagaaggaaaacagctcactttccccttttcaaaagggagaagagccttctcaggatacgccgttggaagggcttttgcatgaactgaagcaatggctttcaaataaggaagacagctctttcaatgaagactggctgaattcccttcagcagcttgaagagctgaatgcatctccggatgaactggcattggcagaacagctgctgcaacaaataaaagagctgcttgaaaaagccgccctgcctgaacaatcaggcaaaacggctgatgctaaagctttgcctgccgacgaaagcgggacagaagagccgaaaaagcccgacctgcaaattctcggccagattcagcagctgctagctgcgattgtaaatgaaaatcaaccgtcactcaaaacttcgcaaatcgcagaattattgaaacaggcgccggaatttctcgccgctcttcaaacaaaggcgggagcagaagggctgattgatgagcttaaacgtcaatttttcacgaaagatccgagccaatcgcagcttttgtccatgtcaaacaccgagctgaaaagcttgaaaagcttaatggagcagatgatgaacgcaaacgctgaaccggatcaaaaagagtggaaaatggccgaaagcgaactcaaggcaatgctcatgagcaagaaaaccgatgtttctctttctgagaagccgttgtcctttgttttgaacagaagagaaattcaaactgaaggaaagcaaggccaaaaggaacagccgattcaatcctctgtactggccaatcatcggacaggcacagcgctgatccagggtctccagccttcggcggcagaggaagcttccgctcagccgaaaagcttttcagaacaaattctcagctcatggaaacagatgaagtatacgccgttcggcaggtcgacaggcagtttcacgatccgcctgaatcctgaaaatcttggctttatcacgatcaagctcgtcaaacagcacgggatgttttcaagcaaaatcatcgcatcgacccagtcggctaaagagctgctcgaacacaatctcgcgcatcttaaacaggcgctgcccaacatgtctgtgcaaattgaccgcttcggtgttccgcttcaaaacagcgatcagactttcggacagctggcggacgatgagaaaaaccagcatcagccgaagcaagatcagcaaagtaagcaggaaaatgaggattttcaggagtttctggatgagcttatcgagactcgatcacaggacagcgaggaggagatctaa

SEQ ID NO: 1970 - DNA, 468 bp, Bacillus licheniformis
atgtctgatacttcaattgataccagaaccgccttaggaacaacaaacacgaaatcgacgacatccgattttttatccgaggcaaaaaaagccgagaaagcagggagcggctccaatcttgggaaggatgaatttttgaaactgctgatgaaacaactgcagtaccaagatcccttaaatccgatggaagaccgcgaattcattgcgcaaatggcgaccttttcaagcctagagcagctaacgaatctgaacacaacgatgtcgacgttcgtcggacttcaggacccgatgacgatgtatgtcagctggatcggaaaagaagtcacctatgaaggcgaagacagcgaagaaaaaacggcgctcgtcaaatcagttaaaagctcagacggacagtatctgcttgtccttgacgatggaaccgaagtcaatccgtggaatgtgacggcggtaagccattctgataaataa

SEQ ID NO: 1971 - DNA, 792 bp, Bacillus licheniformis
atgttacgttcactatactcaggaatcagcggcatgaaaaactttcagacaaagcttgatgtcgtcgccaacaacatctcgaatatcaatacggcaggctataagaaaagccgggttacgtttaaagatattgtcagccagcagctttccggcgcgtcgtcgtctactgcaaaccgcggctctgtaaacggccagcaggtcggactcggtgcaacgatcggatcgatcgatatcattcacacaaacgcagcgccttcgacaacaggccgccagcttgacatgaccattacaggagacggctacttccgcgtcggatcaggagatgaagtgtactacacaagatcaggaaacttctaccgatctgatgaaggtgacctcgtcactgttgacgggctgttcgtcttaacggccaataatggaagaatcaacattccgcaagacgcgcaaagcttcagcatcgctcctgacggaaccgtttcttatgtcgatcaaaacaacgagaaccagaccgccggccagatctcgcttgcgacattcagcaacacatccggattatcaaaagctggagacaacctttaccgcgaaacattgagttcgggagatccgcaagtcgttgtacctggggaaggcggctcaggaaaaattcaaacgagtgcgcttgaaatgtcgaacgtcgacctttcagaagaattttccgaaatgattatcgcgcagcgcggcttccagtccaatgcgaaaatcattacaacctctgatgaaattcttcaggaactcgtcaatctgaagcgatag

SEQ ID NO: 1972 - DNA, 216 bp, Bacillus licheniformis
atgatcaaagttacgcgattaaacggacagccctttattctgaatgcactattcattgagcaaattgaatgttttccggatacgacaattacgctgtccaacggaaaaaagtttgttgtcaaagaagatgaagatacagttgtggatacaatcgtgtcattctatcaaaaaatccaaatactttcttgtgaccaaagaattgaggaatctgaatga

SEQ ID NO: 1973 - DNA, 432 bp, Bacillus licheniformis
atgaataaaaaacttctaggaattatgatgacgattattttggcaattgctgtgttgggaaccgctgcgttctttgtcatcaagggaagcgcaagtgaaaaagatcaaaacgcagaaccttcgatcgatgaagtggtcgaatcttcagttgaagtcgccgaaatcacgacaaacttgaaatcagacaatgtagtccgtttgtcaatcaagcttgaaaccgattcgaaagaggcgaaagaagagcttgaaaagcgggatttccaaattaaagattcagtcatctcccttttggcgaacacgaacgcagatgagcttgaaggacaaaaaggaaaagaaaaatttaaagaacagctgaaagaaaagctgaacacgaactacatgaaagagggaaaagtgaaaactgtgtacattacctcctttaatctgcagtag

SEQ ID NO: 1974 - DNA, 999 bp, Bacillus licheniformis
atggcaggagaagtgctctcccaaaatgaaatcgatgcactgctttcagcgatatcgaccggtgaaatggacgccgacgagctgaaaaaagaagagtccgttaaaaaagtaaaagtctatgactttaaacgggcgctccgcttttcaaaggatcaaatccgcagcttgaccaggattcacgataactttgcaaggctgctaacgacttatttctcagctcagttgagaacctatatccaaatctcggtcagctcggttgatcaggttccgtatgaggaattcatcagatcgattccgaatatgacgatcctcaatctgtttgaggttcgccctcttgaaggaagaatcatgatggagatcaacccgaccatcgcctatacgatgatggaccgggtgatgggcgggatcggctcgagccacaacaaaattgacagcatgacggagattgagacgaaaatcatgtccaatttattcgaaagctgtctcacgaattacaaagatgcgtgggaatccatcacggaaatcgagccggaaatgtccgattttgaagtgaatccgcagtttgtgcaaatggtatcgccgaatgagacggtcgttgtcatttcgctgaacacgcaaataggagacatcagcggggttatcaacctgtgcatcccgcacgtcgtcctggaaccgatcattcctaagctttccgttcactactggatgcaatcagacagaattgaaccaaaaccggaggaaacaaagtcgatagaaaagcggattttgacggcgcaaattccaattgtcgcagaactcggatcatcggaattaaccattgaagagtttttaaatttagaaattggagattgtatcactttggacaaatcagtagcagaacctcttactgttttggtcggagataaaccgaaatttctagcacaagccggccgaatgaatcgaaagactgcgattcaaattctagatcacgacataagaggtgaagaatatggagaataa

SEQ ID NO: 1975 - DNA, 1134 bp, Bacillus licheniformis
atggagaataacaataggttatcacaggatgaaattgatgcgctgcttaaaggcggcgatgatacggctcaagagcagccagaatcagggttgtccctgatggaacaggatacgatcggggaaatcggaaacatttcctttgggagctctgcaacagctttgtccactttattgaatcaaaaagtcgaaattacaacgccgactgtttcggtgattgaaaaaagccatttaaatgatgagttcccgcacccgtatgtttcaatcggtgtgagctatacagaaggtttttcaggaaacaatcttctcgtcatcaagcaggaagatgccgcgatcattgctgacttgatgatggggggagacgggacgaacgcagatccgtcgcttggcgaaattcatctaagcgccgttcaggaagcgatgaaccaaatgatgggttccgctgcgacatcgatgtccaccgtcttcagcaagaagatcgatatttctccgccggaagttgacctccttgatgtgaaagaaggggaagggacagagcaaattccgaaagaggacccgctcgtcaaagtatctttcagactaaaagtcggagatctgatcgattcgcatattatgcagctttatccgctgacctttgcaaaagatctgattgatgaattaacaaatcaggacggcggagaagagcctgtgaagactgaagaggtacagacgcccgtacaggaaaaaccggcgcctaatccgaattcggcacctgctcagacacagagacaggagcctgcgcctaaacggcaagggacggcaaaagtttcagagcctgtgcaggtggcaccggcagagtttcaatcctttgcccctcagactgaagcgcagccgcaccttcaaaaccttgacatgctcatggatattcctttgtccgtcacggtcgagctggggaggacaaaccgcagcgtcaaagaggtgcttgaactgtcaaccggcagtatcattgagcttgacaaactcgccggtgagcctgttgacatcttggtcaaccagcgcgtcgttgctaaaggcgaagtcgtcgtcatagacgaaaacttcggcgtcagggtgacagacattttgagtcaggctgaacgaatcagcaaattacgataa

SEQ ID NO: 1976 - DNA, 363 bp, Bacillus licheniformis
atggcttacaagattttagtagttgatgatgcagcatttatgagaatgatgattaaagatattttggtgaaaaacggctttgaagtcgtcgcagaagcgcaagacggggcacaggctgttgaaaagtataaagagcattcacctgatcttgtcacaatggatatcacgatgccggaaaaagacggaatcacggctcttaaagaaatcaaggaaatcgatccgcaggcaaaaatcatcatgtgttcggcaatgggccagcaatcgatggttatcgacgccatccaggcgggagcgaaagactttatcgtcaaaccgttccaggctgaccgcgtcatggaagccatcaataaaacgctaagctaa

SEQ ID NO: 1977 - DNA, 675 bp, Bacillus licheniformis
ttgtttaagaaacctcttattttcatagccggcctttgtctatgcgcctttctcgcattgccgtacgctccggctctcgcagaggaatcgggggaccagaccgttgatcatctgtttgagcaaaaaggtgcgggcaaagagaaagaaaaagcaaaagacaaagacaaaaccgaggaaaaaagttctctaaaggaagaggcggagaccgaacccccgtctccttccgtttccatatttgattttgtgaaaatgatcggcgcgttactgttcgtcatttttctgatctatgctttggtcaaattcatgaataaacgcaaccgtttgctaaaacccttccagtatgttgaaaacatcggcgggacttcactcgggcaaaacaagtccgtacagctgattaaagtaggaaacagggtgctggtcgttggtgtcggcgaaaatatccagctgctgaaagagatcgatgatgaaaaggaatataaagaaattctcacgcagcatgaagctgcgatgaacagcaagattgaatggcagaaatggatggatcaagtcaaagttccaggcgtgcaaaaacaaagcggcacggcatctttttccgagtcgttaaaagcacagcttgcggaactgaaacaaaatcgcgcagaaggcagaaagaaaggccaaaatcaacatgaatga

SEQ ID NO: 1978 - DNA, 666 bp, Bacillus licheniformis
atgaatgagtttatggatttatttaattcaagcgatgcggcaaatgtcagcgccagcgtccggctcttgctgcttttgacagtattttcgatcgctccgggtatcttgatcttgatgacttgtttcacaagggttgtcatcgtcctgtcctttgtccggacatcgctggcaacacagtcaatgcccccaaaccaggtgctgatcggacttgcactgttcctgacatttttcattatggggccgactttttcagagattaataaagaagcgctgacgcctttaatgaacaataaaatcaccttggatgaagcttatacaaaagcggaagccccgatcaaaacatttatgagcaagcatacaagacagaaagatctggctttatttatgaattacgcaaagatggaaacgcctgagtccatcaatgatattccgctttcaactatggttcctgcgtttgtcatctcggaattgaaaaccgcgtttcaaatgggatttatgatatttataccgtttctgattatcgatatggttgtggcaagtgttttgatgtcgatggggatgatgatgcttccgccggtcatgatttcactgccgtttaagattttgctgtttgtgcttgtagatggctggtatttaatcgttaaatctttgctgcaaagcttttag

SEQ ID NO: 1979 - DNA, 270 bp, Bacillus licheniformis
atgaattcagaatttgttatatcgatggctgaaagggctgtatacgttacattgcttatcagcgggccgcttttggcgctcgctcttctcgtcgggctgatcgtcagcgtttttcaggcaaccacccaaatacaggaacagactcttgcattcattccgaaaatcgtcgccgttttggtcggactcgtcgttttcggcccgtggatgctgtcgacgattttgtcattcgcgactgagctgttctctaatttaaaccgttttgcagggtag

SEQ ID NO: 1980 - DNA, 777 bp, Bacillus licheniformis
atgtcaataatcgaatcatttccagcctttttacttgtgtttgtcagaatcacagcattctatgtaacggtgcctctattttcttatcggacaattccggccgttcataaaataggttttgcattttttcttgcgctcgtcagttttcaagcgattgaaaagcctcctcaccttgacgttgacggaatttacatgatgttggccatgaaggaagcgctcatcggacttctgcttgggctgatcgcttacatgatgatctcagccgttcaaatcgccggatcgttcattgattttcaaatgggatttgcggtggcgaatgtgatcgatccacagacaggggcgcaaagcccgcttgtcggccagtttttatatacgatggcgctgcttctcatgctgagcctgaatgcgcatcatctcctgcttgacgggatctattacagctatcaatacattccggtcgacaagatggcgctgtcgtttggaagcgaagaatttgccgagtttatcgcaaaaagcttcaatacgatgtttattacagcatttcaattgtctgcgcctgttgtggcttgtttgtttttagtcgatctggcattggggattgtggcgagaacggtgccgcagctcaacgtgtttgtcgtcgggcttcctttgaaaatcgcgatcacctttatcatgctcatcatctgcatggccgttatgttcagcatgatgcagcacgtcttcgaatttgccattcggacaatgagagatctattaactttgcttggggtggcatga

SEQ ID NO: 1981 - DNA, 1080 bp, Bacillus licheniformis
atgaagctgacgttggatttgcaatttttcgcaggtgaaaaaacggaaaaagcgacgccgaaaaaacggcgggaaagcagaaaaaaaggtcaggttgccaaaagtgcagatgtcaatacggcggtcactcttctcatcgtgtttttatcctttttattcatcggaccttttatgagagaccgcctgctcggcctgatcgaaaagtattacaaagaattaatcacgatgaaggtgtcagtcgccaatattcccggcctgtttcaaagtgttgtgcttgaatcgggcctcattatggcaccgcttttgctgacagccgtcgtctctggggtattgagcaactatatgcaagtcgggtttttatttgcccctgaagcgatcaagcctgatttgaaaaagcttgacccgcttaatggattcaagcggatttacagcatcagggcgatcgttgaactgcttaaatcgattttaaaaatcgtgattgtcggaggcgtgacattcgccgttttatggctgaactttgacaaaattctcagaatcccggcgctgtcggctggcgaggctttgtcatatgtcggctggctcacctttttaatgggggtttccgctgcagtcgcattaatttttctcgcggtgctcgattacctctatcaaaaatttgactatgaaaaaaatattcgcatgtcaaaacaggacatcaaagacgaatacaaaaaaaccgaaggcgatcctctgatcaagtcgaagatcaagcagaagcaaaaggaaatggcgatgcgccgcatgatgcaggaagtgccaaaagcggatgtcatcatcacaaacccgacccattacgccgtcgcattgaaatacgacgaaaacaaaatggatgcgccgtttatcatcgcaaaaggggtcgatctaatggctctgaaaatcaggcagatcgccaaagaacacgatgtcatgacggtcgagaacaggcctttggcaagggcgctctatgaccaggttgagatcgaccaggccgttccggaagaattctttaaggccgtagccgaaatcctggcctatgtttacaaaacaaagcaaaaaatctag

SEQ ID NO: 1982 - DNA, 2037 bp, Bacillus licheniformis
atgtctgcaagagatttatctattttatccggcgttgtcctcattgtggcaatgcttatcataccctttccaacatggatgttgagcatcttaattatcgttaatatttctcttgcgttaatcgtgcttctcaccacaatgaacatgcaagaaccgctgcaattttcgatttttccttctttgctgctcctcttgacgctgttccgccttgggctgaatgtatcgacgacgcgttcgattctgtccaacggtgatgcgggaaaagtagtcgagacgttcgggtctttcgttgtcggcggaaacgttttggtcggtctcgttgtctttatcattttgatcattattcaatttatcgtcataacgaaaggggcggaacgggtatctgaagttgctgccagattcacgctcgacgccatgccgggaaaacagatgagcattgatgccgatttgaatgccggaatggtgaccgagcaggaagcgaaggtgcgccgtgagaaggtggcccgtgaagccgacttctatggagcgatggacggagcgagcaaattcgtgaaaggggatgcgatcgcagggatcatcatcgtccttatcaacgtcattttcggaattgtcatcggcatgctgcaaaaacaaatgagcattcaggaagccgcttcacactttacactcctgtctgtaggcgacggaatcgtatctcagctgcctgcgctcttgatctcaacggcgacgggtatcgtcgtgacaagagcggcgtcggacggaaacctcggccacgatattacaggccagctgtttgcctatccgaagcttttgtatgtcacggcgggaacgattttcctgctcgggattttcacgccgatcggcattctcctgacaggccctctggctcttcttctcgccgcaggcggctatatgctctccaaagccggtgaagagaaggaaaaagtggaggatatccttgaggaagaagctgaagtggatgaattaaaaagccccgaaagcgtcgtccatctgcttgatattgatccgatcgagtttgaattcggctacggattgattccgcttgcagatgcaaatcagggcggcgatctgttggacagaattgtcatgatcaggcgccagctcgcgcttgaactcggacttgtcattccggtcgtcagaatcagggataacatcgctcttcagccgaacgagtacaggctcaaaattaaaggaaacgaagtcgcgaaaggcgagcttctcctcgatcactttctggcgatgtctccgacaggcgaagacgatcagatcgaagggattgacacaatcgaaccgtccttcggtcttccggctaaatggataccggaatctcagaaagatcaggccgaaatgctcgggtacacggttgtcgatccggcttcagtcgtatcgacccatattacggagcaggtgaaaaagcacgcccatgagctgatcggaagacaggaaacgaaacagctgatcgactacttgaaagaatcttatcctgtactggtcgaagaggtctcgccgaatccgctgtctgtcggtgacattcagaaagtgctggcaaaacttctgaaagaaaaagtatcgatcaggaacttggtgacaatctttgaaacgctggccgactacggaaagctgacgacggattcagatatgctgaccgagtatgtcagacaggctctggccaagcagatcaccgcccaatatgcgaaggaaaatgagacgctgaaagtggtgacttgttcgggccgcgtcgaaaaggccgtggcggaaggaattcagcagactgaacacggcaactttttatctcttgaaccaacattatccgaaaatatcattcaatctgtagcaagagaaatcgaacagctctcattgagacaggaagtgccgatccttctatgttcgccgcctgtcagaatgtatgtcaagcagctgcttgagcgctatttccctgatctgccggttctttcctataacgaattggaagccaatgtagaagttcaaagcatcggagtggtggatattcaatga

SEQ ID NO: 1983 - DNA, 1113 bp, Bacillus licheniformis
atgaaaatcaaaaaatttgtagctggttctatgcaggaagccacaaagcaaattatacaggagctcgggaatgacgccgtaatcttgaattctaaaaaaattcaaaagagaaaatttctcggctttgtgaaaaaaaccggggttgaagtgatcgcggtcgtcgaccaggacttttccgacgcaaggaagcaagagcgtcaaaagcccgttttccgggaacaaagcccttcgcctgtcccgcagccggaccatcttgatttggcaagccaagtgaaagagctgaaagaactgctggaaatgcggcatcatgagcagcctgttgatgtgctgcctgaaccgctgaaaaaggcggaccagctcctggcaaagaaaggggtatcgccggccatccgtacgaaagcgctcggccggttgatcagcacttctttaagagacggcgaagagtggacggatgaaaagacgctggcgcacttaacagatgctttggccgatcttcttcccgataatctggaacaggacgtggcgattcattcgcaatatgtcgtgctcttcggatcgaccggagtcggcaaaacgacgacattggcaaagctcgccgcttcttctgtactggaaaagcagaaaaaaatcgcttttatcacgaccgatacgtacaggattgcagcggttgaacagctcaggacatatgccgagcttctgaatgcgccgcttgaggtgtgctacacgaaagaagagtttaaagctgcccagcaaaagttcgccgattttgaccacgtcttcattgatacggcgggccggaatttcaaagacgggcaatatgtcagggagctgaaggaaatcattccgtttgagcgtaagatacaggcgtttctcgtcatgtccgcgacgagcaagtacgaggatatgaaggagctcattaagcagttctcaagcattccgatcgatcagttgatattcacgaaagtggatgagaccgattcgttgggaagcgtcatgaatctgctcgccgaatcgagaatcggcctcggctatattacaaacggacaaaatgttccggaggatatccgctacttgtcaaacgcagcatttgtcagactgcttacggggtgttga

SEQ ID NO: 1984 - DNA, 888 bp, Bacillus licheniformis
atggatcaggcagaaagcttacgaaggcggatggggcaacgctttgccgaaccgcccgccgctatcgctcatccaaaagcgaaaacgctcgctgtcatgagcggaaaaggaggcgtcgggaagtcgaatgtatcgctgaatacggctctcgccattctggaaaaaggaaagagcgtgctgttgatcgatcttgatgtcagtatggggaacattgatattctgatcggccggcaatcgctctacacggtgatggacctcctccagcaaaaaatgccgtttgagcgcgccttgtcagccggcccgcgaggccttcaatacatttcgggcggaaccgggctggatgcaatgttcgaattgaacagggaaaactgggcgttttttctgaaggaattgacgcgggctttgacaagcttcgactatgtcatatttgacatgggagcggggctgtcaaaagatcagctgcctttcgtcctgtcagcggatgaaattctggtcgtcaccacgccggagccgacatccatcatggacgcatacagtgcgatcaagcatttggcattaaccggacgcgatcttcagctgaaagtcgttgtcaatcgctgtacaacccaaaaagacggaatttctgcttttctccgcctttccaacacggtaaacgcttttttgcagcaaaagcttgcatatgcagggccgattcctgaggatcccctggtctcaagagccgttgtggagcagcagccgtttctgataaagagtccgcgttccaagccgagcagggcggtttacctgctggccgaatcgctgcttcataacggcagaacggaaatgggcgaaaaccggtcctttatcgaaaaattatcttcattcctgaggaggggcaatacattatga

SEQ ID NO: 1985 - DNA, 1074 bp, Bacillus licheniformis
atgattcgtgttcttgtcgttgacgactctgcttttatgagaaacatgatcaccaagtttgtaacatccaatcacgagattgctgtagcaggaacggcaagaaacggcgaggaagcgctccaaaaaatcaaggagctccgtccggatgtgatcacattggatattgaaatgcctgtgatgaacggaaaagaaacgttgaaaaggattatggcgagcgatccgcttccggttgtcatggtatcgagcctgacgcagcagggagcagatatcacgatcgaatgtctggagcttggggcgatcgatttcgtcgcgaagccgtcgggttcgatttcaatagatttatataaagtaagagacatgctgattgagaaggttttgacagcaggacgggtgaaactgaaaggccggcaagttccgatctcaaagcccgccatcgagacggcgaagcagccgattgtgggcggcagcgattcagtccgctttcgggctggaaaacagctcatctgcatcggtacatcgacaggggggccgagggcgctgcaaagagtgcttcccaagcttcccaaaacgttgaaggcgcctgtttttatcgttcagcacatgccaaagggctttacggcctcattagcgaacaggctgaaccacctctcagaagtaaccgtgaaggaggctgaaaacggtgagagagcgaaagacggctgggtttacattgcacccggaggaaaaaacatggcggtcggccttgaaaagggcgaattggtgatcacgctcgatgaccgcgacacagaaagccgccacaagccttctgttgactacttgtttcaatccctggcctcacttcgggagtttgaaaaaatcgccgtcattatgacggggatgggaagcgacggaacagaaggcgtaaaaggccttttgaaacatgggagcggaacggtgatcgccgaagcagccgagtcgtccgtcgttttcggaatgccgaaatcggtcattaacaacgggcttgcaaacgacatcaagcatgttgatgagattgccgcagccattatgacgtatatgaaaaaagagagggcgtga

SEQ ID NO: 1986 - DNA, 2022 bp, Bacillus licheniformis
atggatatgaatcaatatttagacgtctttattgaagaaagcagagaacatttgcaaacctgtaacgaaaaattgctcgaactcgaaaaaaatccgacagacttgcagcttgtccatgatattttcagagcggctcataccttgaaagggatgagcgcaacgatgggctatgaagacatggctcatttaacgcacagtctggaaaacgtgctggatgcgattcgaaatgaagaaatgaccatcacgtcagagtggatggacgtcatgtttgaagcgctcgatgaccttgaagcaatcgtcctttcgatcatcgaaggcggcgacggcaaaagagatgtttccgaagtctgcgccaagcttgatgtgacaggggcaaacaaggaggcggcagcagcggcagaagcgcctgaagcggcgtcttccgaaacgaaatggtcctatgacgaatttcaacgaacggtcatcgccgaagctgaggaacaaggctttaaatgtttcgaaatcaaagttgcattgaaagaggactgtctgttgaagggcgttcgggtgtacatggtatttgagcagctgaacgaggtcggcgaagtcgttaaaacgattccggaaacagaagtccttgaatcggaggattttgattccgaattcgtcatctgctttttaagcaaacacggaaaagaagagattttcaacaaaatcaacggcgtatctgaaattgaaaaaatagaagtgaccgagctgaaaaacgatttttcggcacaagaagaagcgaagcccgccgcatccgaaaaagaaaccgcaccgaaagaggcggagaaaaaaccggctaagcagccggacggcaaaaaagacgcggcgaaacctgcggcaggcggcggaacgaagacgatccgcgtcaacatcgaccgcctcgattcattaatgaacctgtttgaagagctggtcattgacagggggcgcttagagcagatcgccaaagagctagaacacagcgaattaacggaaaccgtcgaacggatgactagaatttcaggcgacctgcagtcgatcatcctcaatatgagaatggttccggtagaaacggtgttcaaccgattcccgcgcatggtccgccagctgacaaaagaattaaataaaaagatcgagctgtcgattttcggagcggaaacagagcttgacagaacggtaatagacgaaatcggcgacccgcttgtccacctcttgagaaacagccttgatcacgggatcgaggcgcctgaagtcagggtgaaaaacggtaaacctgaaaccggtcaagtccgcctgaaagcataccacagcggtaaccatgtctttatcgaggtggaggatgacggcgccggcatcaaccgcaaaaaggtgctcgaaaaagcgcttgagcgcaacgtcattactgaacgcgaagccgaaacgatcgaagatcatgaaatcgacgcgctcatttttgcgccgggattctcaaccgcagatcaaatctcggatatttcaggacgcggagtcggcttagacgttgtcaaaagcaagctggaatcgttgggcggttctgtcagcatcaaatcgagcgaaggcgaaggttcgcttttctccatccagcttccgcttacactgtcgatcatttccgtgctgttagtcaaacttgaaaatgaaacgtttgcgattccgatttcttctattatagaaacggctgtcatcgataagaaagatattcttcaaacgcacgaccgcgaagtgatcgatttcaggggccatatcgtaccggtggtttacctgaaagaacagtttaatgttgaggattcttcagatgatcttgatcagcttcacgtcatcgtcgtgaaaaaaggagacaagctgacggcatttgttgtcgactcctttatcggccagcaggaagtcgtattaaaatcactcggcgattatttaacaaacgtctttgccatttccggcgcgacgattttgggagacggacaagtagccctgatcatcgactgcaacgcccttattaaatag

SEQ ID NO: 1987 - DNA, 477 bp, Bacillus licheniformis
ttgaccacacagactaccaccggtgagaaaatgattgtgttcaaagtgaatcataaagagtatgccatctctgtatcagaagtaatgtccattgaaaaatggcagcagccaacaagggtgccgggagtggaaccgtatatttgcggcgtcattaatttgagaggtgttgtcacacctgtcatcgatttaagaaagcggattgaagcgcctggagacacgattactgatgaaacgagaatcatcatcatcacccatcaggacattgaagtcggctgggtggtggatgaggcgaacgatgtcatcacagtcgaggaagaggaaattgaatcggctcccgaaacggtaggaaaagacggcaggcaatggattaaaggcatcgtcaagcaagggtccagacttctcaatctgattgactctgaagctgttttaaaccggaagtcgagccttgccgccgcttctgaaaatgtgaagaaataa

SEQ ID NO: 1988 - DNA, 630 bp, Bacillus licheniformis
atgagcgtatttaacggaattagagaagagcatcttgatatattgcgggaagtcgggaatatcggagcgggccattccgcttccgccctggccctgttgctgaacaggaaaatcgaaatggaagtgccgtttgtcaagctgatgtcgtttgatgagcttgtcaacctattcggcggtgcagatcttcctgtcgcaagcatctttttgcgcatggaaggggattttccaggttctatgttcgtgatcatgcctttttcagaggccgagcagctgatcagggagcttgtcggcaatccggaattcgagattgacagcatgacgccgaacgatatcggagcctctgccctgcacgaactcggaaacattatggcgggatcttatttgaccgctctcgctgatttgacaaaccggcaaatgtacccgagcgtcccagaactgacgctagatatgttcggagccgtcatcagcgaagggctgatcgagctcagccaagtcggagatcaagttatcgtgatcgacaactccatttttgacgaggagcacaaccggaaagttaaagcgcatttgttccttctgccggactatgattcttttgaaaagctctttcatgcattgggtgcagcgctatga

SEQ ID NO: 1989 - DNA, 507 bp, Bacillus licheniformis
atgaaaatcttagaaaaagaaacatcgattatcagagtgggaattgccgatgtaaaaatcgtccgcactcccgacaagatcagaacatcgggtctcggttcgtgcgtcgggctcgtgctgtatgatttggaagcaaagacggccggtctcgtccacgtcatgcttccggactcttccttatccaagacgccggacatcaacgtggcaaaatacgcggacacagccgtcgaagcgacggtcaagatgctgcttgaagccggatgccgaaaatacgctttgaaagcgaaaatggccggaggagccgaaatgtttaaatttaagatgacaaatgatttgatgaaagtcgggccaagaaatgtgcttgcgattaaaaaacatctatctctcttaaacattccgattgtaagcgaggatacaggcggaaacagcggaaggacgatcgagttcgatccgcaatcagctgaacttgtcatccggacagttaaacaaggtgtaacaacgatttaa

SEQ ID NO: 1990 - DNA, 765 bp, Bacillus licheniformis
atgcaatccttgaactatgaagatcagatgctttggtcgcggtggaaagaatggaaagatcctcaggcaggcgatgatttaatccgccgctatatgccgcttgtgacatatcatgtcggccggatagccgtcggcttgcccaagtccgttcataaagacgatttggtcagccttggcatgctgggtttgtatgatgcccttgaaaaatttgatccgggaagggatttgaagtttgatacatacgcttccttcagaatcagaggcgctatcatcgacggtcttcgcaaagaagactggcttccgagaacgtcccgtgaaaaaacgaagaaagtggaagcagcgatcgaaaagctcgaacagcgttacttaagaaatgtttcgccgagcgaaatcgcagctgagctgggaatgagcgaacaagacgtcgtgaccacaatcaatgaaggtttctttgcgaacctcctttcaattgatgagaagcttcacgaccatgaagacggggagaacgtccaggtgatgataagggacgacaaaacgagcacgcctgaagaaaaaatgctcaaagacgaactgatctcccagcttgcggaaaaaataaacgagctatcagaaaaagagcagctcgtgatcagcttattctataaagaagagctgacgctgacggaaatcggacaggttttgaatttgtcgacttcccgtatttcacagattcactccaaggcgcttttgaaattgaagcatctgctggataaagtggtacaatag

SEQ ID NO: 1991 - DNA, 513 bp, Bacillus licheniformis
atgtcaacaatattatggcttgtgagcttcacgctccacggtatattgatttatttcgtcatcattttgaatacgaggctcagcgctttcaaggcagcggagaaagagcaaaaacagcttttggaagaaaccgagaatacattgaccgcttttttgatggagttaaaagacgaaaatgaaaaactcgttcaagagattcgggcgaatgccgaaaaagagccgcaaagaccggaaacacagcctgaaattcccgctcaaacccccgtccttccggaagcggacgaatcgcgcgatctgccgcttcacatcgaagcgatgatcaatgaggtggagcaggaagaggatgagctcaatcaaaaggagcaggaagcatccatatcctatgaagaagaagctctcgcattatatgaaaaggggctctctccggaggaaatcgcaagacagctgaaaagcgggaaaacagaaatcgagcttttcttaaaatttcgcggaaagctcaaaaacgattcttga

SEQ ID NO: 1992 - DNA, 741 bp, Bacillus licheniformis
atgtcagtcatttctatgaagcaattgcttgaagctggtgttcacttcggccaccaaacgcgccgctggaacccaaaaatgaagcgttacatcttcacggagcgtaacggaatctacatcatcgatcttcaaaaaacagtcaaaaaagttgaagaagcatacaacttcacgaaaaaccttgcagctgacggaggaaaaatccttttcgtcggtacgaaaaagcaagctcaagactctgttaaagaagaagcggaacgttctggaatgtactatgtcaaccaacgctggcttggcggtacattaacaaactttgaaacgatccaaaagcgtatcaaacgccttaaagatatcgaaaaaatgcaggaaaacggcacatttgacgtacttcctaaaaaagaagtcgttcaattgaaaaaagaattagagcgtcttgaaaaattcctcggcggaatcaaagaaatgaaagagcttcctgacgcactgttcatcatcgatcctcgcaaagagcgcatcgcggttgcagaagcgcgcaaactgaacattccgatcatcggaatcgttgacacaaactgcgatcctgatgaaatcgatgttgtcatccctgcgaacgatgacgccatccgcgctgttaaattgctgacttctaaaatggcagatgccatccttgaagcaaaacaaggtgaagaatcagttgaaacagaagcgaaagaagcagaaacaactgaaacaacaactgcttaa

SEQ ID NO: 1993 - DNA, 882 bp, Bacillus licheniformis
atggcaattactgcacaaatggtaaaagagcttcgcgaaaaaactggcgcaggcatgatggactgcaagaaagcgttaactgaaactgacggcaacatggataaagcgatcgatcttctaagagaaaaaggaatcgcaaaggctgccaaaaaagctgaccgcatcgcggctgaaggtttgactttgatcaaaaccgacggcaacacaggcgttattcttgaagtgaactctgaaacggacttcgttgcgaaaaacgaaggcttcaaggagcttttgaacgacctggctgaccacattctggctgaaaagcctgaaagcgttgaagctgctatgggtcaaaaaatggctaacggttcaactgtagaagaatacatcacaagcgcggttgctaaaatcggagaaaaaatcacgcttcgccgcttcgctgtcctgacaaaaggcgatgacgctgcattcggcgcatacctgcacatgggcggaaaaatcggcgtattgactgtccttaacggcacaactgacgaagaaacagcaagagacatcgcaatgcacgttgcagctgtaaaccctcgcttcatttcccgcgaccaagtgtcagaagaagaagcgaaccgcgagcgcgaaatcttgactcagcaggcgcttcaagaaggcaagcctgaaaacatcgtcgcaaaaatggttgaaggccgcctgaacaaatatttcgaagaaatctgcctgcttgatcaagcgttcgttaaaaacccggatgaaaaagtgaaacaggtcgttgctgcgaaaaacgcaacggttgaaacgttcgtccgctacgaagttggagaaggtatcgaaaaacgccaagaaaactttgctgaagaagttatgaaccaagtgaaaaaataa

SEQ ID NO: 1994 - DNA, 723 bp, Bacillus licheniformis
atggaaaaaccaaagtataatcgtatcgtattaaagcttagcggagaagcccttgcgggtgaacagggaaacggcatcaacccgaccgtgatccagtccatcgccaaacaggtgaaagaaatcgccgagcttgatgttgaagtggcggtcgtcgtcggcggcggcaacctgtggcgcggaaaaacgggcagcgatctcggaatggaccgcgcaacagcggactacatgggaatgcttgcaacggttatgaattcccttgcgctgcaagacagccttgaaacgctcgggattcagtcaagagttcagacatccatcgaaatgaggcaggtcgctgagccatacataagaagaaaagcgattcgccatcttgaaaagaagcgcgtcgtcatcttcgctgccggtacaggcaatccatacttctcaacggatacgacagcagcgctcagagcggctgaaatcgaagccgacgtcatcttaatggccaaaaataatgtcgacggtgtatacaatgccgatcctagaactgacgaaacagccgtaaaatatgaaaaattgtcttatctcgatgtgttgaaagacggtttggctgtcatggattcaaccgcttcttcactttgcatggataacgacatcccgctgatcgtcttttctattatggaagaaggaaatattaaaaaagccgttttaggcgaacaaatcggtacaatcgtaagggggaaataa

SEQ ID NO: 1995 - DNA, 558 bp, Bacillus licheniformis
gtgtcaactcaagtgatgaatgaaacaaaagaacggatgcaaaaagcgataagcgcttatcagcgcgaattggccactgtccgcgcaggacgtgcaaatccgtcattgctggacaaagtggcagttgagtattacggagcgcagacgcctttaaaccagattgcgtccattacagttccagaagcgcgcatgctcgtcatcacaccatatgacaaaacggcgctcggcgatatcgaaaaagcgattcaaaaagccgacctcggtgtaactccgtcaaacgacggcaatatcatccggatcacgatccctcctctaactgaggagcgcagaaaagagcttgccaaactcgtgaaaaaatattcggaagatgccaaagtcgcggttcgcaacatccgccgcgatgcaaatgacgatctgaaaaaattggagaaaaatggtgaaatgactgaggatgaattgcgctcttcaacggaagacgtacaaaagctgacagatgaatatgtgtcaaaaattgatgagatcacaaaagataaagagaaagaaatcatggaagtttaa

SEQ ID NO: 1996 - DNA, 783 bp, Bacillus licheniformis
atgctcaatatactcaaaaattggaagaatcagcattcggctgcttccaacatggaatgttacacaaaagaaaatattttaaaaggagaaattcctgaacatatcgccattattatggacggaaacggccgctgggcaaagaagcgggcgatgccccgcatcgcgggtcatcacgaaggcatgaaagtggtcagacagacgacaaagcttgccaatgagctcggtgtcaaagcgttgacgctgtatgccttttcgacggaaaattggaagcgtccaaagcttgaggttgactttctgatgaagctgcctgaagagtttctgggaacgtatctcccggagctggtcgaagaaaatgtccgggtccgcatgacaggcgatagggaaggactgccgccccacacgatccgcgcggttgaaaaagccatccgtgatacggagaacaatgacggacttattcttaattttgcattgaattacgggggacgtgcagaaatcgtcagagccgcaaagaaaattgccgaagaagccaaaaaaggcacattgaataccgaggaaatcgacgaaaagctattttccgattatttaatgacagaaactttgcaggaccctgatttgctgattcgcacaagcggcgagatcaggctgagcaacttcatgctttggcagcttgcctacagcgaatttttatttaccgatgtattgtggcctgattttaaagacgttcacttgcttcaggctatcggagaatatcagcgtcgcgggagaaggtttggcggaatttag

SEQ ID NO: 1997 - DNA, 804 bp, Bacillus licheniformis
atgaaacagagaatattgacgggtgtgatcgcggcagcggtttttctgccgctcgtgattttcggcgagctgccgttcaccctgctagtttatgcaataggtatacttgctctatttgaacttttaagaatgaaaggcctgaagctgatcagcgctccgggtatcatcagcatgctgctgttggcggttttgctgtgtccaagccaatacgcggaagacgctgggctgggtataaccaaaggggaggtcgtctttttggcggtccttttgcttttggcatatacggtgctcagcaaaaactcgtttacttttgacgaagcggcattcgtggcgctggcagcagtttatatcggattcgggttttattactttattgaaatcagaaacatcggactcagctatgtcttttttgcgatcggcgtcgtctggtcaacagattccggcgcttattttatcggaaaggcgtttggaaagcggaagctctggcctgaaatcagccctaacaaaacggtagaaggcttttggggcggaattttgacagcggtcgttttttccgcgatttatcaggccgccacaggttttccgcacgcttatctgtttgtgctgatcattaccgtgcttttgtcaatcgtcggtcagatcggcgatttggccgagtctgcgttcaaaaggcattaccaggtgaaagactcgggccggatcctcccgggacacggcggaatgctggaccgctttgacagctttttatttgtcatgccggttctgtacttcctgcttgttctttttcagccgttcgggctatga

SEQ ID NO: 1998 - DNA, 1152 bp, Bacillus licheniformis
ttgaagaacatatgtctattgggagcgacaggctccataggagaacagacgcttgatgtcatcaaagcgcatgacgataagtttcggctgaccgccatgactttcggcaaaaacgccgaaaaagcggcagaaatcattgaaacctttaaaccgaagtatgtaggcgtcggggatgagcatacatatgaaacattaaaacagcattctttctcctacacctttaaaacagggatcggggaggaagctttaatcgaagcggccgttatcccggaagcggatatcgtcgtcaatgctctcgtcggcagcgtcggtcttcttccgactttaaaggcgatggagcataaaaaaacaattgcgcttgcaaataaggaaactctcgtgacagccggtcatatagtgaaagaacacgcccaaaaatacgatgtcccgctcctgcccgtcgacagcgaacattccgcgattttccaggcccttcagggggaaaatccgaagcatatcaaacggctgatcgtcacggcttcaggcggcagcttcagggacagaacaaggcgggaacttgaaggcgtcacagtggaagaagccctcaatcatccaaattggtcgatgggtgcaaaaatcacgatcgattcggctacaatgatgaataaaggactcgaggttattgaagcccactggctgtttgatctgccctatgaccagatcgatgtcctccttcacaaagaaagcattattcattcaatggttgaattccacgaccgcagcgtcatcgcccagcttggcacacctgatatgagagtgccgattcaatatgcgctcagccatccggaacgcctgccgtttaatgaagcaaaatccctcgatctctgggaagtcggacagctgaattttgcccaagctgattttgaaaggttccgctgcttacaattcgcttatgaatcaggtaaaataggcggtacaatgccgactgttttaaacgcggccaacgaggaagccgttgcggcatttctttcgggcaggatttcctttctcggaatagaagacatcattgaaaaggctttggaacgccatcaggtgatcgcaaagccgagccttcaagagatccgtgaagtggacaaagacgccagaaagtttgtccaaacattactcacataa

SEQ ID NO: 1999 - DNA, 1266 bp, Bacillus licheniformis
atgttcgtgaatactgtgatcgcgtttattcttatttttggaacgctcgtatttttccatgagcttggtcatctcatccttgctcaaagagccggaatactgtgccgggagtttgctatcggcttcggtccgaaaatcttttcgtttaagaaaaatgagaccgtttatacgatcaggcttcttccgatcggcggctttgtcagaatggccggcgaagatcctgagatgattgaagtgaagcccggttatacggtcgggctgttgttcgacagcgaaaacaaggtcgaaaagatcattatcaaccaaaaagaaaagtatcccgacgcattggtcattgaagtggagcaggccgacctggagcaccagatgaggattacgggctatgagcacggcaatgaagatcatctctcttcattttctgtcagtgaaacgtcctttttcatcgtagacggggaagaagtccagatcgctccttacaaccgccaatttcattcgaaaacggtttggcagcgcatcaaagcgattgctgccggaccgatcatgaactttattttggcttatgtcatactcgtgatgctcggactgatgcagggagtgccgtctgacgagccggtgctcggcaagttgatagacaacggacgggcggcggaagcaggcctccaggagggagaccgcattcaaacgatcaacggggagaacatgaggtcgtggacggatattgtcaacacggtcagagaacaccctgaaaaagaactgaaaatcgttttgatgcgcgacaatgtcaagctgacgaaatacgtaacacctgaagctgtcaaggcaggggatgaaaccgtcggcagattcggcgcttacaatcctgtgaaaacaggcgttctgacatcgatttcctacggtgcgaccgaaacggcgacagtggcccagagcatcgtcaccaatctcggaaagctcgtcacaggacaattctcaatcgacatgctggccggtcctgtcggcatttatgacatgacagaccaagtggccaagacaggcgttatcaacctgctgaagctggccgcatttttaagcatcaacctcgggatcgtcaaccttctgccaatccctgcgctggacggcggaagactgttgttcctgtttattgaagcgatccgcgggaagccgatcaaccgcgaaaaagaagcgtttgtcgtctttatcggcgtcgcatttttgatgctcctaatgcttgtcgtcacatggaacgatatccagcgcttatttctgtaa

SEQ ID NO: 2000 - DNA, 1719 bp, Bacillus licheniformis
atgagacagagcaggactttaattcctacgctccgcgaagtgccggctgatgctgaagcgaaaagccatcagcttcttctcagagcagggtttatcagacaaaacacaagcggtgtatacagctatatgcctcttgccaataaagtcattcataaaatccagagcattgtccgcgaagaaatggagaaaatcaatgccgtcgaaatgctgatgccggcgctccagcaggcggaaacttggcaggaatcgggaagatggtatacgtacggtcctgagctcatgaggctgaaagaccgccacggccgtgaatttgccctaggcgcaacacacgaagaggtcatcacaagcatcgtcagagatgaagtgaaatcgtacaagcgccttccgctgaccctttaccagatccaatcgaagttccgcgatgaaaagcgcccgcgcttcggtctgttaagaggccgggaattcatcatgaaggatgcgtattccttccattcctccgccgaaagccttgatgaaacgtacaatgatatgtatcaggcgtatacgaatgtgtttacgcgctgcggcctgaatttcagaccggtcattgcagactcaggcgcgatgggcggaaaggatacccatgaatttatggcattgtccgatgtcggtgaggatacaattgcgtattctgatcagtcttcatacgccgccaacattgaaatggctgaagtgaaggaaacagatgccggcgagcaggcagaaatgaaagagctgcaggaagtccacacaccttcggtcaaaacgatcgaagaggttgccgcatttcttggcatatccccgtcagactgcattaaatcaatgctgatgaaagcagacggacgttttgtcctcgtcttgacgagaggggatcacgaagtcaatgatgttaaggtgaaaaacctgcttcaagcagaaataatcgaattcgcgagcgccgaagaggttgcagagataacaggcactgaacccggttttgtcggaccggtggggctcgaccgcgaaatcgaaatctttgcagactttgctgtgaaggcgatggcaaacgcagcagctggagcgaataaaacagattaccattatcaaaacgtgaatatcagccgggatgcgcacaatgtgacattcgccgatctccgctttatccaggaaggagacccttcaccggatggaaaaggaacgatccgttttgcaaaaggaatcgaagtcggacaagtctttaagctcggcacccgctattctgaagcgatggacgccacataccttgatgaaaacggacgcgctcagccgatgctgatgggctgctatggaatcgggatttcccggacgctttcggccatcgttgagcagcatcatgacgataaaggcttgatctggccgctggaagtgacgccgtatgacctgcatatcctcgcgcttaatatgaaaaatgacgcgcaagttcagcttgccgaaaagctgtatgaagaatttaaagcgaacggctatgacgtactgtttgatgaccgtgccgaacgggccggcgttaaatttgcagattccgatttgatcggtctgccgatccgcatcacggtcggaaaaagagctgacgaaggagttgtcgaagtgaagatccgcaaaaccggagaatcctttgaaatcgctgctgatgagctgtttgactttatcgaaaaacaagtcaagagcttatcttctcactcttaa

SEQ ID NO: 2001 - DNA, 4317 bp, Bacillus licheniformis
ttggaagaccagctttctgtcaacagaagacagtttcaaattcttctgcagcagctgaatgtaacggaagatacgatgatccgccaccttgaaggcggacaaatcataaagctgaccgttcataaaaacaagaagacatggcactttcactttaaattgagaaatgtgctgccttatcaaatcttcgaacggtttcacagccagctgacccgcaccttttcccatatcgcccaggtcacctgttccatcgaggcggaaaacccttcgattgacgagcagcttgttcaggattactggacgcgctgcattcaggaactcgatggtatttctccgccgatcttggcgcttttgaacgaccaaaagcccaagcttacgggaaacaaaatcctgcttaaaacgaaaacagatacagaagcgtccgctttaaaaaagaaatacagctcgctcatccagtcaagctaccgcacattcggctttcctgagctccagctggacacagaaatttttgtatcagatcaagagattcagaaattcagagagcaaaaaatggccgaagatcaagagagggcccttcaggctttaatcgaaatggagaagcaggataaggaagcacaagacgatgaagcgccggcaggccctcttcagatcggctaccagattaaagactctgaagaaatcagaacgcttgacagcatcatggatgaagagcggagaattacggtgcaaggctatgtattcgacgctgaaacaagagagctgaaaagcggcagaacgctttgcatctttaaaataaccgactatacaaacagcattctcgtcaaaatgttcgcccgcgaaaaagaagacgctgtattgatgaagtccctgaaaaaagggatgtgggtcaaggcgagaggaagcatacaaaacgatacattcgtccgcgatttggtgatgatcgccaacgatgtcaatgaaatcaaagcgaaaacccgtgaggatacagcgccagaggacgaaaaacgagtcgagctccacctccattcaccaatgagccagatggatgccgtatcaagcatcggcaagcttgtcgaacaggcgaaaaaatgggggcacccggctatcgcgctcactgaccatgccgtagtccaatcgtttccggatgcattcgcggcaagcaaaaagcatggcgtgaaaatgatctacggacttgaagccaacctcgtcgacgacggcgtgccgattgcctacaatcccgtgcaccgtctgcttgaagaggaaacatatgtcgtgttcgacgtcgagacgacggggctgtctgccgtctatgatacaatcatcgagctggccgccgtaaaagtaaaaggcggggaaatcatcgaacgctttgaaaggtttgccaacccgcatcgacctttatcggctacgatcatcgagctgacggggattaccgatgatatgctgaaagatgcgcccgaagtcgaagaggtcatccgcgattttaaagaatgggtcggtgatcacacgcttgtcgctcacaatgcaagctttgacatcggcttcatcaatgtcgcctataagcgcctgctgaattcggagaaagtgcagaacccggtcattgacacgcttgagctgggccgttttctttatccggaattcaaaaaccacaggctgaatacgctttgtaaaaagtttgacatcgagctcacccagcatcacagggcgatttatgataccgaagcgacgggttatctccttgtgaaaatgctgaaagatgcggccgaaaaaaatatcctgtaccacgatcagctgaatgaaaatatggggcagtccaatgcctatcagcattcaaggccatatcacgcgacacttttggcggttaatgagacaggcttgaaaaaccttttcaaacttgtttcgctgtcgcatatccattatttttacagggtgccgaggatcccaaggtcacagcttgaaaagtacagagaagggcttttaatcggttcggcgtgcgacaaaggcgaagtatttgaaggcatgatgcagaaatcgccggaagaagttgaagacatcgcttcattttatgactaccttgaagtcatgccgcctgaagtctaccggcacctgcttcagctcgaactcgtcagggatgaaaaagcgttaaaagaaatcatcgccaacatcacaaagctcggcgagaagctgaatatcccagtagtagcaactggaaatgtccattatctgaaccctgaggacaaaatttaccggaagattctagtttcctcgcaaggcggcgcaaatccgctcaacaggcacgagctgccgaacgttcatttccgttcgacggatgaaatgcttgaggccttttcatttttgggtgaggaaaaagcgaaagaaatcgttgtcaagaacacccgcatgatcagcgagcgaatcgaagaaatcaagccgatcaaagacgatctttacacaccgaagatcgaaggcgcagatgacgaaatccgccgcatgagctatgagaaagcaagaagcatttacggcgaggacctgcccgaaatcgtcgaaaaacggatcgaaaaagagctgaaaagcataatcggccacggattcgccgtcatctatctgatctctcataagcttgtaaaacgctcccttgatgacggctatctcgtcggttcgaggggatcggtcggttcttcccttgtcgcaacattgacggaaattaccgaggtcaacccgctgccgccgcattacgtctgtccggattgccgccattccgagtttttcaacgacggatcggtcggttcgggatttgatttgcctgacaaagactgtccgaagtgcggagcggcctacagaaaagacggccacgacattccgtttgagacgttcctggggtttaaaggggacaaggttcctgatatcgacttgaacttctcgggcgaataccagccgcatgcccacaactatacgaaaatcctgttcggagaggataacgtctaccgtgcgggaacgatcggaacagtcgccgaaaaaacggcttacgggtatgtcaaagggtatgcaaacgacaacaatttgcatatgcgcggggcggaaatcgaccgacttgtccaaggctgtacaggcgtcaagcggactacagggcagcacccgggcggaattatcgttgtgccggattatatggatatttacgacttttcaccaatccagtttccggcggatgccacagattccgaatggaagacgacgcattttgacttccattccatccatgacaaccttctgaagcttgatattctcggacacgatgatccgacggtcatccgtatgctccaggatcttagcgggattgatccgaaaacgattccgaccgatgatcctgaagtgatgaaaattttccaagggacagagtctttaggggtaaccgaggaacagatcggctgtaaaaccggtacactcggcatccctgaattcggaacccgctttgtcagacagatgcttgaggacaccaagccgacgacattttccgagctcgtacagatttccggcctgtcacacggtacggacgtatggctcggcaacgcgcaggagctgattcacaacaatatttgtgaactgagcgaagtgatcggctgccgtgatgacattatggtgtacttaatctaccaggggcttgagccatccctcgcctttaagattatggagtttgtccgtaaaggaaagggactgacgcctgagtgggaagaagaaatgaagaataataatgttccggactggtatatcgattcctgcaaaaaaatcaaatacatgttcccgaaagcccacgctgcggcatatgttttgatggcggtcaggatcgcttattttaaagtccatcatccgctgctctactacgcagcatacttcaccgtgcgggccgacgactttgacatcgaaacgatgatcaaaggatcgacagcgatcagagccgtcatggatgatatcaactctaaaggccttgacgcttctccaaaagagaaaagtttgctcacggtgcttgagctggcgcttgaaatgtgcgaaaggggcttctctttccaaaaagtcgatttatacagatcgagcgcttcagaattcatcattgatggaaacagcttgattccgccgtttaattcaataccggggcttggaacaaacgccgccttgaatattgtcaaagcgagggaagaaggcgaatttctttccaaagaagatttgcaaaaaagaggaaaggtgtcaaaaacgatcatggaatacttggagcgccacggctgtctcgagtcgcttccagatcagaaccagctgtcattattctag

SEQ ID NO: 2002 - DNA, 141 bp, Bacillus licheniformis
ttgtcaacagatctgacagccctttatttttttgtgatcatttctcccctggcatttgtcacccaattccgaaaaaacgctctttatgccgtaaaacagataaaaaaactgcctgctttaagcaggcagtttctagaataa

SEQ ID NO: 2003 - DNA, 1986 bp, Bacillus licheniformis
atgatggggaggaagcagtacgtgaaacagaaagtatttttaaaaatgaaagcgctttgtttggcacttttagtgatcttctctatgagcatagcgtcgttttcagaaaagacccgtgcagcttctgctgaagaatatcctcataattatgctgaactgctgcaaaagtctttgttattttatgaagcacagcgctcgggaagacttccggaaaacagccggctgaattggagaggagactccgggcttgaggacggaaaagacgttggcctcgatttaacgggagggtggtatgatgccggcgaccacgtgaagttcggtctgccgatggcttattctgccgcaatcctgtcatggtcggtctatgagtaccgagatgcctacaaagaatcgggtcagcttgatgcggcgctggacaatattaaatgggcgacagactactttcttaaagcccatacggctccttatgaattgtggggccaagtcggaaatggcgctctagaccacgcatggtgggggccggccgaagtaatgccgatgaagcgccctgcctataagatcgatgccggctgtccggggtcagaccttgctggtggtacagccgcagcgctagcatcagcatcaattattttcaagccgacagattcttcttactctgaaaaattactggctcatgccaagcaattgtatgattttgccgaccgctaccgcggcaaatattcagactgcattacagacgcacagcaatattataattcgtggagcgggtataaagatgaactgacatggggagctgtctggctctacttggcaacagaagaacaacaatatttggataaagcccttgcttcggtctcagattggggcgatcccgcaaactggccttaccgctggacgctttcctgggatgacgtcacttacggagcacagctgctgctcgctcgtctgacaaacgattcccgttttgtcaaatctgtcgaacgcaatcttgattattggtcgacaggctacagtcataatggaagcatagaacggatcacgtatacgccgggcggtttggcctggcttgagcagtggggatcattgcgatacgcttcgaatgccgcttttctcgctttcgtttattccgattgggtggatacagaaaaagcgaaaagatatcgggattttgctgttcggcaaacggagtatatgctaggagataatccgcagcagcgaagctttgtcgttggatacggtaaaaatccgccgaaacatccgcatcaccgtacagcacacggttcatgggccaatcagatgaatgtgcctgaaaaccatcgccataccctatacggcgcattagtcggcggtccgggaagggacgattcgtaccgagatgacataacagattatgcgtcaaacgaagttgcgatcgattataatgccgcttttaccggcaacgtagcgaaaatgtttcagctgttcgggaaaggccatgttccgctgcctgattttccggagaaggaaacacctgaggacgaatattttgcagaggcatcaatcaacagctccggaaacagctatactgaaatccgggcgcagctcaataaccgttcgggatggccggcaaagaaaaccgatcaattgtctttccgctactacgttgacttgacggaagctgtagaagcgggatattccgccgaagatataaaagtcacagccggctataacgaaggggcctcggtatcagagctgaagccgcatgacgcttcaaagcacatttactatacagaagtcagcttcagcggggttttgatttatccaggcggtcaatccgcccataaaaaagaagtgcagttccgcctttcggcaccagacggaacgtctttttggaacccggaaaatgaccactcttatcagggtctgtcacatgcgcttctgaagacgcggtatattcctgtttatgatgatggacggctcgttttcggacatgagcccggttactag

SEQ ID NO: 2004 - DNA, 2115 bp, Bacillus licheniformis
atggataataaaacacgttttatgcagctgtatgagcaaattaaaaatccgaacaacggttatttctcacccgaaggaattccctatcactcggttgaaacgctcatatgtgaggcgcccgactacggtcatatgacgacatctgaagcgtacagctattggctgtggcttgaagcgatgtatggccggtacacacaggactggtcaaagctagaagccgcctgggacaatatggagaaatatattatcccggtcaatgaaggagacggaaacgaagaacagccgaccatgaactactacaacccctcaagtccagccacttatgctgcagaacacccctacccagatctgtacccttcagcgctgaccggacagtatccggcaggaaatgacccgctcgatgccgagcttaaagcgacatatggaagcaacgaaacgtatttaatgcattggctgttagatgttgacaactggtatggcttcggaaatcttctgaacccttcgcacactgccgtttatgtgaacacttaccagcggggcgaacaggaatccgtttgggaaacggttccgcatccgtctcaggataatcagacgttcggaaaaccgaatgaaggtttcatgagcctttttacaaaagaaaatcaggctccagcaccgcaatggcgctacaccaatgcaacggatgcagatgcgcgcgccgttcaggcgatgttctgggccaggcaatggggctacagcaatactaattatttagaaaaagctaaaaaaatgggggactttctccgttacggcatgtatgacaaatactttcaagagattggaagtgccgctgacggctcgccttcccgcggtgctggaaaaaatgcatgtcattatttaatggcgtggtacaccgcttggggaggcggattgggacagtatgcaaactgggcgtggcggatcggtgcgagccatgtgcatcaaggttatcaaaaccctgttgcctcttatgcactgtcaacggctgaaggcggattgattccaaattcatccacagcgcgaagcgattgggaaaaggcgctgaaaaggcagctagaactttacacatggctgctttcttcagaaggagccgttgccggcggcgccacgaacagctggaacggcaactacagcgcatatccgcagaatgtcagcacattttacgaaatggcctacacagaagcgcctgtatatcacgatcccccttctaacaattggttcgggatgcaagtctggccgctggaaagggtggcggaactgtattatattttcgcagagaaaggtgacaaatcgtctgaaaacttccacatggcaaagcatgtgattgaaaaatggatcgcatattcacttgattatgtgtttgtgggcgaacggccggttactgacgaagaaggctattatttaaatgatgcgggagaacgcgtccttggcggccaaaacccgcagatcgccgtacaatccgacccaggcgagttttggattccggcaaaccttgaatggagcggccagcctgatccgtggaagggatttgattcatttaccggaaatccgggactgcatgtcacgacgaagaatccttctcaagatgtcggcgttctcggcagctatattaaaacgctcgtcttctttgcggccggaacaaaagccgaaaccggcggctttaccgctcttggaaacaaagccaaaaatctggcaaaagaactgcttgatgcagcatggagtaaaaatgacggaatcggtatcgcagcagaggaagaacatgaagattatatccgctactttacgaaggaaatctactttccgaatggctggagcggcagaaacgggcagggcaataccatccctggccccaacactgtgccgtctgatccggcaaaaggcggtaacggcgtctatatcagtcatgcggagctccggccgaaaattaaaaatgatccgatgtggccttatttggaaaacaaatatcagacctcgtggaatccgaatacgggcaaatgggaaaacggactgccgacctttgtatatcaccgtttctggtctcaggtcgatatggcgacagcttatgctgagtatgaccgtttaatcggaaatgcataa

SEQ ID NO: 2005 - DNA, 1683 bp, Bacillus licheniformis
ttgagagaaaaatggttagccttatgtttaaagtcgatcattctgttcgttttgatcatgggaaccgttcttttatccgcagttccgaaagcttcgggaacaagcgggccagcaaagcaagaaaagcagagcatcatcaccccggctgatcttttggaaaacatgagccctggatggaaccttggcaacacgctggatgctgttccgacagaaggctcttggaacaatccgccggttcgcgagcatacttttgatgatattcgcgatgcggggtttaaaagcgtccggattccggtgacatgggattcccacatcggcagcgctccagagtatccgatcgataccgattggatgaaccgggtagaagaagtgacagattgggctttggaaagagagttttacgtcgtgttaaatattcaccacgattcttggctatggatcagccggatgggaaacagccagcaggagacattagataagctggggaaagtctggaagcagattgccgagcgcttcaaaaacaaaagtgaacgcctcctgtttgaaattgtcaatgagccgaccggaatgagcgcatatcaaatgaatctgcttaaccgagagatgctgaacatcatccgttcgaccggcggcaaaaacggccagcggctcgtaatcgtcggggggcttgaagataacaaagatgaattgcttcattcatttgaaccgcctgatgatgaccggattgtcctcacatatcactactattctccttgggaatacgtatcaaactggtggggccggacgacttggggatcggcagccgaaatctccgagatggaggaggatatcaaaccggtttatgaaaaatttgtaagggaaggatacccggttatcatcggtgaatacggtaccctcggcgccaatgaaaagcattcaaaatggctctatcatgatacgtttgtccgccttgcccacaaatatcaaatggtcccgatgtggtgggacaacgggaatgaccagtttgaccgggctgagagacagtggcgtgatcctgttgttaaagagattgtcattcaggcgggacgcggcgttcccaatgcgatcatcaaaccggcagatctttttatcaaaaaaggtcaaagcatcagcgatcagacggtggacattcagctgaacggcaatgtgctgactggcatttatcagaaatctgaaccattaaaggaaggcagtgattatacagttgacaatgccggaaaaacggtctctattaaggcatcctgcttggcaaagctgctgaacggggcggggcagcctggggtaaaagcgcagctcacttttacgtttcataaaggagccagccaggttatggatatcattctttatgatgacccgaagcttgaaaaaagcgaattcaccatcagtcaatcggcaatcagcggtgatctcaaaatcccggcgtcactgaacggaacgaagctggccacggttaaaggagtcgtcgattctacaggaaggccggttcttgaagaagtatggtcatggacgccctacttgaactatgacgaagatttttacgaaaaagacggggatttgtatttgaaagagcgggttttaaagtatttgaaaagcgattccacctttacatttgaactgtggccgaaaggcgtggaggcggtcgtgaaggtgaaagtcacgccttga

SEQ ID NO: 2006 - DNA, 1186 bp, Bacillus licheniformis
atgatgacgaaaaagggtttattgacagtgctgatgccgtttttgcttgcactttccgccattcagtttggcaatccccggcctgcactagccgcgtctccttttgttgagacagccggaacatcgttcactttaaatgggaaagaattttattttgccgggacgaataactattattttcattataaatctaaaaaaatggtcgatgatgtgttcgaagatatgaaagcgatgaatttgaaagtgatccgcatctggggatttcttgacggccagccgcaggaaaatacagtcatgcagccaaggccgggcatatatgatgaatcaggcttttcaaagcttgactatgccatttataaagcggggcagacagggataaaactagtcatcccttttgtgaacaactgggatgatttcggcggaatgaatcaatatgtcaggtggtttcaggcggatggacatgacgccttttatactcatccggacattaaagaggcgtataaaaattatgtatcctatatgctgaaccgagtcaacacatataatggcgtcaaatataaagatgatcccgcgattatggcgtgggagcttgccaatgaaccgagggtccagtctgacaggaccggaaatacacttgtcgaatgggcggatgagatgagcgaatttattaaatccattgatcagaaccatcttgtagcggttggagatgaaggattttatcatatagaagggcaccctgattggcattacaacggcggagagggtgtggattggaaaaggctgaccgctctgaagcatattgattacggcacatatcacctctatccggatcattggggcaaaacggccgagtgggggaatcagtggatcacagaccatatttgcgatggaaaagaaatcggcaagccggtcgttttagaagagtacggctatcagtaagtccagaagggactacgtctacagaacctggcttgaactcatagaaaagcagagcggtgcgggcagccaattttggattttgaccggcattcaggatgacgggaccctttatccggactatgacggttttcggatcgtttatccgagctctgccgcttctgtcatttcagagcacgcggagcggatgaatgaaaaatcagccgcttccgaaatgcttcagactaaacgctgtcatgatttgcaataa

SEQ ID NO: 2007 - DNA, 147 bp, Bacillus licheniformis
gtgcaggctcccattcatcagctccctcgtaaaaaccctgcttcaaaagcaggggattttagaaaaaacgatgaacatgtcgagacaaaattgcctgttcaatacaaaagagcgggtttccccactcttcgcctcggctatcgttag

SEQ ID NO: 2008 - DNA, 474 bp, Bacillus licheniformis
atgagtaacaaagtgatcgataccgtcagcgaaatggtccagcctatactagacaatcttcagcttgagctcgttgacatcgaatttgtcaaggaaggccagagctggtttcttcgcgtgtttattgattcagatgacggcgtagacatcgaggaatgtgccaaggttagcgaagctcttagtgaaaagctcgatgaggctgatccgatcaagcaaaactattttcttgaagtatcgtccccgggagctgagaggcctttaaagaaagaagccgatttcatgaaggcgctcggaaaaaacgtatatattaaaacgtacgaacctattgaaggcaataaagagtttgaaggcgagctttccgcatttgacggtgaaaacgtggaggtcacggtgatgatcaaaacgcgccggaaaacgatcaatattccatatgacaaagtagccaaagcgaggctggctgtttcgttcaattaa

SEQ ID NO: 2009 - DNA, 1119 bp, Bacillus licheniformis
atgagtagtgagttgttagatgccctgactgttcttgaaaaagaaaagggaatcagtaaggacattattattgaagcaattgaagctgcgctcatttccgcttataagcggaacttcaaccaggcgcagaacgtcagggtagatttaaaccgcgacaccggttcaatccgcgttttcgcccgcaaagatgtcgtggatgaagtgtatgatccgcgccttgaaatctcgattgaagatgccgtaaacatcaatccgaactacattgtcggagatgtcgtggaaatcgaagtgacgccgaaagatttcggccgcatcgctgcccagacggcaaagcaggtcgtgacccagcgcgtccgcgaagcggagcgcggcgtcatctattctgaattcatcgaccgcgaggaagatatcatgacaggcatcgtccagcggatcgacaataagttcatctatgtctctttaggaaaaatcgaggcgcttctcccggttgcagaacagatgccgaatgaagtctacaagcctcatgaccggatcaaagtgttcattacaaaagtcgaaaaaacgacgaagggtccgcagatttacgtttcaagaactcatccaggtttattaaagcgtctctttgaaatcgaagtgccggaaatttacgatggaacggtcgagctcaaatccgtggcgagagaagcgggagaccgctcgaagatttccgtccgcacggataatcccgacatcgatcccgtcggcgcctgcgtcggaccgaagggtcagcgcgttcaggcgatcgtcaatgaattgaaaggcgagaaaattgatattgttcactggtcaaacgacccggttgaatttgtcgccaatgcgctgagcccttcaaaagtgctcgacgtcatcgtcaatgaagaggataaagcgacaacggttgtcgttcctgactatcagctgtcgctcgccatcggaaaaagaggtcaaaacgcccgcctggcagccaagctgacaagctggaagatcgatattaaaagcgaaacagatgcaagagagcttggaatttatccaagggagcttgaagaagaggagccggaagagcttttcttggaaagcgaaactccagaatcggatgaataa

SEQ ID NO: 2010 - DNA, 276 bp, Bacillus licheniformis
gtgaaaagccgaaagaagatcccgcttagaaaatgcgtcgtaacaggggaaatgaagcctaaaaaagagctcatccgcgtcgtccgttcgaaggaaggcgaagtttccgttgacccgaccggcaagaagaacggccggggagcctaccttacacttgataaagacgtcattttaactgcaaaaaagagaaacagcttagcaaatcagcttcaagcacagattgatgatcagatttttgatgaactgctggaactggcggaaaaggagaacagataa

SEQ ID NO: 2011 - DNA, 303 bp, Bacillus licheniformis
atgtcggaatcagaatggttttccttgctgggtctggcgaatcgagctcgaaaggtcgtgtccggagaagacctggttgtgaaagaaatcaggcattcgcgcgcaaagcttgttttgcttgcagacgacgcatcggctaacacggagaaaaaagtaaccgacaaatgcaggcactacgatgtaccggtgaaaaaagtcggtgatcgtgtgcttctgggccgttcaatcggcaaagaatcccgtgtggttgttgctgtcactgatcaaggttttgcgaatacgttgctccgaaagctcgattaa

SEQ ID NO: 2012 - DNA, 2151 bp, Bacillus licheniformis
atggctaaaatgagagtttatgaatatgcaaaagccataaatgtttcaagtaaggatattatcgcggtattgaaagatatgaatatcgaagtcaataaccatatggcgatgatcgaagaaaatgcgatcaaacagctcgatcaaaaattcaagaagagcgctaaacctgcgggaaataaaaaggatgccggtacaggcggacaaaagccgcagcaagaagccgcaaaacagaatgccggaagtaagccaaacaaaaatcgagacggaaagaagaataacgtgcagaatactcaatttaacaataaaaacaagaagaaaaacaacaacaacaaaaagaacaaacgcggtaaaaatcatcaatctcctcaggagaagcagttcaagccgaaaaaagaactgcctgaaaaaatcgaatttaccaactcaatgtcggtcggcgcgcttgccgaagagctcggaaaagaaccgtcagaaatcattaaaaaattaatgcttctcggcatcatggcgacgatcaaccaagatcttgacaaagataccgttgagctgatcgcttcagaatacggcgtcgaagtcgaagaagtgatcgtccatgaagaaaccgaattcgaaaaatacgaagagccggataacgaagaagacctcgaaatccgtcctcctgtcgtaacgatcatgggtcacgtcgaccacggaaaaacaacgcttctcgacagcatcagaaaaacgaaggtcgttgaaggcgaagccggaggcatcactcagcatatcggcgcttatcagatcgaggaaaacggcaagaagattaccttcctcgacactccgggccacgccgcgtttacaacgatgcgcgcacgcggtgcggaagttacggacattacgattctcgtcgtagctgcagatgacggggtcatgccgcagacggttgaagcgatcaaccatgcgaaagcggctgaagtgccgatcatcgtcgctgtcaacaaaatcgacaaaccgacggcaaaccctgaccgcgtgatgcaggagctgactgaacacggtcttgttcctgaagcatggggaggcgagacgatttttgttcctctttccgcactttcaggagagggaatcgatgagctgatcgaaatgatcctgctcgtcagcgaagtcgaggagctcaaagcaaatccgaaccgcagggcaaaaggaacggtcatcgaagccgagcttgataaaggtaaaggttctgtcgcaacgttgctcgttcaaaacggaacgcttcacgtcggagatccgatcgtcgtcgggaacactttcggacgcgttcgtgcgatggtcaatgatgtcggcagacgcgtgaaatcggcgggaccgtcaactcctgttgagatcaccgggttgaacgaagttccgaacgcaggggatcagttccttgtgttcaaagacgaaaaaacagcccgttccgtcggcgaagcgcgcgctaccaaacagcttgaagaacagcgcagcgataaagcgaagctcagccttgatgacttgtttgaacagattaaacaaggcgatgtcaaagaaattaacctcgtcgtaaaagccgatgttcaaggctctgttgaagcgctggccgcagctttgcaaaaaattgaggtcgaaggcgtcagagtcaaaatcatccacacaggcgtaggtgcgattaccgaatcagacattattttagcttctgcatcaaatgcaatcgtgatcgggtttaatgtcagacctgacggaaatgctaagagtaccgccgaagccgaaaatgtggatatccgcctccaccgcatcatttataaagtcatcgatgagatcgaagcagccatgaaaggcatgcttgatcctgagtatgaagaaaaagtgatcggcatggttgaagtccgtcaaacattcaaagtctctaaaatcggaacgattgccggaggctatgtaacggaaggtacgatcacgcgcgacagcggaatccgcttgatccgcgacggcgtcgtcatctttgaaggggaagtcgatgtgctgaaacgctttaaagatgatgtcaaagaagtttcacaaggctatgaatgtggtatcaccattaagaaatacaacgacatacgcgaaggcgatatgatcgaagcgtatgtcatgcaagaaattgaaagaaagtga

SEQ ID NO: 2013 - DNA, 279 bp, Bacillus licheniformis
gtgatcggtttcgttgaatgcgaatgcatcatttacgatgcatcatcactcaaggaaaagcgggcggtgctgaagcggatcatcacaagaatccgcgccaagttcaacgtttctgtttcagaaattgactatcaggacacttggcagcgcacaagctttggtatcgccgccgtttcttcctctcgcgtgcaaacggaaaaagagctgcagcgggtcctcgcctttattgactcttttccggaaattgaacggacgatcacgagaacagagtggttttaa

SEQ ID NO: 2014 - DNA, 354 bp, Bacillus licheniformis
atgacgatgagagctacccgtgtgggagagcagatgaaaaaagaacttggtgacattatcggcagaaagctgaaagatccgcgaatcggatttttaacagtcaccgacgtcagggtctcaggtgatttgcaaattgccaaagtgtatatttccgttttaggcgatgaaaagaaacgggaagaaacgctcaaaggcctggcaaaagcaaagggctttattcgttccgaacttggaaaccgaatcaggcttcgcaaaacacctgaaatccattttgagttcgatgaatcgatcgattacggaaaccgtatcgaaacattgattcacgagctgaacgcaaacaaagaagaatcataa

SEQ ID NO: 2015 - DNA, 930 bp, Bacillus licheniformis
atgtataacggagtccttctattacataaaccggtcggcatgacctcgcacgactgcgtcatgaagatccgcaaactgctgaaaacaaaaaaggtcggccataccggtacactggatcccgaggtgtcgggcgttctcccgatctgcgtcgggagggcaaccaaaatcgtcgagtatttgaccgaaaagtccaaaacatatgatgcagaggtcacgcttggctgttccacggagacagaggatcagacgggggaagtcacagaaaagaaacccgtcttagcgccgcctgatgaacagaccgtgcagagcgtcctgagatctcttgaaggaacgattgagcaggttccgccgatgtattcagctgtcaaggtaggcggcaaaaagctgtatgaatacgcgcgggctggaatcgaggttgaacggccgaagcggaccatcaccatccatcatatcgaactgacatccgagatccgccatgagggggataaagcccgcttccggtttgttgtgacatgttcaaaaggcacatatgtcaggaccttggcggtaaccatcggggagaagctcggatatcccgcgcatatgtccaatctggtcaggaccgcgtcaggccctttcacccttgacgaatgcttgacctttgaagacgtcgaaggcttgatcgctgacggaacattgtctgaaaagctcgtccccatcgaacgtgcgcttgatcatttgccgaaatggataattagtgatacattagctaagaaagtggaaaatggagcggtgcttgaaacgcccggcagcttttctcatttgacgagcgaagaccgcattgcggtctttacggaagcaggccggtgcacagccgtctattatccgcatccgaccaaaaccggtttgttgaagccggcaaaagtactcgtgcaaaaaagcgaacaatag

SEQ ID NO: 2016 - DNA, 960 bp, Bacillus licheniformis
ttgaagacgatacatatttcccacccacacgacttgaagcgtgaggattttccgacatcagttatggcattaggttattttgacggtgttcacctgggacatcagcaagtgattcttacagcaaaaaacaccgcggcaagagaaggggtcaaaacgtccgtgatgacctttcatccccacccttctgccgtgctcaaaaaaggccgggagccgaaggatttaatcacgcctttgcaagacaaaatcagcatcattgaagatttaggggtcgattttttatacgttgtcacatttacccctgaattcgcttctctatcacctgaggaatttatcgatcaatatatactcggctttcatgtcactcatgttgtagccggatttgactttaccttcgggaaattcggcaaaggcactatggaaaacttccaggagtatgcgaaaggccgtgttaaaagcacgtctgtcgcaaaatattccaatcaggatcaaaaggtaagctccacgaggatccgcagcgttctgggagccggtgacgtcgagtacgctgctgaactgctcggcaggccgtaccatgtgaaaggctttgtgatccacggcgataaaaggggccgcacgatcggatttccgaccgcgaatatcggccttaaagacacatacatcgtcccgccgacaggtgtgtacgccgttaaagccgaaatcggcggcgctgtctacaacggcgtctgcaatgtcggatacaagccgacgttttacgaaaaacggccgggtcagccttcaatcgaagtcaacttattcgattttgaccgtgacatatacggctccgaaatcaaggttgaatggtataagcggctgaggagcgaaaaaaaattcggcagcgttgacgagcttgtcgaacagatttctagagacaaagaagaagcgatccgcttcttcagagagcggaagccggccggaatctag

SEQ ID NO: 2017 - DNA, 267 bp, Bacillus licheniformis
atggcaattactcaagagcgtaaaacacaactcatcaatgagttcaaaacccacgaatctgacacgggatcaccggaagttcagatcgctatcctaacagatcaaatcaacaacttgaacgagcatttacgcactcacaagaaagaccatcactcacgtcgcggtcttcttaaaatggtaggtaaacgtcgtaatcttcttacgtatcttcgtaacaaagacgtaactcgttaccgtgagttgatcaacaaacttggattacgtcga

SEQ ID NO: 2018 - DNA, 2118 bp, Bacillus licheniformis
atgggacaagagaaacatgtcttttccatagattgggccggccgcaagctcacagtagaaaccggccagcttgcaaaacaagcaaacggagctgtcatggtgcgttatggagacactgcagtgctcagcaccgcaacggcttcaaaagaacctaaaaccgtagactttttcccgttaaccgtaaattacgaagaaagactttacgccgtcggaaagattccgggcgggtttattaaaagagagggaagaccgagcgaaaaagcgattctcgccagccggttaatcgacaggccgatccgcccgctgttcgcagacggcttccggaatgaagttcaagtcgtcagcatcgtcatgagcgttgaccaggattgttcgtcagaaatggcggcaatgtttggatcatctcttgcgctgtgcgtatccgacatcccgtttgaagggccgatcgccggagtgacggtaggccgggttgacaacaaattcatcatcaatccgacacttgaacagcttgaaaaaagcgacattcatctcgtcgtagcgggaacgaaggacgcgatcaacatggttgaagcgggagcagacgaagttccggaagagatcatgcttgaagcgatcatgttcggtcacgaggagatcaaacggctgattgccttccaggaggaaatcgtcgccgctgtcgggaaagaaaaatcagaaatcaccctgtatgagatcgattccgatctgaaagaaaaagtgcggggaatggccgaatcgaacctcttaaaagccattcaggttcatgaaaagcatgcgcgcgaggacgcgatcagcgaagtgaaaaacgaggttttggccaagtttgaagaagaggaacacgatgaagaaacgctgaaacaagtgaaagacattttgtcccagcttgttaaaaatgaagtgcgccgtctgattacggaggaaaaagttcgtcctgacggcagggctgtcgatgagatccgcccgctttcttcagaagtcggactgcttccgagaacacacggttcaggactttttacaaggggacagactcaggcgctcagcatttgtacgctcggtgcgcttggcgatgtgcagattttagacggtctcggcgtcgaagaatccaaacgctttatgcaccattacaacttcccgcagttcagcgtcggggaaacagggccgatgcgcgggccgggacgccgcgaaatcgggcacggagccctcggggaacgagcgcttgagccgattgttccgtctgaaaaagacttcccgtacaccatccgcctcgtctctgaagtgcttgaatcaaacggttccacttcccaggcgagcatttgtgcaagcacgctagcgatgatggatgcaggggtgccgattaaagccccggttgccggaatcgcgatgggtcttgtcaaatcaggtgacaactataccgtcttaaccgatattcaaggtatggaagaccatctcggggatatggactttaaagtggcgggaacgtccaaaggcgtcacagctctgcaaatggatattaagatcgcaggcttatcgagagagattttggaagaggctcttcagcaggcgaaaaaaggcagaatggagatccttgaaagcatgctgagcacattggctgaatcaagaaaagagctttctccttatgcgccgaaaatcttgacgatgtcgatcaatccggataaaatccgcgacgtcatcggaccaagcggaaaacaaatcaataagatcattgaagatacaggcgttaaaatcgatattgaacaagacggcacaatcttcatttcttctaccgatgaaagcatgaaccaaaaagcgaagaaaatcatcgaagaccttgtcagagaagttgaagtcggacagctttacttaggtaaagtgaagcggattgaaaaattcggagctttcgttgaactgttcagcggaaaagacggtcttgtccatatttcagagcttgcgctcgaacgggtaggaaaagtcgaagatgtcgtcaaaatcggcgacgagctccttgtaaaggttactgaaatcgataaacaaggacgcgtcaacttatcaagaaaagctgtactgcgtgaacagaaggaaaaagaagaacaaaaatcgtaa

SEQ ID NO: 2019 - DNA, 963 bp, Bacillus licheniformis
ttgaaaggaacgattgttcggatttccgtttttttctttcttttgctgatgtcctatcagatgatgaaccgtccgtattcacaacattacatagatgcgatgaaaaaagacgcggtcacggttgccgctcaaaaggacgatttgtaccaggagcttttgcaaaaagcgcctgaatatgaagtgaaggcccagaatgcgaaaattgatcacatatggaaagcgatgcccggctacaacggcttaaaagtaaacatcgaaaaatcgtacaaaaaaatgaaacaggccggtgaatttgatgagaaactgctcgtttatgaccaagtgaagcctgacgttcatttagaatccttaaagcctgagccgatctaccgcggacacccggataaaccgatggtatcgtttattatcaatgtcgcttggggtaatgaatatttagaagagatgcttcccgtcttacaacagcatcgtatcaaagccaccttttttctggagggcagatgggtgaagcatcaccccgagctggccaaagccatacaaaacggcgggcatgaaatcggaaaccattcatacaatcatccggatatgagcaaactgacgagagaacgtatttcagaacagctgcggatgacaaatgaacaaatacaggaaacgcttggcgtcaagccgaagtggttcgccccgccgagcggcagcttccgcaaagaggttgtggatcaggctcacaagatggggatgggaacgatcatgtggacagttgatacgatcgattggcagaaaccgcagccggccgtcttacagcaacgggtattaagcaaagtacataacggcgccatgatattaatgcatccgacagatccaactgcaaaaagtcttgccgttttgatacagaacctgcatgaaaaaggctatcaaatcggaactgtttcacagctgatgaatgaaaaaaggcttgttgaagaatag

SEQ ID NO: 2020 - DNA, 1230 bp, Bacillus licheniformis
ttgattaaacggtatacttgtcaaaatggggtaagaatcgtattcgaaaacaatcccaccgtccggtctgtggccatcggagtttggattggaaccggatcaagacatgaaacacccgaaattaacggcatttcgcactttcttgagcacatgtttttcaaggggacaaaaacgcgcactgcaagggacatcgcagagtctttcgatagaatcggcggacaggtcaatgcgtttacctcaaaggaatatacgtgctattacgccaaagtgctcgatgagcatgcaagctatgctctggaagtgctttctgacatgttctttcattcatcatttgacgaagaagaattaaaaaaagaaaaaaacgtcgtctatgaagagattaaaatgtatgaggacacacctgatgacatcgtccacgatctcttgagcaaggcgtcatacggcagccattccctcggctatccgatcctcggcacagaggaaacacttgccgaatttgacggagattcgctcagaaaatatatgaacgaatattacacgcctgaccgagtcgtcatttccatagccggaaatgtgccggaaacttttataaaagaagctgaaaagcatttcggttcatatgaagccaaaggcaaaagaaccggcatgacaaaaccggattttcaccatgagaaaatgacgcgcaaaaaggaaaccgaacaggctcacctctgcctcggcttcaacgggctggaagcaggccatccggaaatctacgatttgatcgttctcaataatattttgggaggaagcatgagcagccgcctctttcaggatgtccgcgaagataaaggtcttgcatattccgtgttcagctaccacacttcctatgaagacagcggcatgatgaccatctacgcgggaaccggcgcaaatcagcttcagctcctgtcagaaacgattcatgaaacactgcgtgcgctgaaaagcgacggtattacaccgaaagagcttgaaaacagcaaagagcaaatgaaaggcagcctgatgctcagtctcgaaagcacaaacagcaaaatgagccgcaacggcaaaaatgagcttttgctcggtaaacaccggacgcttgatgaaatcatcgaaaagttgaatgccgtcagcctcgagcgtgtgaacaatcttgccaaccggattttcaccgatgattactcatctgcattaatcagcccgtcgggtgagctgccgaaataa

SEQ ID NO: 2021 - DNA, 261 bp, Bacillus licheniformis
atgaggctgagtgaactttcgggaaaagaaatcgttgatgttaagcgggccgaacggctcggcgtactggggcagacggaccttgagatcaatgagcaggacggtcagattaccgctcttatcatcccttctgttaaatggttcggactaggaagaaaacaggggaatgacattaaggtgccctggtcgcaaattcaaaaaatcggctcggatatgatcattttggatgttccggaaagcagcgtgacaaaagaggagtaa

SEQ ID NO: 2022 - DNA, 126 bp, Bacillus licheniformis
gtggaaacccgcccgtcccatgggggcgggctttttgtttttctggatttcaattcaccgctatttcctttttgtcatatgatgaaattagcttatgaattagatccttatcaaaaaagaaggtga

SEQ ID NO: 2023 - DNA, 900 bp, Bacillus licheniformis
atgttaaccggattgacgattgcaatcatcggcggcgatgcaaggcagctcgagatcatccgcaagctgacggaacaggatgcaaaggtctttttaatcggttttgatcagcttgatcacgggtttaccggagctacaaaactaaagctgaacgaacttgattttggcacaatagacagcattattctgcctgtatcgggcacatcgatggaaggaacggttgcgactgttttttccaatgaaaaagtggtgttaaaacaggaacatttagaaaaaaccaagccgcactgcgcgatttattcagggatttcaaaccaatatttagacggcatggccaaaggggcgaaccgtcgtcttatcaagctctttgaaagagacgatattgcgatttacaactcgatacctacagtcgaaggtgccattatgatggccatacagcatacagactttacgattcacggctcgaatgtaatggttctcgggctggggcggacgggaatgagcatcagccggacgttctcggcgctcggcgcacgcgtaaaagtcggagctcgcgactccgcccacctcgccagaatcatggagatgggcctcactcctttccacacaaacgaacttgcagagcatgttgaaaatatcgacatatgcatcaataccattccaagcctgattctcgataaacatgtcctctcacgaatgacacccagaacattaattctcgatttagcaacccgtcccggaggcacagattttgattttgccgaaaagcaaggcattaaagcgctgcttgctccaggacttcccgggatcgtcgcgcctaaaacggcgggacagatcattgccaatgttttgtgcaaccttttgtctgaattaacaactgaccgaaaggggctgtcataa

SEQ ID NO: 2024 - DNA, 591 bp, Bacillus licheniformis
atgtcgatcaaaggaaaaagaatcggatttggcctaacgggttcacattgtacgtatgatgccgtttttccgcagattgaagcgctgatcaacaaaggggctgaagtcagaccggtcgtgacgcatactgtcaagtcgacggatacacgctttggagaaggggaagaatgggtcagaagaatagaagagctgactggatttgaagtcattgattccattccgaaagctgagcctctcgggccaaaaacaccgctggactgcatggttgttgcgccattgacgggaaattcgatgagcaagcttgcaaacgcccagacggacagtccggttctcatggcggccaaagcgacgatgagaaactcccgtcccgtcgtcctcggcatttcaacgaatgacgcgctcggcttgaacggcgtcaacttgatgaggctgatggcggcaaaaaatgtttactttattccgttcggccaggatgacccttacaaaaagccgaattcgctcgtcgccaaaatggatcttttagtgccggcggtcgaagaagcgctctcccataaacaaatacagcctatcctggtccataatgatcaataa

SEQ ID NO: 2025 - DNA, 1041 bp, Bacillus licheniformis
ttgggcagaggattacatgtagcagtagttggtgcgacaggcgctgtaggacagcaaatgttaaaaacactagaagacaggaattttgaactggataaactgactttattatcctcaaaacgttcagcaggtacgaaactgactttcaaaggcgaagagtacacagtagaagaagctcgtcctgagagctttgaaggcgtcaacatcgcgcttttcagcgccgggggaagcgtttcgcaggcgcttgctcacgaggctgtcaaacgcggggcgatcgtcattgataatacgagcgcgttccggatggaccaaaacactccgctcgtcgtacctgaggtcaatgaggaagatttgcacaagcacaacgggattattgcaaatccgaactgttcaaccatccagatggttgttgcgctcgaaccgatccgcaaggctttcggtttaaacaaaatcatcgtatcgacttatcaggcggtgtctggagccggaaacgaagctgtaaaagagctctacgggcaaaccgaagccattttgaacgacaaaccgttcgagcctgagatcatgccggtgaagagtgatgaaaaacactaccaaatcgcatttaacgctattcctcaaatcgataaattccaggaaaacggctttacgtttgaggaaatgaaaatgataaatgaaacgaaaaaaatcatgcacatgcctgagcttcaagtttcagccacatgtgtcagactgccgattgcaacagggcattcagaatccgtctacatcgaaacagaccgtgatgatgtgacagcagaggatattaaaaatctgttaaaagaagctccaggcgtcgttctgcaggatgatccagctaaacaggtctatccgatgcctgcagatgcagtagggaaaagagacgtatttgtcggccgggtgagaaaagaccttgaccgcccgaacggtttccatctgtggatcgtttccgacaacctgctgaaaggcgcggcatggaattccgtacaaatcgcagaaagcctaaaagctttaaatttagtttaa

SEQ ID NO: 2026 - DNA, 1215 bp, Bacillus licheniformis
gtgaaaatcatcgttcaaaaattcggcggaacgtctgtaaaagatgaccgcggcagaaagcttgccttaaaccatattaaggaagcggtcaatgaaggatacaaagcggttgtcgtcgtatcggccatgggccggaaaggcgatccgtatgcgactgattcattgcttgatctgctttacggcggacaggatacaattaccgagcgtgagcaggatatgcttttatcatgcggggaaacgatttcctctgttgtgttcgccagcatgcttttggaaaacgggattaaagctgctgctttaaccggtgcgcaagcgggctttttaacagacaacaaccatacgaatgcaaagattctcgaaatgaagccggagcggcttgtcagcatgctggccgaccatgatgcggtcgtcgtcgcaggcttccaaggcgcgactgcaaaaggggatatcacaacgatcggccgcggcggaagcgatacatcggccgctgcgcttggcgcggctctggacgcggaatttatcgatatttatacagatgtcgaaggcgtcatgacagctgatccgcgcatcgttgaaaaagcgaagccgctgcctgtgattacctatacggaaatctgtaatttagcctatcagggggccaaggtgatccacccgagagccgttgaaatcgcaatgcaggcgaaagtgccgatccgcgtgcgttcaacctattcaaacgaaaccggtacgctcgtcacaagccatcacaactcgaaagccggaagcgacgtttttgagcggctcatcacaggcatcgcccatgtgaaagacgtgacacagtttaaagtcccggcaaaagaaggacaatataacgtacagactgaagtgtttaaagcgatggcgaatgcgggcatcagcgtcgatttcttcaatattacaccaagtgaaattgtctacacggtggctggaaacatgacagaccgcgcccacagcatcctgaaggaattgggctatgaaccggccgtgacgagaaattgcgcgaaagtgtcagcggttggcgcggggattatgggcgttccaggcgtcacctcaaaaatcgttaccgctttgtcagaaaaaggcattccgatcctgcagtctgctgacagccatacgacgatatgggtgctcgtgcacgagaaaaatatggcgacggccgtaaatgcgctgcatgaagtgtttgaactgtcaaaataa

SEQ ID NO: 2027 - DNA, 870 bp, Bacillus licheniformis
atgaatttcggaaatatcgcaaccgcgatggttacgccctttgacaaaaatgaaaatatcgattttcaaaaactgtcaaagctgatcgattatttactaaacaatgggacggattccctggtcgttgccggaacaaccggagaatcgccgacgctttccgaagaagaaaaggtagcgctcattcaatactctgtcaaggaagcggcaggccgtgccccaatcatcgccggcacgggaagcaacaacacgaaggcgtcgatcaagctgacgaaaaaagctgaagaagccggcgctgacgctgtcatgctcgtcactccgtactacaacaagccttctcaggaaggcatgtaccgccatttcagagcgattgcggaggaaacatcgctgcctgtcatgctttataatgtgccgggaagaacggctgcttcgctcgcaccagagacgacaatccgccttgcggagatcccgaatattatcgccattaaagaagcgagcggcgacctagatgcgataacaaaaatcgtagccgaaacccctgaggactttgcagtttattcaggagatgacagcctgacactgccggcgctgtccgtgggagcgagaggaatcgtttccgttgcatcacacatcatcggaccggaaatgcaggaaatgatcaaacattataccgaggggaacacggctcaggctgctttgatccatcaaaagctgcttccgctgatgaaagggctttttgccgcaccgaacccgtctccattaaagacggctcttcagctgaagggtcttgacgtcgggtccgtccggctccctttgattccgctaaatgaagatgaacgactccgtttaagcagcctgatgaacggcctgtaa

SEQ ID NO: 2028 - DNA, 1665 bp, Bacillus licheniformis
ttgaaaaaaaatacagaaaatattagaatcatcgccttaggaggcgtcggagagatcggaaaaaacctctatgtcattgaaatcgattcagacatattcgtggttgacgccggcctcatgcatccagaaaatgaaatgctgggtatcgatgtggtcatccctgacatttcttatttaattgaacgatctgaccgcgtaaaggcgatttttctcacacacgggcatgaagaaaacatcggcggcgtattttactgcctgaacaagctttctgtgcctgtttacggaacgaagctgacgcttgcccttttaaaggaaacgctgaagcagtacggtgtaaacaaaaagcccgatttaagagaaattcattcaaaatccgttattacatttgaatcgacaaaggtgtcattcttcaaaacaaatcacagcatcccggattccgtcggtgtcagctttaaaacatccctcggatccatcgtgtgcacaggcgattttaaatttgaccagacacctgtgttaaaccagacaagcgacatcggcgaaattgccaaaatcggcaacagcggtgtgctgtgcctgctttccgacagcgccaatgccgagaagccgggctatacgccttcagaagcactcgttggcggagagatatccgatgtgatgtacaacgccgaaaaccgcgtgattattgccgtgttcgcgtctaactttaaccggattcagcaggtgattgatgccgcgctgcaaaacggcaggaagcttgcagtttcagggaaaaatatttcggcgatactccagctggcgatgaaactcgggtatgtcacggcagatgaagatatgttcatccctgtccaagaagtcaaaaagtatccaaaaagagaagtcgcgattttgacaggggacaaccatggagagccgctcgccgcattgaccaggatcgcaaaacaagggcataagcagcttgacattgaggaaggggataccgtcctgatcgcatcctcccctatcccgggtcaggagcttgtttactccaaagcggtcgatctcttaacgagagcgggcgcccaggtcgtattcgcacaaaaacgcgtccatgtatcaggccatggctgtcaagaagagctgaagctgatgctcaacttgctgaagccgaagtatttaatccccgtaaacggtgaatacagaatgcaaaaagcgcattccaagcttgccgaagaaatcggcatgaaacggagcgacattttcctgattgaaaaaggagatgtcgtggaattccgcggacaaaacgttaaaatcggcgataaagtacactcaggcaatatattgatcgacggactcggcgtcggcgatatcggcaacatcgtgctcagagaccgccgtctgctatcccaggacggaatcttaattgttgtgattacccttgataaaaagaaaaaacatcttgtttcaggacccgaaattatcacgagaggttttgtctatgtcagagaatctgaacagctgatcgttgaagcgacagagcttgtcagggaactcgtcaacgaaagcacagaaaacgccgtcgtcgaatggtccgccttaaaacagacgatgcgtgaggcattaaaccagttcctatacgaaaaaacgaaacgaaaaccaatgatcattccaatcatcatggaagtataa

SEQ ID NO: 2029 - DNA, 747 bp, Bacillus licheniformis
atggattcaaaccggatacaaaacggggacagccaaggggagcagccggctaagcaggacgcaaaagacagtctcgtcaacaaaatccagcagctcggcgaaacgacactcccgcagatggggcaggacaccaacattcactgcctgaccattatcggacaaattgaaggtcacgtccagcttcctccccaaaacaaaacaacaaagtatgaacatgtgattccccagatcgttgcagtagagcagaatcctaaaatcgaaggtctgctcatcatcttaaacacggtcggaggagacgtagaagcgggccttgcgattgcggaaatgctggcgtccctgtcaaagccgacggtctctatcgtactgggcggcggacattcaatcggagttccaatcgcagtgtcctgcgaccacagctatatcgctgaaacagctacgatgacgatccatccggtcaggctgacagggcttgtcatcggtgtgccgcagacatttgagtatctcgacaaaatgcaggaaagggtcatcaatttcgtgacaagccattccaacatatcggaagaaaaatttaaagaactgatgttttcaaaaggcaatttaacccgtgacatcgggacgaatgtcgtaggaaacgatgcggttaaatacggattaatcgatgaaaccggcggagtcggacaggcgattcaaaagctgaatgaattaatcgaacaaaacaagggcgcccaggaagggatgatccaatga

SEQ ID NO: 2030 - DNA, 216 bp, Bacillus licheniformis
atgattctgtatacgacaatgccgcaggaaatcgtgttcgcagggcaggcggaaaactcgaacttaaaacagatcgatgtaaacggcgtgccccttttagtcgagatgaacggagaggaagcaagggtcgttcaggttctcagcacgaacccgatggattttttaaaacaagaaacggcccctgggcagacgcttaaactgacattttataaatag

SEQ ID NO: 2031 - DNA, 2346 bp, Bacillus licheniformis
atggcaaaaagaaaacgaaaatcaacaaagaaacaaaaacaaggaaaaaaacggatccatcttaaatttgaattgtacggattaatctgtatcgccatctcgattattgcggttttgcagcttggcgtagcagggcaaacgttcatttacatgttccgctttttcgccggtgaatggttcatcctttgccttctcggcctctttttaacgggcttgtctttattttggaaaaagaaaacacccagttttttgacgaggagaaaagcgggcctttactgcatcattgcaagcatgctgcttctttcacatgtccagctgtttcagcatttgaccgaaaggggaatggttcagtctccgagcgtgatccaaaatacgtgggagctgtttctgatggatgtaaaaggcgagacaggatcgcctgatcttggaggcggaatgattggagcccttttattcgcggcgtcatattttctgtttgcatctgcaggatctaaaatcatcgccgtcttcctgatcttgataggccttcttttgattacggatcggtcgcttcaggagacgctgatcaaatggatgaccccggtcgcctccttcatgaaaaaccagtggcaggcctttttagcagatcttaaacaattgaaaaacagctcgccgaaaaagaaatccggaaaaaaacaaaagacgcagagaaaaccgaaagtgtctgaagagcctgtacaagaagcggaccttgatccagatccggttattcaatcagaaccgattatttcaagcttttccgaccgtgatgaaaagcccgaagttcaagcttacgaagctccggcggctcctgctgaacctcctgctgagcccgaaatcggtgaggaaatgcaggcctccggcgcgcccgaaatcacgtttacagagctagaaaacaaggattaccagcttccgtcgattcaattgctggatgatccgaagcacacagggcagcaggcggataaaaagaatatttacgacaatgccaggaagctggaaaggacgtttcaaagcttcggagttaaggcgaaagtcacccaggttcatctcggcccggccgtcacgaaatatgaagtctatcctgatgtgggcgtcaaagtcagcaaaattgtcaacttaagtgacgacttggctttagcgctcgcggccaaggatatccgcatcgaagccccgatccccggaaaatcggcgattggaatcgaagtgccgaatgcggaagtggcgatggtttccttgaaagaagtgcttgaatcgaaactgaatgaccggccggatgcaaagctgatgatcggcctcggccggaacatttccggagaagcggtattggcagagctgaacaaaatgccccaccttcttgttgcaggagcgaccggaagcgggaaaagcgtctgtgtcaacgggatcattacaagcattttgatgagggcaaagccccacgaagtgaagatgatgatgattgatccgaaaatggtcgagctcaatgtctacaacgggattccgcatttgctcgctcccgtcgtgacagacccgaaaaaagcatcgcaggctttgaagaaagtcgtcaacgaaatggagcggcgctacgaattgttttctcacacgggaacgagaaatatcgaagggtataacgactatattaaacggatgaatgccgcagaagaagcaaagcagccggagcttccatacatcattgtgattgtggacgagcttgccgacctgatgatggtcgcttcctctgatgttgaagactcgatcacaaggctttcgcaaatggccagggcggcgggcatccacctgatcattgcgacgcagaggccttcggtcgatgttatcacaggggtcattaaagccaacattccgtcaaggatcgctttcagcgtatcgtctcagaccgactccaggacgattcttgatatgggaggcgctgaaaaacttctcggcagaggggacatgctgtttctccctgtcggcgccaataaaccgctccgcgttcaaggtgcctttctgtcagacgaagaagttgaaaaagttgtcgatcacgtcatcagccagcaaaaagcccaataccaagaagaaatgattccagaagagacgcaggaaacggtcagcgaagtgacagacgacctttatgacgaagcggtcgcacttgtggtcagcatgcagacggcttctgtatccatgctgcaaaggagattccgcatcggctatacaagagcggcgcggcttatcgatgccatggaagagcggggaatcgtcggcccatatgaaggatcaaaaccccgtgaagttctcttgtcaaaagagcaatacgaagaactctcttcttga

SEQ ID NO: 2032 - DNA, 726 bp, Bacillus licheniformis
atgtcgataaaagctgacaatcaacggttatgtttaaaggtgattgatcggataaaagatgatattcaaaatggggtcttttgcgaaaatgaacggctcccgagtgaatttgagctgtcaaagatgcttggtgtgagcagaacggctttgcgtgaggcgcttagaatactggaagaagaaaacgtcatcatcagaaggcatggagtcggacattttgtaaatgccagaccgttatttctatcaggtattgagcagctgaacagcgtcacaaaaatgatcgagcaggcaagcatgacgccgggaaccatttttatgtcctcacaggttaccgctcccactgaagaagatatgctccggtttcaatatgcggaagaaaccgagatctttttgcttgagcgggtgagaacggcaaatggaatgccggttgtctactgtcttgataaaatacctgtggacattctcccggaaggcttttcacacgagcaggaatcgatgtttgaatggcttgagaacaaatccggcgccgtgatcagctacgctgttgccgatattgtgccaatcggatatcatgacaccatttcccaaattcttgaatgcgatcctgaaacgtctttgctgctgctcaaacagactcattatgaccaaaacgataagcccgttttatattctttaaactattttagggccgataaattcagatttcatgtcgtcagaaaacgtttttga

SEQ ID NO: 2033 - DNA, 1206 bp, Bacillus licheniformis
atgaaaagcatttttgcgctgtcttcggtcccgctcgtgatgacgctcggcaattcgatgctgattccggttttgccggtgatcgaaaaaaaattaaacatttcttcgtttcaggtgtcgttgatcatcacggtttattcaattgtggcgattgtatgcatcccgattaccggctatatgtcggaccggttcggaagaaaaaagatcatgctcccatgccttctgattgcgggagctggaggagcgttagcaggtttggcttcaacttttttcaatgatccgtttgcgatgattttagcaggtcgcgtccttcaaggaatcggctcagccggcgcagcgccgatcgtcatgccgtttatcggcgacttgttccaaaatgatgaagaaatcagcgcgggactcggagatatagagacagcaaatactgccggcaaagtattaagcccgatattaggggcttttttagcatcttgggtttggtacatgccgttttggtttatcccggtcgtgtctcttgccagcttttttctcgtcttgttttttgttcccaaaccgaaggacaaagatgatgaaaagcaaacgttaaaaaactttgcaaaaagcgtacaggaaattttcaaacgggaaggtcggtggcttgtttccacttttgtcatcggcggaattattatgtttcttttattcggagtgctcttctacctgtctgatactttggagaagaagcatcaaattgacgggattgcgaaaggagcgcttctcagcattccgctgctttttctttccgtcagttcctaccttgccggaaagctgatcggaaacgataagatcagaatgaggatctgcgtgctgttcggcatgatcctgctggctttgtcgtttgccggtttgtggtggaaccacagcttttacccgttatttttgtttatgtccatcggcggcatcggcatcggaattgcgctcccttctttggatgcgctgattaccgagggaattgaaaaagaagagcgcggcacgatatcttcgttttacaacagcatgaggtttatcggtgttgcgctcggaccgccggttttcgcctatatgatgacaaatgcggggtggctgattttcatcgtatcgcttttgtgcagtttagctgcactagcgcttgtgctgtttaatattgacccgaaagaagacgaaagtgaagcggcaaagacggtgtag

SEQ ID NO: 2034 - DNA, 1281 bp, Bacillus licheniformis
atgacataccttaacgaaataaaaggaaagcaccgcggattgacaagccacattgtcaaaacggaaaaattcaaaaccgtctcgattatttttaaaatgcttgctcctttaacaaaagaggatgtgacaaagagggcgctttttccgcatgtgcttttgcggggaacgagcacccgccccaaaacggccgaactcagatcgtatcttgatgaactttacggcacttccgtatcatgcgatctctccaaaaaaggggaaatgcatgtcatcacattcaggctcgatatcgctaacgaaaaatttttaaaggatcagacaccgcttctggaaaaagggcttgagcttttgtcagagatcattttttcgccggcgcttgaagacggggcctttctgccgctgtacgtgtctcaggaaaaacgcacactaaagcaaagaatacaggcggtctataacgacaaaatgcgctattcaaatttgaggctgattcaggagatgtgcaaagatgaaccatacgcgcttcacgtcaacggagagcttgatgatgtggacggcatcacgcctcaaagcctgtatgaagcttatcaaaaagcggtcagcgaagaccagctcgacatttacgtcgttggggatgtggatgagcagcaggtggattcgtacatttccaaatactttgaagcaaacgagcgggagctgagacctgttcccgagcttgagcaaacccgcacaagggagcctcaggaagtcatcgaggatgctgatgtcaagcaagggaagctgaacatgggatttcggacgggaacgcattttacggatgacgattatccggcgcttcagctgtttaacggcttgtttggcggattttcacattccaagctgtttattaatgtcagggaaaaggccagccttgcctattatgcggcttccagaatcgaaagctttaaagggctgttgatggtgatgtcggggattgaagtcggcaattatcaaaaagccgtcgacatcatcaaggagcagtttcaggaaatgaaaaaaggcagctttacagaagaggcaatcgaccagacgaaagccgtcattaaaaaccagattcttgaaacgcttgatacaccgtacggtttagtcgaatttatttatcagcaggctgccgcccaaaccgaattttccttggaagactggctgggacgaatcgacaatgtcacaaaagaagacatcatcgaagtcggaaagaaaatcgatttggatacaacgtactttctcaaagggacggagggagcatcttga

SEQ ID NO: 2035 - DNA, 1233 bp, Bacillus licheniformis
atgcctggcggcctcgatgtctatgttcttccgaaagaaggatttaacaagacatatgcggtctttaccacaaaatacgggtcgattgacaatcagtttgtcccgctcggaaaagatgaaatggtccgcgtgcctgatggaatcgcacactttctcgaacataagctctttgaaaaagaagacggcgacgtttttcagcaattcagcaggcagggagcttcggcaaatgcgtttacctccttcacaagaacggcctacctgttttcaagcacgtcaaatgtggaagaaaacctggaaacgctcgtcgactttgtgcaggacccttactttacagaaaaaacggttgagaaggaaaaaggcatcatcggacaggaaatcaacatgtatgacgacaaccccgactggcgcctgtttttcggcctgatcgaaaacatgtatcaagagcaccctgtccggatcgatatcgcaggcacgatcgaaagcatctctcatattacaaaagaccttttgtacgaatgctatgagacgttctatcatccgagcaatatgctgctgtttgtcgtcggtccggtcgatcccgaagcgatcattcgccaggtccgcgaaaaccagcagaaaaaaccgtatacagaccagcctgaaatcgtccggaaagaagttaaagagcctggggccgtatttaaaaaagaacaggaaattaaaatgaatgttcaaagctcaaaatgcctcgtcggtttaaaaagcgctcatccgatgaatacgggagaagccctgctgaagcatgagctgaccatcaacctcatcctcgagtgtctgtttggcaaaagctcaagcgattacgaaagaatttatgaaaaagggtatatcgatgagacattcagctatgactatactgaagaacacggatttggcttcgtctctgtcggcggagatacgcctgagcctgacaagctggccgaagagctcaaacaagtgctgttcaaagcgaaagaaacgatcacagccgaaaagctggaactggccagaaagaaaaaaatcggcaatttcctgaaatcgatgaattcgcctgagtacatcgccaaccagtttacacggtacgcttttctggagacgagtctgtttgatatcgtcaccgtactcgaatcgattacgcttgatgacgttcaccgcgtcattgaggaagaagttgaggaagacaggatcaccgtctgcaaagtcgttccaaaatcataa

SEQ ID NO: 2036 - DNA, 732 bp, Bacillus licheniformis
atgacaaaactcgctctcatcaccggcgcaagcggcggaattgggcaaagcatcagcgaaaagcttgcgcaaaacgggtatgatcttctcctccattatcatacaaatgagaaggcggccgcttcacttgcagaaaggctgtcacatacatacggcattcacgctgaaatcattcacggcgacctgtccgaccccggaggtgcaaaagccgtttccgcttccatcggcggacgggcgctagacggcatcgtcttgaacagcggacaaagcttccgcgggcttgtgacagatatgaccgatgaagctgtacaggacatggtgcagctccatgtctcaagcccgtttctattaacgaggaatctgcttccggcgatgatcaggaaaaagtccggcgctattgtagccgtcagctctatttggggtgagacaggggcgtcgtgcgaagttttatacagcatgacaaaaggcgcgcaaaatgtgtttgtcaaagcccttgcaaaagagcttgcgccgagcggcatcagagtcaacgctgtttctccgggcgctgtaaaaacaaagatgatgagctcattttcaaaagaggaagaagagatgatcgccgatgagattccgatgggaaggctcgccgaagccgaagaggttgcagacgccgtcttgtttctgctctcggcgaaagcatcttatatcacgggtcaaattttgtcagttaatggcggctggcattgttaa

SEQ ID NO: 2037 - DNA, 258 bp, Bacillus licheniformis
atgtccgtactggataattgggatcagtggaaaaactttttgggcgaccgtttgaactatgcccaagaacaaggaatgtcaaaagaaaccatctcagatcttgcatatgagatcggcgattatttggccggtgaggttgattcaaaaaaccatcaagaacgagtgctcgcagacctttggagcgtggcttccgaagaagagcagcgcgccattgcgaacgtgatggttaagcttgttgaaaacaacagctcacattaa

SEQ ID NO: 2038 - DNA, 177 bp, Bacillus licheniformis
gtgttcactctctctttttttataggcgcgggtttttgccctgcggcaccgcttttatcgtttgcttttcgccccgacagggtaaacagcattcaggcgccgatacagcaggtttttcccgattttgggaaacggacgtttttcttatttaatcacaacattctgctttctaattaa

SEQ ID NO: 2039 - DNA, 792 bp, Bacillus licheniformis
ttggcaaagctcgaatggtacttagaatatgaaatccaagtcaaccgtcccggacttctgggagatatatcctctttattggggatgctttcaattaatattgtgaccattaacggcgtcgatacacaaagaagaggcctcttgttaaaatgccgtcatatagatcagattaagcgattggaatcgattttgaacacgatggatacgattaaagtgacgaagctccgcgaaccgaagcttcgcgaccgtctcgctgtaaggcacggccgctatatccagcgggatgcagacgataaaaaaacgttccggtttgaacgcgacgagctcggcttgcttgtcgattttatggctgagctgtttaaaaaagacgggcacaagctgatcgggatcaggggaatgccccgcgtcggcaagacggaatcaattgttgcttcaagcgtctgtgcaagcaaaaggtggctttttgtttcttcgacgctgctgaagcaaacgatcagaagccagctgattgccgatgagtacagtccggaaaatgttttcattttggacggcattgtgtcgacgagaagaggatctgaacgccatttgcagctcgtcagtgagattatgcgtctgccggcgaccaaagttgtcgagcatccggacattttcgtgcaaaatacggaatatacgatggacgattttgactacatcatcgaattgcgtaacagccccgatgaggtgattacatatgagcacgctgaagaaccgcagatgtttgaccattcaggtttttccggctttgatttttaa

SEQ ID NO: 2040 - DNA, 912 bp, Bacillus licheniformis
gtgtttgttgtgactgaactaggaaatcggctgaaagaagccagagaggaaaaagggatgtcattggacgaccttcaggcggccacaaagatccaaaaaaggtatttaacggcccttgaagaaggaaactatgatatcattccggggaaattttatgtgagggcttttatcaagcagtacgccgaagctgtcggcctcgactcggagcacttgtttgaagagtttaaaaaagatatccctaattcttacaatgatgaggtttctgagaagctttcttcaatcaagccgcagagggagcttcccaagtctgcctcaaaagcgcttgaacttttgcccaccttgcttgtggcagccggcgttatcgttgtgatcgcgatcatttacgtcattgttcaggctgtaaacggcggagggaatcagcaggctgaagggcctaaaacagaggaatcgcaaagcaagtacgacgtctcaaaagattccccgctgactaaggaaaatcaacagaacacggatgcgcagaaagacagcgctgaaagcgacaaagaaaaaaaggatcagcagtctgatgagaacgacaagctgaccattaaagcgaccgcaagcgaaggctcttccacaacctatgaagtatcaggatccgacaagctggagcttgaagtaaaggcaagcgaaaactcatgggtcagagtgcgcgacgagaaaggaagctctcttaaagaaggaatgatgaaaaaaggggaaacctttcaaaagaatataaccgatcaatcgcaaattgatttgcggatcggatatgcgccgggcgttgaaattaaaatcaacggagaagttctttcttacaagctcgatcctaagactgtgatgacacaaaacataacgattcaaaataaaaaggaggaaaagtcatcttaa

SEQ ID NO: 2041 - DNA, 582 bp, Bacillus licheniformis
atgtttaatttaccgaataaaatcacgctttctagaatcgcattaattcctgtttttatggtcatcatgcttgtgccgtttcagtggggggctgtctccttcggcagcgagtcgattccggtcacccatttgatcggcgcactgctgtttattttcgcttcggtcaccgattgggttgacggctattatgcaagaaagctgaaccttgtaacaaactttgggaaattccttgacccgcttgcagacaagctgctcgtgtcttccgctttgattattctggtgcattaccatcttgctccggcctggatggccattgtcattatcagccgggaatttgccgtaacgggactgcggctcgtccttgcgggaacgggggaagtcgtcgcagccaacatgcttggaaaagtgaaaacatgggcccagatcatcgcgatctctgcccttttgcttcacaatctcccatttgagcttgtatccttcccgttcggctctcttgctttatgggtggctgtctttttcacagtcgtatccggctgggattatttcgctaaaaactgggatgctttaaaaacatcgaactaa

SEQ ID NO: 2042 - DNA, 1251 bp, Bacillus licheniformis
atgaagttggaaagaaaagcggaaattatcgctgtcggctctgagcttctgctcggacaaatcgttaatacaaatgctcagtttatcagcaggcatttggccgaaatcggcattaacgtcttttatcacacggcggtgggagacaatccggcacgccttaaacaagtcattcagacagcgcagcaaaggtctgacttcatcattttttcgggaggcctcggaccgacgaaagacgatctgacaaaagaaacgatcgccgaagttgtcgggcgccctcttaagctcgacgatgaagccttcgaatcgattcaggattacttcaaaaaaacgaaccgggagatgtcgccgaacaaccgcaaacaggcgctgatcctcgaaggatccgatgttctgccgaaccgcttcgggatggctccgggaatgctgcttgagcatgaatcgcgcttttatatgcttctgccgggacctccgaaagagctggagccgatgtttgaaaacgaagcgaagccgctgattttggaaaagctcggctcgagggaaaagatcgtgtcaagggtgctgcgcttcttcggcatcggtgaatcccagcttgaaaccgatttggaagatctcatcgatgcgcagactaatccgacaatcgctccgcttgcggcagacggggaagtcacgctcaggcttacggcaaagcatgcggatccggaggagacaaaccgcttgttaaaagaaacggaagaccgcattttggagcgggtcggagaattcttttacgggtatgatgatacatccctcgcagaagagcttgcgaaagcatgccggagcaagggtatgactctggctgctgcggaaagctttacaggcgggcttttttccagctggctgacggaaatgagcggcgcttccgaatatttcaaaggcggcgccgtctgctacacaaacgaattgaaagtgtcagcggccggcgtttcggaagacacgctgcagcgctatggtgcggtcagcgcgcaatgcgctaaagagctcgccgcaggcatcagagtcaagacaggaagcgatatcggcatcagcttcactggagtagccgggccgaatacgcaagaaggccatccggctggaaaggtgtttatcggcatctccgtgaaggaccaggctgaggaagcgttcgaatttcagttcgccggatccaggtctgcggtgcggaagcgttctgccaaatacggctgccatctgttgctgaaaatgatggaaaaataa

SEQ ID NO: 2043 - DNA, 1047 bp, Bacillus licheniformis
atgagtgatcgtcaggcagccttagatatggcgcttaaacaaatagaaaagcagtttggtaaaggttcgattatgaaactcggcgaacaaactgaaacgagaatttcaacagttccgagcggttctttagcgctcgatgcggctcttggagtgggcggatacccgcgcggccggattattgaagtatacgggcctgaaagctccggtaaaacgacggtggcgcttcatgcgattgccgaagttcagcagcagggcggacaagcggcgttcatcgacgccgaacacgcgcttgatcccgtctatgcacaaaagctgggcgtcaacattgatgagcttttgctgtcacagcctgatacgggcgagcaggcgctcgaaatcgctgaagcccttgtcagaagcggagcggtggatatcgttgtcatcgactctgtagcagcgcttgtgccgaaagctgaaatcgaaggagatatgggggattcccacgtcggtttgcaggccagactgatgtctcaggcgcttcgcaagctttccggagcgatcaataaatcgaagaccatcgcgatctttatcaaccagattcgtgaaaaagtcggtgtcatgtttggaaatcctgagacgacgccaggcggaagagcgctgaaattctactcttctgtccgccttgaagtgcgccgcgcagagcagctgaaacaaggcaacgacgtcatggggaacaagacgaaaatcaaagtcgtgaaaaacaaagtggcacctccattccggacagccgaagtggacattatgtacggggaaggaatttcaaaagaaggggaaatcatcgacctcggaacagagcttgacatcgttcaaaagagcggtgcatggtactcttatcaggaggaacgccttggacaaggccgtgaaaacgccaaacagttcctgaaagaaaacaaggatatccttttgatgattcaagagcagatccgggagcactacggtttggatactggaggcgctgctcctgcacaggaagacgaggcccaagctcaggaagaactcgagttttaa

SEQ ID NO: 2044 - DNA, 114 bp, Bacillus licheniformis
atgaaacgtgtgaaaggctgccggcccgatcggcagccttttactttattcttcgctttcaggcgcttctcttccatccattctcttaatgagggcagtttgaaaggcgtttaa

SEQ ID NO: 2045 - DNA, 1560 bp, Bacillus licheniformis
atgagtcctttagcaattctcatctccattttgctgagcctattctgtttagttgttggctactatgttcgtaaaatcattgccgaagcaaaaatttcaggtgcgcgaaatgcagccgaacaaattcttggagacgcaaagcgggatgctgaagcgttgaaaaaagaagcccttcttgaagcaaaggacgagattcatacgcttcggatagaagctgaacaagaagttcgtgaaagacgaaatgagcttcaaaaacaagaaaaccgtttacttcaaaaggaagagaaccttgaccgaaaagatgaatcattagataaacgggaagcgatgttggagaagaaagatcattctctgaatgaacgacaacaacatattgaagagatggaaagcaaagtggatgaaatgattcgtatgcagcagtcagagttggagcgtatttcaagtctgacgcgagatgaagcgaagcaaatcattctggaacgggttgaaaacgagctttcccatgacatcgcgatcatgatgaaagaaagtgaaaatcgagcgaaagaagaggctgataaaaaggcgaaaaatattctttcattggctttacagcgctgtgcggcagatcatgtggccgagacaacggtttcagttgtcaaccttccaaatgatgagatgaaaggccgcattatcggacgtgaaggacgtaatatccgtacattggaaacattgacggggatcgatctgatcatcgacgatacgccggaagccgttatcctttcaggatttgatccgatcaggcgtgaaacagccaggatcgctcttgataaactcgttcaggatggccgcattcatcctgccagaatcgaagaaatggttgagaaatcccgccgtgaagtggatgattacatccgcgaaatgggtgaacagacgacgtttgaagttggagttcacggtcttcatcccgatttaatcaaaatcctcggccgcttgaagttcagaacgagctacggacagaatgtactgaaacattcaatggaagtggcgtttctgacaggcttgatggcttcagagctcggagaagacgtaacgctcgcaaaaagggcaggacttcttcatgatatcgggaaagcgattgaccatgaggtggaaggaagccacgttgaaatcggtgtggaactggccaccaagtataaagagcatccagttgtcatcaacagtatcgcatctcaccacggagatcaggagccgacttccatcatcgccgtgctcgtggccgcagccgatgcgctgtctgccgcaagaccaggcgcaagaagcgaaacgctcgaaaactatattcgcaggcttgaaaaactggaagaaatctccgaatcatacgaaggtgttgaaaaatcattcgcgatacaagcgggacgagaggtgcggatcatggtcaaacctgactcaatcaatgatcttgaagcccatcgtttggcgcgtgatattcgaaaacgaattgaggacgagcttgactaccctggacacatcaaggtaaccgtaatcagggaaacgagagccgttgaatacgcaaaataa

SEQ ID NO: 2046 - DNA, 798 bp, Bacillus licheniformis
atgagaattttatttattggagatgtcgtcggttcgcccggcagagacatgatcaaaacctatttgccgaagctgaagctcaaatataaaccgaatgccgtcatcgtcaacggagaaaacgccgcacacggaaaaggcattaccgaaaaaatatatcaccagctcattcaagctggagccgacgttctcacgatgggaaaccacacatgggataaaagggaaatatttgattttattgatgatgcgccacagatcgtcagacccgccaattttcccgagggcacgcctggaaaaggcatcacatacataaaaacaaacggttcgaaggaactggctgtgatcaatttgcaaggccgcacttttctgcctgcgatcgattgcccatttcgaaaagctgatgaattaatagaagaagcgtcaaaaagaacgccgttcatctttatcgattttcatgccgaagcgacaagcgaaaagcaggcgatcggctggtatacggacggccgcgtttcagcggttgtcggaacgcacacgcatgttcagacagcggacaaccgcattcttccgaaaggcacggcatatataacagacgtggggatgactgggccttacgacggtattctcggcgtcgaccgcgagacgattatcaagcgttttaaaacgagcctgcccgtccgttttgagattgccgaaggccgcacaactctgagcggagttgtcatcgacatcgacgaacagagcaagaaagccgttaaaattgaccggatattaattaatgacgaccacatgttttttgaataa

SEQ ID NO: 2047 - DNA, 261 bp, Bacillus licheniformis
atggaaatattaaaggtttcagcaaaatcaaatccaaactcggtcgcaggtgcgctcgcaggagtcttgagggaacgaggggctgcagaaattcaagcaatcggagctggggcattaaatcaggctgttaaagcggtagcgattgcacggggatttgtagcgccgagcggagtcgatctgatttgcattccggcgtttacggacattcaaattgacggtgaagaacgaacagcgattaagctaatcgtagagcctcgctga

SEQ ID NO: 2048 - DNA, 117 bp, Bacillus licheniformis
gtgggcatcaaaaatcttcatgttgatcctctcccggctgatttttcaaaaacggacaaaccaaaaacaacccgcttacgtaaaagtaagcaggttgaagcatttgaaaaagagtga

SEQ ID NO: 2049 - DNA, 921 bp, Bacillus licheniformis
atgaagatttttgatgcccactctgatttgctgctgaagctctggaaaaatccgaagctcaatgaatacagcgacccgtcgcttcaaacgccggtccaagcgcttttaaacggaaaggcgaaagtgcagtgtctggcgatttttctgcctgaaaccgtgccagacacaataaggcttgaaatggcgcttgtgcagatccagctgtttcacgaaaaaattgcaaagtacaagcggatcaaactgatcaaaaataaagccgatatcgacaagctcaaaagcgatgaaaccggcatcattttaacgatggaaggctgtgagccgatcgcaaaaaacttaaggctgtttgacatcttttttcagctcggagtcagaagtttcggcctgacatggaactgggccaatacgttcgcagacggcgctttagaagaaagaaacgccggcttgacttcttacggggaaaggctgattcgcaaggcgaacaaaaaccgggcatggacagatctctcccatttatccgaaaaaagcttttggggtgcgattgaaacggcggcgtatccaatcgcctctcattcgaatgcccacagcctttgccctcatccgagaaatttaaaagacgatcaaatcaaagcgcttattgataagaacggcgtcatcggcttgacatttgtccctgaattcgtgagaaacggaaaaacgcctgtgatcaaagatatcctctcgcatattgaccatgtctgctctttaggaggcgagcggcatatcggattcgggtctgattttgacggcatcgaccgtgtcattccgaatcttgaagcccacaaagattacgggaatctgatcgaagcgctgcagcgctcatatacaccaagtcaagtcgacggatttctctttcaaaatttcatcagccgcatcccattttaa

SEQ ID NO: 2050 - DNA, 1041 bp, Bacillus licheniformis
ttggacggaaatatgaaagcgcttatcaagaagccgggggagccgggcgccagcttcgagctcgtcccgattccgaagatcgacaaacacgaggtcctgatcaaagtcaaagccgcatcgatttgcggaaccgatgtccatatttataattgggatgaatgggcgaaaagcagggttaaaccgccttatgtgttcggccacgaattttccggcgaagttgttcaagtgggggaaaatgtgactacggtaaaagaaggggagtatgtttcggcagaaacgcacatcgtttgcggaaagtgcctgccgtgtttgaccggaaaagagcatgtctgcaaaaaaacgctgattctcggtgtcgatacagacggctgttttgctgaatatgtcaaaatgcccgccgcaaacatttggaaaaacccggccggcatgcctgaggatctcgcttctattcaagaaccgctcggaaatgccgtgcatacggttctgacgggaatgacggctggagtgaaagtcgctgtcgtcggctgcggaccgatcggactgatggccgtggcagttgcaaaagcgtctggggcggcgcaggtgatcgccatcgataaaaatgaatacaggctcgaccttgcattgcaaatgggggcaaccgatatcatctccgttgaaaaagaagatccgctcaaaaatgtaagcgctttaacaaatggtgaaggggcggacttggtttgcgaaatgtcaggccatccgacggcaatccgccaaagtttaaaaatggcggcaaacggaggacgggttcatgtcttaagcttgcctgagcatcccgtatgcatcgacatgacaaatgatatcgtctttaaaggattgacggtccaaggaattaccggccgcaaaatgtttgaaacgtggagacaggtcagcggtctcctccaatccggcacgattcaaatcaagcctgtcatcactcaccgtttcccgatggaagagtttgaaaaaggctttgaactgatgagaaaagggcaatgcggcaaagtcgtactgataccgtag

SEQ ID NO: 2051 - DNA, 1176 bp, Bacillus licheniformis
atgaaagaattcaattttttagcttccgagcttaatacaatgaaagaaaacggaacttttcaagagctgccgatcatcgaatcaatgcaaggatcaaccgtcaaaatgaaaggaaaagacattatacagctttcatccaataactatctcgggctgacgtctcatccgcgcctccaaaaagcggccgaagaggcggtcaaacggtacggagctggaaccggatcggtccgtacaatagccggaacattcaccatgcatgatgagctcgaaaagaagcttgcttcatttaaaaacactgaagcggcactcgtattccagtccggatttaccgcaaatcaaggcattctttcaagcattctcaccaaagatgatcttgttatctcagacgaattaaaccatgcttccatcattgacggcatcagactcaccaaagcgggcaaaaaagtatatcagcatgcggacatggaagatttagaaaagattttgaaaaagtcgatgaactacagaatgcgccttatcgttacagacggcgtgttttcgatggacggagacatcgcgccgctgcccgaaatcgtccggctcgctgaacagtatgacgcatttgtcatggtcgacgacgcgcacgcgtccggcgttctcggcgaaaacgggcgcggaacggttcaccatttcgggctggacgggaaggttcacattcaagtcggcacactcagcaaggcgatcggcgtattaggaggctatgcggccggatccaaggtgctgatcgactacttaaagcataaaggaagaccgtttctcttcagtacttcccatccgccggccgtcactgcggcatgcattgaagcggtcaatgtgctgatggaggaaccttcattgattaaaaagctttgggacaataccgcgtacttcaaaaaagagcttgaaaaaatcggccttccgctgattaagagcgaaacgccgattacgccgattttgatcggtgatgaagctgcggcatgccgcttctcaaacacgctttttgagctcggtttatttgcccaggccattgtatttccgaccgtcccgaaaggcaaagcgcggatcagaacgatcatgaccgcccagcattcgaaagaagagctcgataaagcgcttgaaatcattcaaaccggcgctaaaaaagcgggtctgctttaa

SEQ ID NO: 2052 - DNA, 1530 bp, Bacillus licheniformis
atgaatgagaaacagcgcattgaaagcggacaggtcaatccatcggacaaaaaatccgagaaggattacagcaagtacttcgaagctgtttatgttccgccttcattaaaagatgcgaaaaaacgcggcaaagaagaggttaaataccataacgattttaaaatctcagagcagttcagaggcatgggcgaaggacggaagttttacatccgcacgtacggctgccagatgaatgagcacgataccgaagtgatggcagggattttcatggcgctcggctatgaaccgaccgactcgacggaagatgcaaacgtcattttgctcaacacgtgtgcgatccgggaaaacgcggaaaacaaagtgtttggcgaaatcggccatttaaaagctttgaaaaaagacaatccggatttgatcctcggagtctgcggatgtatgtcccaggaagaatcagtcgtcaaccggattttaaagaaacatccgttcgtcgatctgattttcggtacacacaatatccaccgcttgcccgaacttttgtcagaggcttatctgtcaaaagaaatggtcatcgaagtgtggtctaaagaaggcgatgtcattgaaaaccttccgaaagtccgcaccggcaaaattaaaggctgggtcaacatcatgtacggctgcgacaagttctgtacgtactgcatcgtgccgtacacaagaggaaaagaacgaagcagacgtcctgaagacatcatccaggaagtgagaaggcttgcggctgaaggctacaaagaaatcacgcttctcggacagaacgtcaacgcctacggcaaagattttgaggatatggaatacggactcggccacttgatggatgaactccgcaaaatcgacattccgcgaatccgcttcacgacaagccatccgcgcgattttgacgaccatctgatcgaggtgctcgcaaaaggcggaaaccttctggaccacatccatctgcctgtccagtccggaagctcggatgtcttgaaactgatggcgcgcaaatacgaccgggagcgctatcttgagcttgtcgccaaaattaaaaaagcgatgccgaacgcatccttaacaacggacattatcgtcggcttcccgaacgaaacagacgagcaatttgaagaaacgctctctttatacagagaggttgaatttgacagcgcctatacgttcatctactcgcctcgcgaaggaacgcctgctgccaaaatgaaagacaatgttccgatgcgcgtgaaaaaagaacggcttcagcggttaaatgaagtggtcaacgaaatttccgcgaagaaaatgaaggaatatgaggggcaggttgtcgaagtgttagtagagggtgaaagtaaaaacaaccctgatatccttgccggttatacacggaaaaacaagcttgtcaacttcaaaggaccaaaagaagcgatcggccagcttgtcaacgtgaaaatccaccaggcgaaaacttggtcgcttgacggggaaatggtaggagaagcaatcgaggtgaagtaa

SEQ ID NO: 2053 - DNA, 432 bp, Bacillus licheniformis
gtgacgctttatacgaaaaaagagattgttgcaaaagcgcgggagctcgcaaaaatgattgcagaaacggaagaagtcgactttttcaaaaaagcggaggcacagattaatgagaatgccaaaataacgggcataatcaaccaaatcaaagccctgcaaaagcaagccgtcaactttaaacattacgaaaagcacgaagcgcttaaacaaacggaagcaaagattgacgcgcttcaggaagagcttgacgagattccgatcattcaagagttcagagactcccaaatggaagtcaacgaccttcttcagcttgtcgcgcatacaatatcaaaccaagtgacaaacgagatcatcacatcgaccgggggagacctgctgaaaggcgagaccggttcaaaagtgaaaaattcatcaccgagctgttctctataa

SEQ ID NO: 2054 - DNA, 549 bp, Bacillus licheniformis
atgtctgaatacagggaaattatcactaaagcggtggtcgcgaaaggccggaaattcacccagtccactcatacaatctccccttcgcaaaagccaaccagtattttaggcggttggattatcaatcataagtatgacgctgaaaaaatcggaaaaaccgtggaaattgaagggacatatgatatcaacgtctggtattcatatgcggacaacaccaaaaccgaagttgtgacagaacgcgtttcctatgttgatgtcattaagctccggtatcgcgacaaaaattacttagatgatgaacacgaagtcattgcgaaagtgcttcagcagccgaactgccttgaagtgaccatttctccgaacggaaacaaagtggttgtacaggcggaaagagaatttttagcagaggtcgtcggcgagacgaaggtcgtcgttgaggtcaattctgattggacggaaagcgatgaagaagaagcgtgggaagaagagcttgatgaagaacttgaggatatcaatcccgagtttttggttggagatccagaagaataa

SEQ ID NO: 2055 - DNA, 2610 bp, Bacillus licheniformis
atggcaggctacacgcctatgatacagcaatatttaaagattaaggcagagtatcaggatgcctttttattttttcgtcttggcgacttttatgagatgttttttgaagatgcaaaaaaggcgtctcaggagctcgaaatcacgctgacgagcagggacggaggatcaagcgaaagaattccgatgtgcggggttccttatcattcctgctcttcgtatatcgaacagctcattaaaaaaggctataaagtcgcgatctgtgaacaggtggaggaccctaaatcggccaaaggagtcgtcaaaagggaagtcgtgcagctgatcacacccggcaccgtgatggacggcaaagggattcatgaaaatgaaaacaactttatcgcctctgtcagtaaatttcagcatacatacgggctcgctttttctgatttgacgacaggcgagaatttagtaacggctatcgaaaggcttgatgatgtcgtttccgaaatttactctgtcggagcaagggaaatcgtcgtcagccgcaaccttgacgagaaagacgtcgcaatgctgaaagagcgctgcggcgccacgatctctttcgaggatgaacaagcggatgaagtgcctggcattgtgaacggactggggtccaaagagcttgtcgatacgtttatgaggctttacgtctacttgaagcggacgcagaaaagaagcctcgaccaccttcaaaacgttcaggcctacgagctcgaagaagcgatgaaaatcgatttgtactcgaaacgcaatcttgaactgacggaaacgatccgttcgaaaaacaaaaaaggctcgcttctttggcttttggatgaaacgaaaacggccatgggagggcggctgttaaagcaatggatcgacaggccgctgatcagaaagggacagatcgaagagcgccaggaaatcgttgaaacgctgatcgcccatctgtttgagcgggaagatttgcgcgaacggctgaaggaagtatacgacctcgagcggctcgccggaagggtcgcatacggcaacgtcaacgccagagatttgatccagctgaaggaatcgctgaaacaagtcccggccatcaaacagcttgtcggctccctcgaccatccgaaagcaaaagcgcgcgccgagaaaatcgatccgtgcggcgatcttttgaatcttttggaagacgcgctatacgagaatccgcctctttcattaaaagaggggaacttaatcaaagacggctaccacgcgaaactggatgaatacagggacgcaagcaagaacggaaaagactggatcgcaaggcttgagcagcaggaacgcgagtacacgggaatccgctctttaaaagtcggctttaacaaggtgttcggctattatattgaagtgacgaaagcgaacatccatctgcttgaagaaggccgctatgaacggaagcagacgctgaccaatgcagaacgctacatcacgccggagctgaaagaaaaagaagccctgattctcgaagcggaaaacaatatttgcgagctggagtatgagctgttttccgagcttcgcagcaaggtgaaggaatatatcccgcgcttgcagcagctggcaaaaatgatgagcgagcttgatgtgctccaatgttttgcgacgatcagcgaaaaccggcactatgttaagccggagttttccgatgatgtcgttcaggtgatcgacggacggcatccggtcgtagaaaaggtgatggacagccagtcttacgttccgaacagctgtgaaatgggcaaaggcaggcagatgcttttaatcaccgggccgaatatgtccgggaaaagcacgtatatgagacagatggcgctgatctccattttggcgcagatcggctgctttgttcctgcgaaaaaagcggtgctgccgatctttgatcagatctttacgagaattggcgcagcggatgatcttatatccggacagagcacgtttatggtggaaatgcttgaagccaaaaacgcgatcgtccatgcgacgaaaaacagcttgattttatttgacgaaatcggccggggtacgtccacttacgacggaatggcgcttgcacaagcgatcatcgagtacgttcacgagcacatcggcgcgaagactttattttccactcactaccacgagctgacgtcccttgaagaaaagctggacgatttgaagaatgtccacgttcgtgcggaagaatacgaaggaaaggtcgttttccttcaccagataaaagaaggagcagcagataaaagctacggtatccatgtcgcgcagctggctgaattgcccgacggtttgatcagtagggcgaaaacgatcctgaaagaacttgaatccggcgcaaaagaagccgctccatcaacggcaccgaatatggtaaaagaggcggcggaagaagccgcggcgactgttgcagatcaaccggcccagctgtcattttttgagacggacaagccaatagaaaaagagacgaagctctccaaaaaagagcaggctgttttagccgaatttaaagcgatggatctgctcgatatgacgcctatacaagtcatgaatgaactgtacaggctgcaaaaaaaattaaagtaa

SEQ ID NO: 2056 - DNA, 1911 bp, Bacillus licheniformis
ttggcaaaaattgttcagctgcctgacgatttatcgaataaaatcgcggcgggtgaagtagtggaaaggccggcgtcggtcgtcaaagagcttgtcgaaaatgcaatcgatgcgaacagctccgtgattgaaatcgatgttgaagaagcgggtctcgcctcgattaaagtgcttgacgacggcgaagggatggacgcagaagactgcagaacggcttttttgcgtcatgccacaagcaaaatcaaagacgaaaacgacctgtttcgcgtcagaacgctcggatttcgcggagaagctttgccaagtatcgcgtctgtctcacacttaagcattaaaacgagcaccggagaaggggcaggcacccatttgacgctgcaggggggaagaatcatttccgagcaaaaagcgccaagccgcagaggaaccgaaattacggttaccaacctgtttttcaatacgccggcaaggctgaaatacatgaaaacgattcataccgagcttggcaacatcacagatgtggtcaacagaatcgcccttgcccatccggaagtttcgatcaggctgcgtcatcaagggaaaacgcttctgcagacaaacggaaacggcgatgtccgccacgtgcttgcggcgatttacggcacggcggttgccaaaaaaatgctcccgcttgaagcgagatctcttgactttgaagtgaagggctatatcgctcttcctgaaattacgcgcgcctcgcgaaattacatgtcatctgtcgtcaacggcagatacattaaaaacttcccgctcgtaaaagcgatccacgagggctaccatacgcttcttccgatcggccgccatccgatcacgttcattgaaatcaacatggacccgctccttgtggacgtcaacgtgcacccgtcaaagctggaggtcaggctgagcaaagagacggagcttcacgagctgattcgcgacgccatcaaagacgtctttaaacagcagcagctcattccaagcgtgcaggtcccgaaaaaaaccgcacctctgatcaataaaccagagcagcaaaagcttgatttcgaccaggtacgagaaccggcacctctttctgattctgatgttgaaagagagtataagccggagccttcgttttcggcgatgaaattaagctcgcttgtcaaagacccgccgccttccgctcccgaagagcgcgaagaaaacgtaatgcaggacaccgagcctgaatggcccggagctgaagagtatacgcctgaagccgcgccggccgtacaagcagaaccggaacaggcaggagagaacgtccaggacgaagagacgccaaaagaaagggtgccgatcatgtatccgatcggccaaatgcacggcacctacatacttgcccaaaatgaaaacgggctgtacatcatcgatcagcacgccgcacaggagcggatcaaatacgaatatttccgtgaaaaagtcggggaagtcgaatcggaagtccaggacctgcttgtgccgctgacattccattattcaaaaaatgaagcgctgacgatcgaccagcacttggacgatttagccaaagtcggcgtctttctcgaatcgttcggcgccggcagctatatcgtccgatgccacccgacatggtttccgaaaggggaagaaacgacgatcattgaagacatcattcagcaggtccttgatgaccgcacgatcgacatcaaaaaactgcgcgaagaagccgcaatcatgatgagctgcaaaggctccatcaaagccaatcatcacctgcgggacgacgaaatcaccgccctgctcgatgagctgcgcagaacatccgaccctttcacatgcccgcacggtcggccgatcatcatccactactccacctatgagatggagaagatgtttaagcgggtaatgtaa

SEQ ID NO: 2057 - DNA, 282 bp, Bacillus licheniformis
atgcattacataacggcatgcttaaacatcatcagcgataaagaccttaatgaaataatgaaggaattcaaaacacttgaggaaaaaacgaacaaagaagaagggtgtattcaattccatgcttatccgcttgaaccgtcggagcgcaaaataatgctctgggagatttgggaaaacgaagaagctgttaaagcccatttcacgaaaaaacacacaaaagatgttcaaaatcaacaattaacagaagtagaatggttaatcaaaagcaatgtgaatgattaa

SEQ ID NO: 2058 - DNA, 528 bp, Bacillus licheniformis
atgaagggatacaaaaagctcggttctgtcgatgtcaccgatgaaatcggtacaggcaaggacttcatcggcggttcgtacatgctttattcaaacggtcaaattgtccgaaaatacatatccggcggtgaagtgaaatacgaacttgtcagtcgcataccggaaagcagagtgaagaaaagcaacattgaaaaagctcttgattgggctaaagacacagttggggaattgtccggtggttatgatggttatagagcgataacaggtgttgaccctgtgactggtgaaaaactaaccgtcactgaccgtatcctgtccggtgtttctgtcatacccgctactaaagtagtcaaggtagggaaatatgctttcaaagccactaaaggtgcgaagacggcgaaaagggtttcgaatgccgagagaagtgctaatgctacgcctaaaattaatagaaaacaagctctcaatcaggcaaaagacttagctggcaacaacctacacgtcaatggcaggttggcgatgatataa

SEQ ID NO: 2059 - DNA, 147 bp, Bacillus licheniformis
gtggttgttacccatactaacgataacagattacacgcacatgcaggtaagcctgacaaagaggcaaatcaattcaactatgactttaagaaagagagatatactaatatatacggtcctaatggagaccaccatatatactataaa

SEQ ID NO: 2060 - DNA, 480 bp, Bacillus licheniformis
atgtcgtctcgtaatgaaattattaaacaaaaaaaagcgataatgaatgcaaggaaatcgatgaaggaatttacttgcttagaactattagattttgaagagtttgattctccttggatagacttgttcgagccattactaaaacaatttcgaagaatagattccaaaccaacttattataaattaattggggattctaaagaaaacaatattttatggatagaaaattccctaagtttccttaaacaaaaaaaagagtggtttatcgttgttcccaaatgtttacaaccagtgtgggcaaatgttcgagttttagactattctaaagcaattcatgagctttgggaaatgtcagaacctgataatttcctaattgctgataaatctacaggaatgattgcaaaaattttttttgaagaacaacaatacgagatccatattggaaaatgtagtcttgataacattaaaaagaataactaa

SEQ ID NO: 2061 - DNA, 987 bp, Bacillus licheniformis
atgcctataactaaaaagaaaattcctgtcgctattctcactgggtacttaggcgccgggaaaaccacacttttaaatcgaatacttacagaaaagcacaatcaaaagatcgcggttattgtcaatgagtacggagaagtcgggatagacaaccagcttgtcgttgattctgaagaagaaattttggaaatgaacaacggctgtatctgttgcacggtccgcggagatttgattcgcattctgagaacgcttgtattctcaatgtatcaagggaaagttgcatttgatcgcgttttaatcgaaacaacgggactggctcatcctgcccccgttgcccagacgtttttcatggatgaactgctatccgaaatatttgaagttgacagcatcgtcacggtagtagacagcaagcatgtcaccagacatctggatgatcaggatgaagcgcaagagcaaatcgcatttgctgacgtcatcatcctcaataaaacagatttagtatcgaataacgagctgaaatccttggagcaaagacttgtcaacattaatcctacggctaagaggctgcatgccagagattgcaaggtcaatttaagagatatactggggatcaatacgttcgacgtcaatcgaaaaattgaaatcgatcctcattttctagaagatcatcatcaccaccatcacgatgataaagtgtcttctatcgcttttcgggaagagaagcctcttgatttggcaaaggtggatcattggatgagttatctcgtacgggaaaaaggagaagatttattgcgttataaagggatcctttatattaaaggcgaagaatatcgaatcgtattccaagggcttcatatgctgttttcaggacgtccggaccggaagtggaacgaaaacgagaaaaaacaaagcgaacttgttttcatcggaaaggacttggacaaagaggaactggagcggcaatttaaaaattgcatcgcaaagtaa

SEQ ID NO: 2062 - DNA, 387 bp, Bacillus licheniformis
atggcgacatgggatttaagtaatatgaaacatcatatttttatctgcaacggcagcagctgcaatcgggccggagctgaggaactgactcaagtgattctgcaagaaatctcggaccgggagcttgacgatgtcattcatacaacgcgcacgcggtgtaatggaagatgccaagataagtgcgtggccatccattacccgagaggaacttggtatagagatttaatacctgaggatgtccccctcctgattgactcgctttgtaccaatgaagattataaagaaaaagcaagccatttgtatgacggccaacgcttcgaacgttcatccggcctcatctccgtagttccaaaagaaaaagtaatcaaagtatcgaaaaaattttaa

SEQ ID NO: 2063 - DNA, 495 bp, Bacillus licheniformis
atgcataacataaacattcgaaaagctatttctgccgatttgccatttatcttaactatttataatcagggcattgaagatcgaattgcgactctggagcaagatttaaaggaaatgagcgatatcgaaatatggtttcaggaacatcaagggcgctattctgtccttgtggccgaatcaaaaggagaaattgtaggctgggcttctttgaacccgtactcccaccgttgtgcttatcaaggtgttgccgacctttctgtctatgttgatcgtgcatgccgcggaaaaggaataggcggcctccttcttcaagctctagaaaaaacagctaaagagaatagtttttataaaatcgtcctctttacatttccctttaacgaacttgggcaaaacctatacaataaaatgggctacaggcaagttggcatctttaaaaatcaaggaattttagatggacgttttatcgatgtaatggcaatggaaaaattgctatag

SEQ ID NO: 2064 - DNA, 648 bp, Bacillus licheniformis
atgtttaaaactaagttcaagaaaacaattgggattggactcgttgccgctgcctgtttgatttccgcgtcgacggcaagcgctgcgtcgcaaaatgaaagcgatgttaaagtgaaactggacgatcagcagcggaatcaatatacggtcaaatctttccactacttaaccgttgacggaaaaaatgtggattcgccggctcaagccaacgccaaatccgtcagagatgtcaaagtaaccatggttctgcccaagcagaataagaacggcgatttgcttgcgtatggatttacgagcaaggttactttagaagcctttatcgcgaaagacaagcagaggcttgagaagcaattcaaaccttctgccagcggtccctgctgtaccgatttctatgaatataaaaataaaggcgggcagtatatttactggagagacggatttaaaaacttgccatccagctggaatgacagaatttcatcgttaagtacggcgtctccttcatcaagctattcaacgacgctgtgggagcatacttcaactcaaggatacggcaaaggcgttttgtttagacattccgattggtacggcaaaactgctaatatggcttctgattgggacaataaagcttcggccatcgatatcaagtaa

SEQ ID NO: 2065 - DNA, 111 bp, Bacillus licheniformis
atgagcggaggttacggacacggaagcggttttgctttaattgttgttctgttcattctcttaatcatcatcggcgccagctggttcggcggtggatatggaggctactaa

SEQ ID NO: 2066 - DNA, 1443 bp, Bacillus licheniformis
ttgaattttcaattaactgaaaaagacatgcttcgtatcatcaggaatggtcttcaaacggcacagtaccctaagcatatgatgatcgttggtgccgggttgtccggacttatcgcagcgtctttattaaagaatgccgggcatagagtgacgattgtggaagcaaatgacagagcgggagggcgtgtttttacttcccgtgcgccctttagcgaagggttgtatttcaatgccgggccgatgcgcatccccgatatccatactttaacgatggaatatattaagaagtttaatctgcctgtcaatgtgtttatcaaccgaacccccatggatattctttacgtcaacggcgtgaaaacccgtcttcatgagtttgaaaaaaatccgggcgttttaaggttccctgttgctccccatgagcagggaaaaacggcagaacagctgatgctttctgctttgcagcctatcctcaattttatcagccaagatccggcgagaaattggcgtattgttgaaaaacaatacaggaacgaatcgttaggatcttttctcaacactcatttttcaagcggttccatcgatatgattggtgtgcttttggacatggaagcgtacatgggattgtcccttgtcgaagtattgcgggaatcgattttttttacatcgccgactcgcttctatgagattacaggcggcatggacctgttgacgcaagcttttcttccgcaattaaaatggaatattttattccgtcaaaaattgatgaaaatgtctcaaactaaaaacagtgtaacagcccattgcattcaccagcagtcggcagaacattcagcggtgacaggtgacttcgcgatcgtaacaatacctttttcagcattgcgatttgtggcatttgagccgtttgaatccttttcctaccaaaagcggagagcgattcggtagcttaactatattgcggcgacaaaaataggaatcgaatttaagagcaggttttgggaaagagtcggacagcgcggcggcagatcgattaccgatttgccgattcgcttttcatactaccctagcagcataggaggacacgggcatgctgtcattttagcgagctatacgtgggctgatgaagcgctaatatgggacagtcagcctgaagaagagcggatccgctatacgctgaaaaatttagcgaaaatatatggagatatcgtgtattctgagtttgtatcaggcgcttctttcagctggacgcaaaatcctttttcagccggagcatttacagctttcgaaccagggcaggaattagagttgtatccttatattccgatgcctgaaggaagggtgtatttcgccggggaacacgcttccctcactcatgggtggatgcagggagcgattgaatcgggaatacgggcggcgtatgaagtaaatcaggcctcccgcgtataa

SEQ ID NO: 2067 - DNA, 189 bp, Bacillus licheniformis
atgaagttcttaaaaacttgtttttacgaatggaaacacttcttactgttgaggaagcaaaaacaaatttacctcccctcagaaggcggagtttattggaagatccgtctgtttaactcaataaaaacgaacaagccgctttttaacagcgactcttccccatcccctaaaatcggttctttctattaa

SEQ ID NO: 2068 - DNA, 678 bp, Bacillus licheniformis
ttgaatgctgctcgtgatcgaaacatcatgcttttgcttctctgtttgacagcaggtattgtagatgtgattgggtacttaagtatcggtcacgtatttaccgctaatatgaccgggaacatcgtactgttaggattatcaatcggcaattctcttcatgcgaccgccgtgtactcgctgatcgcactgttcggatttatcatcggcgtgattatatcagcagccattgtcggaaaacaggaaaaatcgttctggccgacaggcgtcacgattgcacttgctgtggaagcagccgtattgcttctatttgcctgcctgactttctttgaaagttcgccgcaccttttaatcttgctgttaagcattgcgatggggcttcagactacggcagccagaaagctcggcattgcagggatttccactactgtcctaacggggacgctggcaaactttttcgaagatgtgacaaaacgattcctcagtaataacaaccaaaaggtcatccataaggacgcatggcttcgcgctttgacgattgtgctctattgcctgggggctgtcattgccgcacttgctgaacctgagcatccgtttgttgtgatttggattccgatcgttatcattatcggtattattgcggttgcaggcacaaggtttcacggaaagagtgagggatga

SEQ ID NO: 2069 - DNA, 1470 bp, Bacillus licheniformis
ttggaacacattaatatggagcagtttattttattagcggccttattgctgattatcggtgtactgacaacgaaattttcgactaggctcggagtgcccgcccttgtattgttcttgattgtcgggatgatcatggggagcgatggtctcggaattatttattttaataatcccgagcttgcccagctgattggaattatcgcacttgtcgtcatcctttttgaaggcggtttgcaaacaaagtggtcttcggtcaaagcggtcgccgttccttcattgtcgctcgcgacgattggcgttttgctgaccacctgcgtggttgcggttgccgccaagctgatttttaatgtttcttggatggagggctttttattcggagcgattgtcggctctacagacgcagccgcgattttcgccgtattgaaaggccagaatattagagacagattgagctccactctagaagcagagtcgggtacaaatgatccgatggcgatgtttttgactttatcgctcatccagctgctgacggctgaccattcatcttatttcatgcttgttatttcatttttctggcagatgggaatgggacttttgctcggatatttactcgggcggttcgccagctttgccatcaataaaatcaacttggattcgagcggactttatccgatcttcgctcttgcttttgcgcttcttacctacagtcttacagatgtcatcggggcgagcggcttactggccgtctacattgccgcgcttgtcatcggaaatcaagatttgacttaccgacattccattttcaggtttaatgaaggctttgcctggatgatgcagattttgatgtttatcattctcggattattggtttttcctgcccaatttttatccttcgatattattttcaagggcttcttgctttccctgattttaatttttatcgcccggccggttgccgtttttctgtcgaccatcaaaatgggctttaattttaacgaaaaaatcttcttatcatgggccggattaaaaggggcagtcccgatcgttcttgcaacatttccgatgacgatggggcttgaaaacagccaattgatctttaatgtcgtattcttcgtcgttttaacatcggctttgatccaagggtcaaccatatcggtcttcgcagaaaaattgaaattgaacggaccgcagaaagtagaagcgccgcattcgctggagcttgtttccatcggcaaggcgaacgccgaaattatcgaatttgaagtcgatgaccaagcagccattaccaggcagatgctgaaagacatcagctttccaaaagatgccctgatcaatgcgatcatccgaaatggggatttggtcacgccgcatggagaaacgaaaattaaaccaggcgatattttatatatcctcgtatcgaaaaaacaaaagaaggaactgaaaaaatttttaaacagagaatttgattaa

SEQ ID NO: 2070 - DNA, 1371 bp, Bacillus licheniformis
ttgaaaaacagtaaaatacaaacctttaaacatcaaaagaaggcattttggtggcttagctttgtcgctttcttcagcgtgatgaacgaaaccgtatttaatgttgcattgccggacataaaaaatcaattcggcgtgtcgcctgcggcggcaaattgggtgaatacgagtttcatcatttcctttgctgccggttcagttgtttacagcaggctttctgatatgtacggcgtcaggaagctgtttgtggccggactgttcatctatggaggaggctcatttatgggtttgttggctcaagcttatttcccggctgtgatctttgcgcgctttgttcaaggatccggggcttccgctgtacccgcgcttatcctggtcatcatcacgcgctatgtccgtccggagggccggggcaaagcattcggcattgtcggatcactggtggcaatgggcgagggaataggtccggccatcggcggaatgattgtacattatattcattggtcgtttctgtttattctgccgatggcagtgctgatggcgattcctttcttctttagaaatatgcctgatgaagccgctgcaaaagcaaacctggatatcattgggatcggactgctgacaatcagcattgtgatgttcgctgtatatatatcgctgtatcatgtcttttatttactggcgggcattttttgcttgattggagctgcagttcatacccgacatgcagaacatccgtttattgaccgttctttaataaagaatcgccgatatataggagtcgttttggcaggatgtactgtattgggaagcgttgcgggaatcgtctctgtcgttccttatatgatgagagtcttgtttagcttaaatgccgatactatcgggagcggcatcttacttccgggcactgtgggcgttatctttttcggcgttgcgggcggagcccttacagatcgcttcggcagccggtttgtttttactcttggatggttattgatcttgtcaaccatggcagccgcgtcacaggtcggcgaccggacaccatggttgatgacgattatgctcgtgtttatatttggcggtctttcatttgtgaaaacggcaatttcaaacagtaccgcagaaagcttggaagaaaaggctgcaggcgctggaatggggatgctgaactttgcctgttttttatctgaaggaataggcgtcgcattagcaggaggcttgatggcagtgcacgggtttggctattctgcgcttccggcaatgaacgatgcctggagtgctgtattcagccgctcgtttgccatattcacagtttttgtattggctggcggattgctatatttattgacttgcaaacgcaaaaaatcttag

SEQ ID NO: 2071 - DNA, 864 bp, Bacillus licheniformis
atgaaaagaagcatcggcacctttgaaattgacggactgacaattgaatattcgcgagtaggtgaagggaagccgattcttgtgatgcacggaggtcattcgaattgccgcgaggaatttgggtatcgagatctttatgagagccgattctctatcatcacgccttcccgtgcagggtatggccggacatcgaaagaaatcggggacagtttggaacttgcctgctattactatatgaaactgcttgatcatttaaatatcaagaaagttcatgtggttgcggtgtcagccggcgggccaagcggaatatgttttgcatccaaatactcggaaagagtagaatccttaattttgcaaagcgctgtcacaaagcagtggctgacagcgaaggatattgaatataaagttggtcagatcatctttcggccgcctgttgaaaaggccgtatggaagctgatatcggcgcttaacaatcgatttccggaatggatctttaagaaaatgctatcctcctttactacacttcctgctgatcaggcgatgctgaaagtcacggagggagatattgaagaaatgagaaaaatgaacaacagacagcgttcaagtcgagggttcttgcttgatttaaaaaatatagacgatttatctttccatcatttgaaggagatttcttgtccggtattaattatgcattgccgatatgatcgtgttgttccagccgagcatgcttttcatgcaaaaaaactgattcctttttcagaagtctatcaggcagacagctggggtcatctcatttggctgggaacagagggtaaatctgtctcacagaaggtcatcagctttttaaaaaccacatcatcttga

SEQ ID NO: 2072 - DNA, 132 bp, Bacillus licheniformis
gtgctccgaaaaccggccagggaggatttctcattcatcttatttgcaagtcttgtacgacgttcatcagttctgttcggaaagatcattctgctcttgattaaaaaattgcactacttcatttgcgggtag

SEQ ID NO: 2073 - DNA, 311 bp, Bacillus licheniformis
atgatcatcgtcacaacagatacaatcgcaaatcaaaacattgtcgaagtcaaaggcttgtcacaagcagcatcgttcagtcgcggaatatcggaaaagatattctgtcagggttgaagtcagtcattggcggagaattaaaaaattacacccaaatgcttgaggattcgaaaaaagctgtgagggaacggctcgtgaatcaagctgaagagcttggagcaaacgcgatcgtcggtctaaggttcgaactgtctgcaggccagggaacctccgaactcatcggatatggtacggctgttgtaatcggctag

SEQ ID NO: 2074 - DNA, 651 bp, Bacillus licheniformis
atgatcagaaaactattcactatcatcatcatggcaagtatcatcgcggtcggattcgtctgcaaagattcctggctcgacgtcatcagggacggaggcgtttattcggtattattcagcatgctgcttgtggcggcctgtgtatttttcccgatcgtcccgtttgcgctcattgccggattaaacggcgccttgttcggaatcgcaaacggcgtgctgatcacgctgacggggtctatgctcggcaccatgctcttgtttttcctctcacgttacggattcagagacatggctcgcagacacttaacgaaatacccgaaaatgagcgaatatgaagcgtattttaaccaaaatgcttttacagccgtactattgggcaggctgatcccggttatcccagccgttgtcatgaatatcgtctgcggtttaagcaaggtgaaatgggctgtcttttttgcggcttcgacgcttggaaaagtccccaacgttctcgtcgtctctatcgcaggtgccaatttcagcgaaaacaagctgctctctgtcggcgtctacggcttatatatggcgatcatagcgtttgtcatctacagaaagtatccccatctgactcaaaaacataaagagacgaaacagacagggaagccttcttga

SEQ ID NO: 2075 - DNA, 1017 bp, Bacillus licheniformis
ttggtatatacagcggaacatcttgatgattatttaatggaacaagcatccaacaatcattttcacggcagcattttgctggcagattcaaacggtatactgttatcgaaaggatacggttatgccaattgtaaggacaaggtgaagaatgaaccgtctacacgctaccaaattgcctcactgacaaagcaattcacagctatagcggtcatgcagctgcaagaaaaggggctgcttcgtacagatgacccggtacaaaactatttagaaggctatccgaacggcgacagcattaccatcaaacatttattaagccatacgtccggaattcctgattttctagaggaagaattgctcgatattgagctggagcgcgcaccgttggaccaatttatcagacgttttattgacaagccgcttgaatttcggccgggacaaaggttcaattacagtaattcaggatacatactgcttacaaaaatcattgaaacgatcacaaatgaagcttatggagacgttattcaacaattgatctttgaccctttaggcatgaaaaactccggttttttctcttctccggaagatatttcgcctacagtcggatatttatgcctgaatcgtgaaatgatcaaagcgcctatcgtatacggctacggggaaagcgggctgtattcaaccgttgaagacttgtacttatgggacagggcgctttacaccgagaagcttgtctcaaaagatgctttgaaagaagccctttacagccgcgtcaaaaagcaggcttttgcagccgaaggcccttctccggcgctcattcaaaacaattcgatcggatacggatggtttattaatcatcaaaataagtataaaatatggcatgatggagaaatccacggttttatcagctcaattaaccgatacatggatgagaaaaaagtgctgattatgctcagcaattgcaacctctcaaaaactgacgagattttggcacacttagaagaagctttattgcaaatgtag

SEQ ID NO: 2076 - DNA, 144 bp, Bacillus licheniformis
atgaaattgccttattttaaatttagcttaaattattctgcaaatgatggaaaatacaaaaaaatttttataatgttattttggtcgcgcttcctgcttcatttcctttcaaaactatcgtttattgttttcttcttatcataa

SEQ ID NO: 2077 - DNA, 1191 bp, Bacillus licheniformis
atgggacaaaaacatatcgcgatttttaatattccggctcacggccatattaatccaacgctagctttaacggcaagccttgtcaaacgcggttatcgggtaacatatccggtgacggatgagtttgtgaaggctgttgaggaaactggggcagagccgctcaactaccgctcaactttaaatatcgatccgcagcaaattcgggagctgatgaaaaataaaaaagatatgtcgcaggctccgctgatgtttatcaaagaaatggaggaggttcttcctcagcttgaagcgctctatgagaatgacaagccagaccttatcctttttgactttatggccatggcgggaaaactgctggctgagaagtttggaatagaggcggtccgcctttgttctacatatgcacagaacgaacattttacattcagatccatttctgaagagtttaagatcgagctgacgcctgagcaagaggatgctttgaaaaattcgaatcttccgtcatttaactttgaggatatgttcgagcctgcaaaattgaacattgtctttatgcctcgtgcttttcagccttacggcgaaacgtttgatgagcggttctcttttgttggtccttctcttgccaaacgcaagtttcaggaaaaagaaacgccgattatttcggacagcggccgtcctgtcatgctgatatctttagggacggcgttcaatgcctggccggaattttatcatatgtgcatagaagcattcagggacacgaagtggcaggttatcatggctgttggcacgacaatcgatcctgaaagctttgatgacatacctgagaacttttcgattcatcagcgcgttccacagctggagatcctgaagaaaggggagctgttcatcacccatgggggtatgaacagtacgatggaagggttgaatgccggtgtaccgctcgttgccgttccgcaaatgcctgaacaggaaatcactgcccgccgcgtcgaagagcttgggcttggcaagcatttgcagccggaagacacaacagcagcttcactgcgggaagccgtctctcagacggatggtgacccgcatgtcctgaaacggatacaggacatgcaaaagcacattaaacaagccggaggggccgagaaagccgcagatgaaattgaggcatttttagcacccgcaggagtaaaataa

SEQ ID NO: 2078 - DNA, 1578 bp, Bacillus licheniformis
ttgtcaaatcagggcaatttcaaaaaaacgatctctctgcttgacctgattttgatcggcatgggtgcgatattcggatcggcttggctgtttgccgtcagcaatgtcgcttcaaaagccgggcccgctggaagcttttcgtggattatcggcggcgtcattatccttttaatcggcctcgtttatgccgagctgggagctgcgttgccgcggacgggcgggattatccgctatccggtgtatacccacggccaccttgtcggatatttgatttcatttatcacgattgttgcctatacaagcctgatttcgatcgaagtgacggctgtcaggcaatacgtagcctattggtttcccggtttgacgataaaaggttctgaatcgccgacgattatcggctggcttttgcagtttgcgctgctttgtttgttctttttactgaattattggagtgtcaaagcgtttgcgaaatcaaatttaattatttcggtttttaagtattttgttcctttgacaatcatcatcgtgttgatattccattttaaatcggcgaactttgcgggagaatttgcgccgtttggctttggcggggttcagacatccatttcgaccggcggggtgatgttcgcatacctcggtctacatccgatcgtttcggtcgccggcgaagtgaaaaatccgcagcggaacatcccggttgctctgctgatttgcatcattgtttcggcttgcgtctatacgatactgcaagtggtgtttatcggagccataccgactgatatgctaaatgacggatggaaagcgatcggcagggaattttctcttccgtttaaagatatcgcggtgctgctcgggatgggctggcttgccactcttgtcgttctggatgcgattttatcacccggcggaaacggcaatatttttatgaatacaacatcgcgcttggtttatgcatgggcgcggaacggcacattgttcaaaatctttgccaaggtgaataaaccaacgggaattccgcgtccgtcgttgtggctgtcgtttgcgctcgccgttttttggacgcttccgtttccgtcttgggacgcgctcgtcaatgtttgctctgttgccctgatcctctcctatgcgattgctccggtttcagcagcggcgctgaatgtgaatgccaagcagcttaaaaagcctctgcaaatcaaaggaatggctgtcatcgctcctgtctccttcatatttgcgtcgtatatcgtctattggtcagggtggaacaccgtgtcatggctgctcggatcacagcttgtgatgtttgctgtttattgcgcgtgtaaaaaatacgttccgcaggacgatgtttcgtttgcacagcagcttaaatcaagctggtggatcgtcggatattatgtgatgctcctgattttatcgtttctgggctcattcggtaacggccttggcctattgagaacgccggtcgatttaatcttgatcgcgctaggatcgattgcggtattttactgggcgaaatatacggcgctgccaaaggcagtcattgattatgatgagaaaaaagaagaaaccgtttaa

SEQ ID NO: 2079 - DNA, 300 bp, Bacillus licheniformis
atgaacgaattcatccaaaacatgacaggcatgggcgcgatgactgaacaagtcattgccaccgattttttaatctcggcaaaaaccggtgtcaaaaacattgccacagctatcacggaaacatcttctccagaagtgcgcgaaacgcttaagcagtatttaaacgacgcgattgacacccatgaacagatcacaaactatatgatttccaaagggtattaccatcctgcgaatttatctgaacaaattcagattgataccaaagctgccgaaacggctaaagatcttccgcaactgtaa

SEQ ID NO: 2080 - DNA, 201 bp, Bacillus licheniformis
ttgaataatgcgatccatgaaacattggagctgcatgagctgttaatgtttaaaaacctttgtctgacaaagtcatcaacaatgacgggaatggttcaggatcaagagcttcgcgacatcttggagcgtgatgcatcccaaacaaagcatcagatcgagcatttacaaggtctattgtcagtgagaggtgaaaccgtatga

SEQ ID NO: 2081 - DNA, 1260 bp, Bacillus licheniformis
ttgtttatttatacagtccagccgggagattcactatttgtcatcggcgccaagttcggaatttcgattgaccagatccgattggcgaatgggttgatcgcaacaaacattgtccccggacaggctcttttaataccgctttatacatataccgttcagccgggagacagttattacacgattgcccgccggacgtttgtatccgtcgaagcattgcaaaaagcaaatccgtctgtaaccccttccaatatgaggccggggataaaagtgatgattccggaattgccgaaaaaaccgatcactgctttaggatattacacactgagaaacccccggttagaccaggaattgattcataattttgccccatgcgccacgtatctggcattttttgaataccacatttcaagcgacggatcgttaagcgagctgaatgattcaccggccgtacaaacggcttggagacggcgcgttcctcccctcatgacagtcaccaatctaactgaatcaggcttcagtccgtctcttgcgcaccgcgtattaaatcagcctgccgtaagaaatcgcctcatcgacaatattgtccaaacgatttccagaaaaggatattcaggcgtcaatattgatttcgaacagattttggaggaagacagagatttattttcaggttttctccgcctgttgaaagagcggctgaagccgtccggctatgtgttgacgattgccgttccgccgaaaacaaatgaaaatatcgcctggctgaaagggtatgactatggcggaatcggcgcagtgagcgaccttatcttcatcatggcatacgactggcaccacgggacaagcgagcccggccccattgctccgatcaatgaagtccggcaaacaattcaatttgctctccgccatgtccccaaagaaaaaatcgttctcggctttccgctttacggctataactggaccctgccctatcagcccggtgccgtataccccggaatcgccaaccaagacgccgttcagctcgccatgaagcaccaggcaccgattcaatatgatacaaattctgagtccccttttttcagatacaccgatgaacagggcagacggcatgtcgtatggtttgaagacgcacgcagcatcggaaaaaaactgcagctgatcaccgaatacggacttgacggcggcggcgtctggcagctcacactcagttttccgcaaggaacatggctcttgaccaaattctttcgcgtccgaaaagtctga

SEQ ID NO: 2082 - DNA, 585 bp, Bacillus licheniformis
ttgggaaggagcaaagaatttgataccgctctcgtccttcataaagcgatggaggttttcggccaattcggctatgagggggcgtcgatgcaggagctgctcagccgcctgggaattgccaggcaaagtctgtacaatgcattcgggactaaaagggatctgtttatcgccgcccttacaagatatctagatgataaaaatgcgcaagtgatcgccatgcttgaaagccccggatcagtgaagcaatcggttcggcagatcttccaggaaagcttaaacgttctgaaagaccccgaacgttcaaaggcatgctatatcatcaacagcgcaattgaacaaattccccgcgatccggaggttgccgaatacttcgataagcagacaaagcagttggaaaccgccttttacaaagcgcttgtccgagcacagtcacagggggaactaaagaagggcctccatgatctttcagcagttgcccgttttttgaatcaaacccggctgtcgctcacgtttcaggcgaagttaacgggggattttgatgcccttcaggatctgatcgatgtcagcctgtctattcttgattga

SEQ ID NO: 2083 - DNA, 117 bp, Bacillus licheniformis
atgtcagcctgtctattcttgattgatatattgtttgtcatggggagatgggctgctgcccgtttttatcactattttagactgattggtcaaaaaagaatggaggaaagaaaatga

SEQ ID NO: 2084 - DNA, 420 bp, Bacillus licheniformis
atgacgcgtgcgataaccgatgtgatggaactgtttttgcagtcgatgcttgaaaaggatatggaaaagtggatacagctttgggatcaagatgcggtgtttgagcatccatacgcaccgccgggttttcctaaaaaaatagaaggtaagtccgcgatttacgattatataaaggattttcccgaaaaaatcgatattgtccgctttacagcgccgactattcatcaaacggcaaaatcgggctattcggctgtcgaatttgaatgtgaaggcattgtgtgtgagacgggtcttccttataaccaacagtacatcagccttgtaaaccttaaagcgggcaaaattgtccactacaaagattattggaatcctttgactgtcgtcaaatcgttcggaggacagctgcaaacctttttataa

SEQ ID NO: 2085 - DNA, 864 bp, Bacillus licheniformis
ctgacaaggagtgatgaaagtgggaaaaaaatattgattaccggcggaaccggtacgacagggagccgaatcgccaaaaggctcgtgcatttgggtgccggcgtccggatcgcaagccggagaatacctgcaattaccggagcagaacatgtatattttgactggaatgatcaaacaacttacaaagacgcattaaaaaacacggactcattgtatttggttgcgcctgtcggtgtatacgaaccgtcgccaatcgtactgccttttttggaaatggcatcggcattcggcgtccgccgcattgtcctgctcagcgctgcaattattgatgaagatggaccggttttcgggaagcttcatcacgcggtcaggcgatatgttcctgaatgggcggtgctaaagccttcatatttcatgcagaattttgaccatcagcatggcgcttcgattcgggagaaaaatgaaatcgtcaccgcatcaggcgacggcaaagtcgggtttatagatgcagacgatatcgctgaagtagctgtgcgcgcattgcttgatcaaaagccgcataatacgagccatattttgaccgggccggaagccttgagttatgccgaagccgcggcaatcatcggcagagcggcaggccgcgacatcagacatgtcaatgtcgaagtgtccgcgttgagaacaaggtatataaaggcaggattatctcccgattatgccggcttcatgtcggaattagatgagaaaatcaagaacggcaaagaaaaccgcatcacggatacagtggaacgcatcacgggaaaaaaaccgcgttcactggctgatttcgctaatgaacacgccggacgctggcgtctgttttaa

SEQ ID NO: 2086 - DNA, 306 bp, Bacillus licheniformis
atggagaatgcagaacatttacagcagacggcggttcccgaacagcatacgcatatcccccagtatcagcatcccgaaaccgccttgcaccacattaaatgtccgttgtttccccacttgaaacataagacgttgtgcacagtagcaccttttgttcattacggtttaaatgaagcccaagccacttcctatcaccatgccatggaagaagtagcggcaatggcttatttaatgggcatgggaatgaaccctcacttggcctactgtacagttgagtcatgggaaataaacgaaacattttattaa

SEQ ID NO: 2087 - DNA, 456 bp, Bacillus licheniformis
atggctaaacatcatttttaccttcaggcagactggcctggaaaacgaaacgacatcggaaggattgaaagcgggaatttaaaaaccgaaatttcgataccaaaggaaatggacggcccgggggcggggacaaaccctgacgaaatgctgctcggtgccgctgcgacttgctatatcattacacttgcagcgatgatggaaagaagcggattggaaaaagagagcctgacgatggaatccgaggccgttgtcgatgtgacaggcggggtgtttacgtacgaaaaaatcattcacagacctctgatccgcctcccgaaagaagcggcgcaaaaagaggccgaacttgccgaaagactggctaaaaaagcggagacatcatgcatgatatcaagggcggttcagggcaacgtcgccattgaattagagccgaagattgtcgtctccaaagcggattag

SEQ ID NO: 2088 - DNA, 360 bp, Bacillus licheniformis
atgaaaggcatgatctttttggcggctgccattttgtccgaagtattcggaagcacgatgctgaagctgtcagaaggctttagcgcccccctgcccgcagccggcgtgataatcggttttgcggcttcttttacatttctgagcttttcattaaaaacactgcctttatcagcggcttatgcgacttgggccggcaccggaacggccttgacagctgcaatcgggcattttatatttcaggagccatttaatctcaaaactcttattgggcttactttgatcatcggcggcgtctttctgctcaattcaaagcgcaccgaagcagcggatcaaaaggctcagctcacgatcgaaatctaa

SEQ ID NO: 2089 - DNA, 318 bp, Bacillus licheniformis
atgattgcaggctacatttttcttctgatcgccatcttgtcagaagcggcggcagccgccatgctgaaaatatctgacgggttcgcgcgctggcagccgtcggttcttgtagtaatcggctacggtctcgcattttacatgatgtcgctcacattgcaggtcattccattaagcctctcctatgcgacttggagcggagcgggcaccgttctgactgcaatcatcggcgtcttgtggtttcaagaaaagctgaaccggcgaaatatcgccggcattatctgtctcgtgtcaggcgttgtactgatcaatttgtcataa

SEQ ID NO: 2090 - DNA, 262 bp, Bacillus licheniformis
atgttagtcaggtatcattttattattggagggatttttttatgtatcatttcgaccatgctcctgtatatacgacgacagccagcgaatcattggcaggcctttctttggcggaccttttgggcggccgtttttcggcccgcgtccatttttcggtccgggccccttcttcggaggatttttgggcggccttactgccggagcgcttctcggcccttggggatatccgtatccgccgtatccttactatccttatttctga

SEQ ID NO: 2091 - DNA, 402 bp, Bacillus licheniformis
atgacgctgtatcagtcggattggtcaaaagcgcctccccatgcccacgcctacagggcgagaacaacgactgccgagggacattaccacctaattgagggtttttcccagccggcaaacgggagcaatacagatgggcacgttcatttttattccggaattacttctttcgacgatggtcattaccataggtattatgcgattacggggccagcgattccgcgggcggacggcacgcactatcatgaaatcgagggcacgacctatttggcatattctgcggctcccccggtcagatatggcggagtcgtttatgtaagcgatggaatgaaggaaaggcaccggcatccttttaagggttacacaagagaaatcgtcggaaatgagccgattggctggtga

SEQ ID NO: 2092 - DNA, 945 bp, Bacillus licheniformis
gtgaataaaacgaagccgccggtcatcgttttgatcggaccgaccgctgtcggtaaaacaaaattaagcgtcatgctggccgagcgtttgaacgcggaaattatcagcggagactcaatgcagatttacaaaagaatggatatcggcacagcaaaaatcagagaagaggaaatgaacggggttccgcatcatctgatcgatattaaagaaccgacggaatctttctcggtagctgaatatcaggagatcgtcagacaaaaaattgcagagattgacaggcgagggaagcttccgatgattgtcgggggaaccgggctctatatccagtctgttctttacgactattcattcacagaggaagcaggcgatcctgagttccgggcggagatggaggcgttctctgcgaagaggggggccgaatatgttcatgatcttttgaaagaacgcgatcccgaagcggcaagagccattcatccaaacaataaacgaagggtcatcagggcgcttgaaatcctgcatacaacaggaaaaacgatgtccgaacatatggaaggacagcggaaagagcttttatacacgacggctctcatcggtttgacgatggagcgggaagtgctctatgacaggatcaacagccgcgttgaccagatgatggatgaggggctgctggatgaagtgaaactgctttatgatgaaaacgtaagaaactgccagtctgtccaggcgatcggctacaaagagctttatgcgcatctcgaaggcagagcgtccttggaagaggcggttgagacattgaagcggaattcgagacgctacgccaaaaggcagctgacatggtttagaaatcaaatggatgtcgcatggtttgacatgacgccccctgtcaatatcgagcagaaaaaacaggaaattttcacttacatagcaggaaagctcgaactttaa

SEQ ID NO: 2093 - DNA, 222 bp, Bacillus licheniformis
atgaaatcgataaatattcaagatcagtttttgaatcagattcggaaagaaaatacatttgtcacggtctttttactgaatggatttcagctgcgcggacaagtaaaaggatttgacaactttacagtgttgattgaatcggaaggaaagcagcagctcatatacaaacacgccatttctacgtttgcaccgcaaaaaaacgttcagctcgaactggaatag

SEQ ID NO: 2094 - DNA, 210 bp, Bacillus licheniformis
ttgcatggttttttcagattgcctgacaaaatcctgaaacaggttactgttttgggatttttcgttttcagggcgactttacaatcacctgcggccgttgccggtctttcagaggaaaaaaactttggcaacctgtctaagacgccgccgtcatcacgtcctgtgaaagtccgaggcattcaaatttacaaagcggcatctagtcgctaa

SEQ ID NO: 2095 - DNA, 213 bp, Bacillus licheniformis
atgaaacctaagatcgtcatcaaccattgggaagagacgtgtgaagatgattcctgctatgaatacggcacaagtattctcgtaaacggaaaagagcttgtcagggaagcgtcgatcatgacggctgttcagtcggttcttaaggaactcggcatcgaagccgatattaaagaggtatgcgagaacaagtgctgtgacgcttacaaaaaataa

SEQ ID NO: 2096 - DNA, 396 bp, Bacillus licheniformis
atgattcagatcgtatttgattcaaaaacgggaaacgttcagcgctttgtggataagacgccttttcgcaataaacggaaagtcagcacagaggagtatctagacgaaccgtttgttttgatcacgtacacgacagggtttggggaagttccgaaaacgactgagatgtttcttgagaaaaacgcccatcttcttttgggagttgcggcaagcggaaacagagtgtggggagacaattttgcgaaaagcgcagaaaaaatctcgaagcagtatcaggttccgattctcggcaaatttgagctcagcgggacggccaaagacgttgaactgtttactcaggaggtagaaagagttgtcacaaaatcaagtgccaaaatggatccagttaaacaatga

SEQ ID NO: 2097 - DNA, 2103 bp, Bacillus licheniformis
ttgtcacaaaatcaagtgccaaaatggatccagttaaacaatgagatcatgatccaaaaagacgggaaattccagtttgataaagataaagaagctgtacatagttattttgtagactatatcaaccaaaatacggtatttttccatgatctgaaagagaaaatcgattacttaatcaagaatgactactatgaagaagagtttttaagccgctacacgtttgaagaaatcaaagaagtgttcaaagaggcttacgccaaaaaattcagattcccgtcctttatgagcgcttttaagttttacaatgattatgcgctgaagacaaacgacaagaaaaaaattcttgaacgctatgaagacagaatctctatcgtagctttattttttgcaaacggggataaggagaaggcgaaggaattcgtcagaatgatgatcaaccaggagtatcagccgagcacgccgacgttcttaaatgccggccgcaaacgccgcggagagctggtcagctgtttcctcttggaagtcaatgattccttgaacgacatttcgagagcgattgacatttcgatgcagctgtcaaagctcggcggaggcgtatctttaaacctttcaaaactgcgtgcgaaaggcgaagcgatcaaagatgtcgaaaacgcgacaaaaggtgtcgtcggcgtgatgaagcttcttgacaacgcattccgctacgctgaccaaatggggcaaagacaaggctcaggcgctgcgtacttaaacattttccaccgcgacatcaacgatttcctcgatacgaagaagatttcggctgacgaggatgtccgggtgaaaacattgtccatcggggttgtcattccagataaattcatcgagcttgcaagagaggataaagcggcatacgtcttctatccgcacaccgtttataaagcgtacggcgagcacctcgacgaaatggatatgaacgagatgtacgaccggcttgtggaagatccgcgcgtcaaaaaagaaaaaatccacccgcgcaagatgctcgaaaagcttgcgatgttaagatcggaatccgggtatccgtacattatgttccaggacaacgtcaacaacgtgcatgcgaacaatcatatttcaaaagttaaattttccaacctttgctcggaggttctgcaggcttcacaagtttcatcatacacagactacggtcaagaagatgagatcggccttgacatctcctgcaaccttggttcattgaacattttgaacgtcatgaaaaacaaatcgctcgagcagacagttaagcttgcaaccgattcgctgacgcacgtttctgaaacgacaaacattacaaacgcaccggctgtcaaaaaagcgaacaaagcgatgaaatccatcgggctcggagcgatgaacctgcacggattcttggcacagaacaatatcgcctacgaaagtgaggaagcgagggacttcgcgaacactttctttatgatgatgaacttctactcgattgaacgatccgccgaaatcgccaaagaaaaaggtgggacgtaccatgggtacgaaggttcagcttacgcaacgggtgaatacttcgaaaagtatgttacacaagatttctcgcctaaattcgaaaaagtggccaagctttttgaaggcatgcacatcccgacaaaagaagactggaagcagctgaaacagtttgtcaaagaacacggattgtaccacagctaccggctgtgcatcgcaccgaccggatccatttcatatgtacagtcaagcacagcatcggttatgccgatcatggagcggattgaagaaagaacatacggcaactccaagacgtattatccaatgcctggacttgcgccgagcaactggttctactataaggaagcgtatgatatggacatgttcagggttgtcgacatgatctcgacgattcagcagcacgttgaccaaggcataagctttacattgttcctgaaagatacaatgacgacacgcgatttgaaccggatcgatctttatgcccaccataaaggaatcaaaacactttactatgcaagaacgaaggatacagggcaagaaggctgcctttcttgtgtcgtttga

SEQ ID NO: 2098 - DNA, 978 bp, Bacillus licheniformis
gtgacgaaaatttacgatgcagcaaactggtcaaagcatgaagatgattttacccaaatgttttacaaccaaaatgtaaagcagttttggcttccggaagagattgcgcttaatggagatcttctgacatggaagtacttgggtaaaaatgaacaggacacatacatgaaggtgctcgcggggctgacgcttctcgatacagagcaggggaacacgggaatgccccttgttgctgagcatgtggaagggcatcagcgcaaagcggtgctgaatttcatggcgatgatggaaaacgcggtccacgccaagtcctattcaaacattttcatgacgctggccccgacagagacgatcaacgaagtctttgaatgggtcaaacaaaacaaatacctgcagaaaaaagctcagatcattgtcgggctctatgaaaaaatccgccagggcgataaaatctcgctgtttaaagcgatggtcgcatccgtttatttagaaagcttcctgttctacagcggcttctactacccgctttatttttacggacagggcaagctgatgcaaagcggcgaaatcatcaacctgatcttgcgtgatgaagcgattcacggcgtctatgtcggcctgctcgctcaggagatttacaatcagcagacgccggagaaaaaagaagagctgtatgcattttccattgatctattgaaagagctttatgaaaatgagcttgaatatacagaagacctgtacgatcaagtcggcctttcacacgacgtgaagaagttcatccgctacaatgccaacaaagcgctgatgaaccttggctttgaagcttattttgaagaagaagagatcaatccgatcgtgttgaacgggttgaatacgaaaacgaagtcacacgacttcttctcaatgaaagggaacggctacaaaaaagcaacagttgaaccgttaaaagacgacgacttttactttgacgataattaa

SEQ ID NO: 2099 - DNA, 618 bp, Bacillus licheniformis
atgggaaaaatggacgaaatgattctcgtggtcccgcgggaaaacgtatttgcaaatgaaacgctgaccttccaaggcgtcaacagcgacggtgagacgatcgggaagatcatggcgcatattgaacgccacttcagtgaaatgagaaggggagacgccgaggaagatcctgcatttaaacagccgatcccttatgttgtcatcaaaagagaagacgaaatatttgtatatgagcggctcgaaggcggaggggaagcgcggcttcacaacaagctgtcactcggcttcggcggacacatgaactttgccgaagggcttgactttcccgatattctgaagttgaatacagaccgcgaacttgatgaagagcttctaatcgaggaatcagctaaagaaaaaatggtgacgctcggactgattaatgatgatgaaaacagcgtcgggaaagtacatatcggaatcctttcagcgcttgaattaaaaccgggcgcacacgttgaagtcaaagaaaaggagcagattgccggccgttggatgaaagccagtgatctgaaagaaaaaagcgtctatgacagacttgaatcttggtcacagtttgtcgttgatatcttagtttaa

SEQ ID NO: 2100 - DNA, 801 bp, Bacillus licheniformis
atgaaggagccataccgcatgcagctcgagtcttttcaaatgacaattttatctgatggagcatttcgggtttcaagggacttttttttggcgggaggagactccaaggaaacagaacgttatcctgaagaatttgaagcagcgctgaactttgcctgtctggagacgaacggcaaacggatactgattgatacgggatttggggaaacaggcggacaagaaagcgggcacttgcttcatcacctgaagcaggcgggaatcaagcctgactcgatagactatgtcattttgtcacacagtcatttagatcacacgggaggtcttctaaaaaacggagagcccgcttttccaaacgctgttcatctgctcagtgaagcagaatggctgtacgcaaaacaaacgccggcgtctcctcagtttcacattctctccgctgtccggccgcttctgaagctgctgacagaagacaccgaactgcttcccggactgaagctgatccatacgcccggtcatacgcctggacacctgaccattgaattgcatacaaaagacggcgtctgtcagatcatcaatgatgtatttcatattccggaaagtatctccaatccgaagctgcgggtttcgcttgagcatgatcctatcgagggagaaaagacaaggagactgctggcccggcaggcttataacggacagttcctgctccacggctgtcatttcccatatcccggcttcgggctgatcgaaaagcatggctcattttttcaatggaaaccggttctatacgaaaagaaaactcgctga

SEQ ID NO: 2101 - DNA, 432 bp, Bacillus licheniformis
atgccgacactggaagagctgtatcggtccgtcattatggatcatgcgagatacagacggaactttcgaaaaatcgataaacgcgatgcgtattacgtccattacaaaaatccaacatgcggtgatgtgatgactttgtttatcgacattaaaaatgaaaagatcgaagacgcagcttttatcggagatgggtgcgacatcagcatggcttcctcatcaatcatgactgaactgataaaaggaaagacgttaaaagaagccggactcatgcgggaggcgatggaaggtatgatcaggaaaggagaagaaccggcagatgatctcataggcgatgccgtttccctgatgggggttcatccattgcgggcccgccataactgtgctcttatgccgtggcaggctttcgatcagatcaaggagaacgttcattaa

SEQ ID NO: 2102 - DNA, 454 bp, Bacillus licheniformis
atggaaataaaaacgaaggtaaagcaggaagcgatggcgcagcttaaacggaaaggcattcgaattacgccgcagcggctggccatctaccattattttttagcggacaggaaccatcccacaatagctgacatccaacagccgcctgagggaagtctatcctgccgtcagtacagcgacgatatacaacaccatccgctattttaagcaacagggccttataaaagaaatggggtttacatatccgcttcgctttgatttagctgaagaggaacatgatcgtgtcatatgcgaagtatgcggaaaaatcgtcgattttcattgtccgcaacttgagaaagtgaaagacaatgcggcgcggaagaccggatttaaagtaacacatcaccgattggagctgtacggcatctgtaaagattgcagacgaaaagaagatgcagaagaggttagatga

SEQ ID NO: 2103 - DNA, 723 bp, Bacillus licheniformis
atgaaatctaacctctttttgcttgtgcgaaaaaccaaaaaccgatatattggttttatgatgaagaataacattaaacgaatcaaacgaatttcgcttcgggaagaagtgtatcaaacgctgaagcgcgccatcgtacatttggagctaaagccggaggagcgcctgcatgaccaggagcttgcagagcagtttggcatcagccgcacacctgtcagggaggcgctcaaacgactggaagatgaaggccttgttgaagctgtcccgggatcggcaacacgtgtatcaccgttaaatcgcgaggaggctgaacacgcttttacagtcactgcggcgctgcatgcgctggctgtcagactgtcgcttccttttttaacggattccgactttgatcagctggaggcgcataacaaaacgttgcagcaagcgattcaaaaagaagacattatcgaagcaatcgaatcagatgctgcttttcatgacgtgtttttacaagcatcaaaaaacccggaaataacccgggcattggaaaggatttcttcaaaaatttaccgccttgaaatgtcgcagttttcctcgatcggcagcttgaaatctgttgaacagcaccagagcatcatcgatgcctgcagacggggggatcgggatgcggccatcaggcttgccgaggaaaactggctcagtctcggagatcgattggccggacatcaggaaaaggagtga

SEQ ID NO: 2104 - DNA, 969 bp, Bacillus licheniformis
gtgaggccgattatactgggcgtttttgcagccttcttttttgcttttacattcgttttaaacagggcgatggagcttgaagggggaagctggatctggagcgcatcgctgagatttatctttatggcgcctcttttatttgccattgtttggctgagggggaatgtgaaagagctttttcaggaaattaaaaaagcgccgggcatttgggtgagatggagcatcatcggcttcggtctcttttatgcgccgctctgttttgcggcggcttacgggccgggctggctgatcgcgggaacatggcaaatcacgattatttccggctcccttttggcgccgcttttttacgaaaccatccaaacaaaaacaggtcccgtacagatgaggggcaaaattccctataaggggctcacgatgtcgttcatcattttaatcggggtggcgctgatgcaggctgagcatgcggcacagctttctttgcacgagatgctgctgtacgtcgcgccggttatgttggcttcatttgcatatccgcttgggaacagaaaaatgatggaagcatgcgccgggcgccttgatgcttatcagcgggtattggggatgacgctggcaagccttccgttttggctgatcctctcgctgtacgggctggcatcggcgggtgcgcccagccggggacaagtcattcagtcaggtttggtggctgtcttttccggaatatgcgcaactgtgctgttctttgccgcaaccgatcttgtaaaaggggatatgcgaaaattaggggctgtcgaggccacacaatcgtttgaagtgctgtttgcagccgctggtgaaattttaatcctatcgagtccgcttcccggtgccatctcatggagcggaatggctcttgtgattatcggaatggtgttgaacagccatgcatcgaatcaaaagccggcggttcaaagtaaagctgcaaaagcatga

SEQ ID NO: 2105 - DNA, 762 bp, Bacillus licheniformis
gtggtaaaaatttttatcgatcccggccatggcgggactgatccaggcgcttcagccaatggtttgcaagaaaaacagttaacattgcaaatcgccttggctttaagaaacattcttctgaatgaatatcaaaatgttacagtccagctgagccggacaagcgaccaaaccgtcagtctgacgcaacgcacgaacgccgcgaacagctggggggcggactactttctatcgattcacatcaatgccgggggcgggacaggtttcgaggattacatttatcccggcgtcggcgcacctaccaccacctatcgggatatcatgcatgaagagattttaaaagtggttgatttcagggatcgcggcaagaaaacagccaattttcacgtgctaagggaaacagcaatgccagcactgcttacggaaaatggctttgtagacaatacaagcgacgccgagaaactgaagtcatccgcgtttattcaatccattgcgagaggccacgccaacggactggcaagggcatttaacctttcaaaaaaatccacagccctttttaaagtgcaaatcggcgctttcagggacaaagccaacgccgattcacttgccgctcaagcgaaagcaaaagggtttgatgccattgtaattgacagggacagcctttacaaagtgcaaattggcgccttttcttcgaaagagaatgcagaagcgctcgttcagcaagccaaaaacgccggatttgacgctttcatttaccaggaatag

SEQ ID NO: 2106 - DNA, 135 bp, Bacillus licheniformis
ttgcatcttctgccggctggcattcacgcattaatttcatattacgcaattcgctttaaaatgaataaaaaggcggaaaccgccctttatttcaaatttcacagcaatttagtttacataaaatttttattgtaa

SEQ ID NO: 2107 - DNA, 483 bp, Bacillus licheniformis
atgaaaaacaaatctatgtacgtttttcttttcatgatgctcgggctttttgccggaatggcattcccgattcaaacatccattaattcagagctgagaaatgctatccactcaccttttatcgcttctctgatttcgtttttggtgggaatgctcgttcttctttttcttacatcgttcattgagcatcggcggttatttttaaacaatttacaaacagcaaaaacctttgtcacaagcagtccgtggtggctctggacaggcggaatactcggcgtcgtctttattacgtccaatattttgcttttgccgattgtcggagcgtctcttactgttgttttggctttaagcggccaaatgatcatcgccctcgtcatcgatcattttgggtggttcggaatccccaaacaccgcttgaacgtccagcgcattctaggaatcgtcctgatgatcacaggaattatgatcattcagcatttttga

SEQ ID NO: 2108 - DNA, 453 bp, Bacillus licheniformis
atgatgatcattttaatactgatagccggcattttggccggaatggccattcccgttcaaacctcaattaattcacggctgggcatgaaaatcgggtcaccttacggggcggcggccatttctttttttgtcgggacgcttctcctgctcattgtcgccttagtgacagagcgccattttttgtctatcatcggacttgttccttctattccctggtggatcctcattggaggcggatgtttaggcgttttttatttaacttcaaatattttgttgcttccgcgtcttggatcagctctgacggttgtcgtcactctgcttgggcagatgatcatggctctggcgatcgatcacttcggatggtttcacgtacccgttcatgaattaaactttcctagaatcatcggcattttattcattatttccggagttttcatcatcaaaaaatattaa

SEQ ID NO: 2109 - DNA, 240 bp, Bacillus licheniformis
ttgaatttcaatgtgcaggatgcaatggcaaaggtcgcaaaagaaaagacaaaagtgagctttacaatgactgggataccaaaggtttttgtatggcggatcgtaaaaatcaaagttattgtcccacttggctgttctaccgatttgcgctatttaatacataagggggcactctcaacattaagccgcagaggggatcacaataagcaatcttttcatcaatcaacacttgcatcatga

SEQ ID NO: 2110 - DNA, 186 bp, Bacillus licheniformis
ttgatttttacgatccgccatacaaaaacctttggtatcccagtcattgtaaagctcacttttgtcttttcttttgcgacctttgccattgcatcctgcacattgaaattcaaagccaatactttcctcaacagccgctttatttctacatatcatttctatatttgtataaaaaatcaagtttga

SEQ ID NO: 2111 - DNA, 204 bp, Bacillus licheniformis
gtgttcaacgaaagagaggcgctccgattaagactggagcaactgaacaatgccgagattcagatcatacgcgaactccaaagtgagcggaaagacatttattccaggctgcggaaattagatcgtcaaaaagtttcttcatcacatcataaaaaaactttattagagttagtcgatgaaactgtaaatctcttgaaaaaatag

SEQ ID NO: 2112 - DNA, 624 bp, Bacillus licheniformis
atggggaatacagacacaagagaggaattgctacatatcgcgcttgagctttttgctacgaaaggataccacgcggcaaaaatttcagatatcgtaaaacaggctggcgttgcacagggaaccttttactggcacttcaaaagcaaagaagaaatcgccaaggaaatcataggcagagggaaagataaccttctcgcagccattcatcaaggatacaggcaaacgtttgctcttgccgatgatatgatccaatccacgacagcgcttatgaaaagaatttttacgtttgcacaggagaatagaaacttaatgacatttttattagtcaagggacaaggcgccgatccggaaatcagggaggcaatcgaagaggcgctgatcagtgttgaacaggcatttaaaaagaacattcaaagggctacagaacttggaatgctaaattcctcccataacactgatctgcaggccaccatgttaacaagtcttgtgttgggcacactatcaaaatggctttttgggccaaagcatgatctgaattatgttcctaagttttcagttgatgaaatgactgaagaattggttcattttgaatttttcggactgattggccaaagggggaattaa

SEQ ID NO: 2113 - DNA, 387 bp, Bacillus licheniformis
ttgtctactattcaaaaaacaaatggagagtttgggatttttcatgaagccggtatgcaggcgaaagggtctttcactccgaattcagacggactttcaccgattgagctgttggaagcttcattaggtatgtgcatcaccatttctttgcaaaagatgtttgaaagggatggtatagaggtgctggaggatgagttttccgtttctgtttccgccgctaaagcccccgaaggcccgtcccgtgttgaaaaatgttcggttagcgttaaattgcctgagcatcttccgaccgactataaaaagaaactaatcacctctgctgaaagggcatgtacaatcggcaatacgttaaagcgaggggtaacgattgatacgaatatggtgtaa

SEQ ID NO: 2114 - DNA, 1350 bp, Bacillus licheniformis
atggaaaacaacagtaaaaaaccttcctatacaaacgctgatgattttgctgttacatcagtccctgaaaataaaagaaaatcgatttttaacattacgattacaagctgtgcctggatcatctcattgtcgacgattgtgactggaggggcattaatccagggattgaattttgcacatgccgttttagcagctgtcttaggcatgctgattcttgcggtatatggcttttttcaaggagtaatgggtgcgaaatacggaatatcgactaccgttcttgcccgtcaggcctttggtcgctacggatcgagcctttttggaattgtcttggcgctgacgcttggaatcggctggttcggctggcaggttgctttctttggcacgaccatttccgaaatgtttccgggtgtttggcttgcaaagcctgaggtcgccatcgtttggggcggcattttaatgatccttaccgcgtttataggatatcgcgggcttgccgctttaagctttatcgctgtacctttagtcgtcattttttccatatggggaatcataagtgctgtcaattactcaggaagctggcataacttgctgacatttcacccgacaggggatcctctgacgatatttgccggaattacaattgtcgttggaaatgctgcattgggcgcagttgtttttcctgatgtgacgagatatgcaaaaggagcggtttcaggaggaataggcgcttctgtaggttatttccttggaggagtgttctgtcttgttgcgggagcggcaatggcgattgccgcgaatgttccggatatcgggtcaacaccgaatattcctgccgctatgagcaagcttggcctgggctttttagcatttttaatcatcgtttttgcacaatggacgacaaacgataacaatttgtataccggttcgctagggcttcgcaatgttgtgaacattcctaagaaagcacttgtggcgatcatgggcgtgatcggaattatcattgcattactaggtgtccaaaatatgtttgtgccatttttaacattcttaggcttgtatgttccgccgattgcgggagtcatgatcgccgatcattggatcacagcacctgtcatcaagaaaaaacaatatcaattcggggctggaacaacttattcgaagctgaatgttgcggcgattctttcggtgatcatcggaggttttaccgcttcaaagataacgttcggcatcgggccgattaactctactatacttgcatttttgatttatatcatctttacgtttattttcacaaaattaaatctccgttacgaaatcggagaagcgacagaggaatcgtctggtttttaa

SEQ ID NO: 2115 - DNA, 2106 bp, Bacillus licheniformis
atgatgaatgaaaaaaaccaatgggtatttggaattgatgtcggcgggacgtttacagatttagtggcagtcaacaaggacggaaaaatggtttcgacgaagacgccttcaaccccagaccagtctgatggtgtcatgaacggaattaaaaaaatggctgaaatcatcggaatagacgtaaaggatctattagccaatagtccattggttgtccatggaacaacagttgccactaacgccttgctggaatataacggagcaaaggtggggcttctcacaacggaaggctttcgggacgaaatcgaattccgccgcgcgtataaagaaagcgtgttttctccgcgcttggaagctccttatcaaattgtcccaagaaggtatcgtgtggggattcctgaacgactggatcatacaggaaatgtcgtaactaagcttgatgaagaagccgtccgccgggcagtccgcgggtttatccaagagggggtcgaagccgttgctgtctgctttctgttcagcttcatgaatccttcacatgaaatccgtgtcaaagagattattcaagaggaagctcccggcatgtttgtatcgttatcgtatgaagtgctgccgcagattcgggaatttgaacgggtgagcacgaccattgtcaatgcgtttaccggcccttccatgcaaagctacttaaaccatcttgacgaacggcttcgcgaagacggatttactggagaactgtttgttatgcaatcaaacggcggggtccaaaatgtcattcaaagcgggaaatttgccgcgggtggccttttgtcaggtccagccggaggagtgacggctgcttcctttatcggggaaaaatcgggctacgagaacgtcattaccgtagacatgggcggaacaagctatgatgtctcggttatcgaaaaattaaatccggcgatcacgacggaaaattggatcagcagatacagggttgccttgccgatgatggatatccatacgatcggctccggcggcggaagcatcgcctggattgacagcggcggagctttacaagtcggcccgcgaagcgcaggctcaaatccggggccggcctgctacggaaggggcggagaagaaccgactgttacagacgtgaatgtcttcttaggctatatcaaccctgataacttccttggcggagaaatgaagcttgaccgttcgctggctgaaaaagccattcgtacacgaattgccgaaccgctcggaatttcgacagtggaagccgcgcttgcaatctcacaaatcgtcaatagtgatatgtcaaatgcagtccactttgtaacgacacagcgaggccatgatccaaggaacttcgccctgatggctgtcggcggcgccggagccatccatgcaggcaagcaggcggaagacctgggcattaaaaccgttatcgttccgtcccttgctccggtcttttgtgcgctcggcgatgtggcggcaaaccttaaagtaacggagctcaggacgcgctttgaaagtttgaaaaacgttgacctgcaagcgatgaacgccgattttgaaaagatggaacagacggcccgcgaaaaacttggaggccaatcggtcaccaatcaatatgaaacgcgccgctttatcgatatgcgctacgcgggggaagtccatgaagtaaccgtaccggtgaagtcaaggacgcgaaggattacagagttgaatcttgaagcaacggcggcagatttccatgaccttcatgaaagaatgtttgcccataaagaccctgagcacgacattgaaatcttaaacctccgtcttgatctggtgggagtcagagagccgttaaagcttaaggaggagcagtttgaacaagaggatccttcaaaagcgaaaacaggtgaacgcgatatgtattttgacatcgaaccggcgaaaacgcctattttcaacgggtcaatgcttgagccgggcaacctgattgtcggtcctgccatcattgagcaatggggtacgaccattgttgtttacccgggacatgaggctctaatcgattcataccgcaactgtgtcatcgaagtaaagcatgctcaacaggcgacaagaggtggaaatgcatga

SEQ ID NO: 2116 - DNA, 1479 bp, Bacillus licheniformis
atgatccaagctcaaattctttatagaaagctgcaagcgatcggcagagaagtcggggataatttgcagcgaatctcccgttctcctgtgctttcgcaagaccgggcatttgctgcagcgatttttacgaatgagctgaaaatcgcggttcaacatcaatacgagcctgaacatttgttcgcattaaaagaaagtgtcgaaaatctgttcgactatttttcgtttgatatcgcagatggagatgtgctgctggtcgcagatccatacagcggcggaacgaaagggcagtcgctcaccatggcggcgccgctattccttgaaggggagctcgtactcttccccgctatccgcgctcagatgattgatttggccggcgagtatccggggggcttccatcccgatgcatttgaagtatggcaggaaaatatcagaattactccggttaagctttataaacaaggagttctgcagactgatattcttcgttttttattatcaaacagccgggtgcccgcttcttttaaagcggatcttgaagccatgtatacatgtttgcatggtgccaaacagcaattgaaaacgtttcttggcagctacggtcaaaaaacagtggccgcatcgatcaaaagcatgtttgaatacagccaaaaaagggttgagcatcatgtctctcatctgcctgaaacagaaatgagcgctgtccaggagtttgaagttaccaaagggcacaagagtacaattcatgtgcaaatttcaaagaaggagaatgcggttgagatcgatttgagcggatcgtcagagcagtccgtaaagccggttaattcacctgccgctttaacgaaggcgtttgccgtttggccgtttcttgcaaggattgccgatgaaataccgatcaatgaaggaacgcttcaaccttttcaaacgaagacgaggccgggaacgattctagatccggaatttccggcagctacagcactagctccaagcattaccggacatttcgtcgctgcagcggtatttaaagccattcaaaacggacaaggcacaagtgaagaatttccgccgatttatgggccaggtccgcaggccgttttttatccggagcttggcacaggagccgaaacaaaatcaatcgttctcgcacccgggtatccttcagcttcaaaaggcttcggaccgcctgctttatttggccaacggatgcttgtctctgcggaggaattggagctttaccacggttttaaaatggtttcccgggagtggacggacaatggggaggaaatggaagtgtccctgcttaaccaggaggacgatatttatttcaaccttcttctgccttttagcgaaaggggaaaatacgggtctctgtcaagaacgggagaccatgacgaaaccttttatgaaagcacggtacaccaacatgtgaaaaaaggcgacctcctcgtctttacgtactctcaaaaggaggagcagctatga

SEQ ID NO: 2117 - DNA, 1740 bp, Bacillus licheniformis
atgatcaatcaggactttatcttatcacaggtggtcggcggttctcttgatgcggttgccagggaaatgagcgccactgtcacgagaacggcccgttcaccattgtttaacgaagcgcatgattttacgacgggcgtctttgacctttccggcaaaaaatcgcgccttgtcgcgcaggcccccggctgtacgcttcacctttatgcggtcgtaggcgcagtggaccatctattggacgcctttcggtatgatcttcaccccggggatattctcctggtgaatgatccgtatcatggaggctcgcacagccttgactggacgatcgtcatgcctgttttttataatcgcaagccgatcctgcttcctgctgtacgaagccatatggccgataatggcggtccggttgccggagggtacaatccgcgctcaaaagacatttggcatgacgggctgcggattccgccgttaaaaatttatgagcggggagaaaagcgaagggatgtattcgatttaatcgttgcaaacaaccggctttcacattggcttgaaggcgacttaaatgcgatgatcggggcgtgcaaggtcgctgcctcccgaatccagacgatgctggataagtatggcgccgagaaggtgattacagccattgacaaccggattcaatatacagaaaacagggttcgcgatgaaatcagcagctggccggacggcacctatgtcggtgaaacattcgctgatcacgactttcaaggcaaccgcgatattaaggttcgcgcaacggtgaccgtcaaaggcagcgatcttcacattgactttaccggttcatccccgcaagtaaaaggcttcatcaacagcccgctctcaaatacgacttcgtttgcttttgtcggtatttcgacttgctgtgatgaggatattccgatcaatgaaggatatatgaatccggtaacagtaaccgcgcctataggaacagttgtgaacccgcagctgccggcaccgtgcggacacgcgactgcgtgcgtcggagcagaaatagccgaggctgttcttcaggccatttcacaatgtgcgccaaaacgggtcggagtgaacgcccataagcttcctctcgcctattctcacggaaaatacgatgacggcaagccgtgggtgaatctgaatttttacggctataccggcggtgcgggagctgcatacgaaacggacggatgggggctttatcctcctgttatgacaggagttattcttccatctattgaaatgaccgaagttcaatacccgagccgtgtattaaagcatgaatatacaagcgattttacgggtgcgggccgatggagaggcacacccgggttggatgttcaaatccagcacttaaaggaaagccgcacaagcgtcatgatggcagggggccgaaacacaacaaaaggcttctgcggagccggcgattcaccaagcaacaaggtgattgtcgggtatggaacagacgaagccagagaaatcgatgaaacggcttttgaagtcaaaatgcctgcgggcggcatcatccaattttaccgtgcaggcggcggaggctggggaaatccgctggaacgtgaaccggaaaaggtgctggacgacgtcttaaacgagtttgtcagcattgaatcagcattgcaggattatggtgtcgtgattgaccctgagacacttgccattaacgaagctgaaacaaaacgtgtgcgggcatccaggcttccataa

SEQ ID NO: 2118 - DNA, 435 bp, Bacillus licheniformis
atgaaaaacaaaaaagcgttttggggaccttttctgttcggcgtcggcatcatcgccatgatcgacggcatcatctttcatcaattgcttcaatggcacagcgtgtacatggacacagaccgctctcaccaaattatgagcgacggactgttccatctgttttcgctcgtcatccttttcatcggcggaatcctgctgtggaacaggggcgaacttggcagcagccggccgcagcacatcttttggggagcctctttgcttggggcgggctggtttaacttccttgaaggcatcatcaaccatcatcttcttcagattcaccacgtcaaccagctaagcccgaaccgcctcttattcgactttgcttatgacgcatcgggccttttgatcattctggccggatggctgatctaccgaaaaggcaaacagggataa

SEQ ID NO: 2119 - DNA, 126 bp, Bacillus licheniformis
ttgtccgcacagctacctgaatacaataagaaaatatttctcgggaaagcgcaggtttcaacaagacctgccctgtttttgtcaaaatttgaagaaataaaaaacccccattttaaaaagatgtga

SEQ ID NO: 2120 - DNA, 114 bp, Bacillus licheniformis
atgtccgttaaacgatatgaacaccttttttccactgaatatctttttttaatcccctttttgcttgaagtgaacagctgcactttgccgcattttaaaaacttgtttacataa

SEQ ID NO: 2121 - DNA, 171 bp, Bacillus licheniformis
atgttaagtgtgctgctgcctaatttgcttatattttctgctatcattttatttttatattacatgatcgtattggtaaaggaaaacaagataaatcgtaaacaaaacgaggaaacccaacagttgcttagggagatattaaaggaagtaaaaaataaagattcaaagtaa

SEQ ID NO: 2122 - DNA, 342 bp, Bacillus licheniformis
ttggataagaaagatattaagttcctcgaggagctgctttataatacagataaagacgatctagtaagagtgacgagaaatattgaaaaccctgtgattcttcaagtttttgcagcgaattataattggaatagtggttttgatgttccaaaagcaattcttgagaatgagaattgcgattatggtacggggttattaatgttccattatgcagatggttatcgtatgctcgaaagcccagacaatgtttcagcatctgctttagaagaatggaaagattttttaatccaaacatatcaaaagcttataaatttgcagtttaaatctcaaaatatatcctga

SEQ ID NO: 2123 - DNA, 195 bp, Bacillus licheniformis
gtgatgaaaaacataagcaaatatgttgtcctgttttttggggtagccctatttttatacttttatgatatgtttatgcctaaaagtgtgctttattttgttgtgggaataccagcattatatattagcacagtccttatcatgaaaactttaaagctacaaaaaatacaaaagattaatccagaattaaaatag

SEQ ID NO: 2124 - DNA, 126 bp, Bacillus licheniformis
atgaatataaaaaaaggaaaaattgaatttttaaaatacatgtataagaagttggattgtgatttttttaaaccacaaaccatatggctgggctgtgattattcaaagattacggttttattctga

SEQ ID NO: 2125 - DNA, 699 bp, Bacillus licheniformis
atggtaaatgtcttaaataatatcttgaaaaatgacagattggatgcatatccattatttaaaaagttttgttccctcaaagaaaaagggttgcgtaagaaatcctttacagcattatcttcctttattgatgaagcaaagaaatgggatgatattgcacaacagaattttgcttgttggctgtttgctttatttgaaacatcagatgatattcaccatgtactcgttcatccattggaaaaggaacttttacagcctttgcttgagagatggatgaagagtgatcctgaagattcaagaccatataggtggtatggggtgtttttaaatcctgaaaaccgtgtcgattatttaaacaatgcacttagacttggtggcgggaatgaacaactatccttattaactctaatcgatattaatttgaacgccctttggtattcatttcatcatatctccgaagatttgtatcttggcgatattaaagaagatacagcacttcttgctaagtcccggcaattaaacaacaaagtagaatgtgaacaaacaaggaaaaacaataacgaagcacttaactattatcaagatctgttggatgactgggtgatgtttaaaaaagaacgatcaaagggatttgttgaatggtgtgaaaataagggtagaacctattattgggtcaaagcttattattacgaaagataa

SEQ ID NO: 2126 - DNA, 963 bp, Bacillus licheniformis
ttggaaagggctgttacttataaaaacaacggacaaatcaatatcatattgaacggtcaaaagcaggttttggccaattcagaggctgaagccgaatatcaggccgcactgcaaaaaaatgaagccaaacacagcattctgaaagaaattgaaagggaaatgaacacgctggtcggaatggaggaaatgaagcgcaatatcaaggaaatctacgcctggattttcgttaataaaaagcgcgaagaacaaggccttaaggccggaaaacaggcgcttcacatgatgttcaaaggaaatccgggaaccggaaaaacgaccgtcgccaggctgatcggcaggcttttttacgaaatgaatgttctctcaaaaggccatctgatcgaggcggagcgcgccgatctcgtcggtgagtacatcggccatacggcgcaaaaaacgagggatttaatcaaaaaagcgatgggcggaatcctgttcatcgatgaagcctattcccttgccagaggcggagagaaagacttcggcaaggaggcaatcgatacattggtcaaacatatggaggataagcgcaacgaattcattttaatcctcgccggatattcgcgggaaatggatcattttctttcattaaacccgggccttcagtcaaggtttccgatcagcatcgattttcccgattactcagtcagccagctgatggacattgcaaaacggatgatggcggaaagggaatatcagttcagccctgaggctgaatggaagctgaaagaccatctgatggccgtcaaaagtacggtcagccccgcgaagttcagcaatggccgtttcgtccgcaacctgatcgaaaaatccatccggtcgcaggcgatgagactgctgatgggagactgctacttaaagaatgacttgataaccatcaaaagccaggatctcgacttgaaggaagacgcgccgcacgtataa

SEQ ID NO: 2127 - DNA, 1263 bp, Bacillus licheniformis
ttgaacgaacaggaagtcatgaaagagaaagccatattagtcggatgccagcttccgcacgtgtctgatgagcgtttttcatactcgatggaagagctcgccgcgctgacgaaaacggccgacggaacggttgtttccacggtcacgcagaagcggaaccgtgtggatgctgctacatatatcggaaaaggaaaagtagatgaattggcggtgctctgtgaagagctgtcgcccgatgttttaatttttaatgatgaattgtcgccgagtcagctgaaagcgcttgtcacaacgcttgacgtgaaaatcatcgaccggacgcagttgatccttgatattttcgccaaacgcgcgaggacaagggaaggaaagctgcaaattgagctggcacagctgcaatacgccctcccgcggttaagcggccagggaatcaacctgtcaaggcaaggcggaggaatcggaacaagaggtccaggggagacaaagcttgaaaccgaccggcgccatatcagaaaccggattcatgaaatcaatgttcagctgtctaccgtcattcgccacagaagcagatacagagaaagaagaaagaaaaacggtgtactgcaaatcgcgcttgtcggctacaccaatgcagggaaatcgacatggtttaacaggcttacagacgccgacagctatgaagaaaaccttttgttcgccacacttgacccgatgacccgcaaaatgatgctcccgagcggatacagcgtgctgctctcggatacagtcgggtttattcaggatctgccgacaactttgatcgcggctttcagatcgacgctcgaagaggtgaaagaagccgatctgattcttcatatgatcgattcttctcacgaagactacgagggccatgaggagacggtcaagcgccttcttgaggaacttgaagcagacgatattcctgttttaaccgtctataacaaaagagaccggaagcggcctgatttcatcccttcttcagggagagggcatatcatgacgagcgccaaaatagacggagacttgccgctgtttaagcaggcggttgaagactatctgaaaaaggagctgctcgttccgtatgacgtgagaattcccgcttcagaaggaaggctgttgtcgagaatcaagtctgagacaatgacgaacagcaccgtttttgacgaagatcgcgaagcatatgaagtggaaggatatattctccctgaccaaaacattttgggagagctgaagaagtatatgtag

SEQ ID NO: 2128 - DNA, 1266 bp, Bacillus licheniformis
atgtttgagacattaaaacacggagatctactaaagaaaacggcggtggaggctgaaaccgacatcgcacagatccacaaaacaattgatgaaatcagtgaacgaaatgagtggagggtgctcgaaagctacagaaagcacaaagtatcggacacgcatttcacaccatcgacaggctacggctacgatgacatcggccgcgatacgctggaaaaaatctatgccgacgtcttcggcggtgaagcggcccttgtcagaccgcagatcatctcgggaacccatgcaatatcaatcgctttattcggcgttctccgcccgggggaagaacttctttacatcactggcaaaccgtacgataccctcgaagagatcgtcggcgtcaggggcgaggaaaactcggggtctttgaaggatttccagatcggatacagccatgtcgagctgacagaagagggagccgttgattttgaccgggtggcagcttccatcacgccgcagacaaaggtcgtcggaatccagcgctcaaaaggatacgcagaccgtccgtcttttacaattgatgagattgagaagatgattcgctttgttaaagaaataaacgaaaacatcatcgttttcgtcgacaactgctacggcgaatttgtagaagagcgtgagccgtgccatgttggagcggatctcatggcaggctcgcttattaaaaacccgggaggcggcctcgccaaaacaggcggctatatcaccggcaaggaaaaatgggtgaaagcctgctcctacagaatgacttcaccgggaattggcagtgaagccggtgcatcgttgtacacgctccaggagatgtatcagggctttttccttgcgccgcatgtcgtctcccaggcattaaaaggagcagtgttcacagcccgattcctcgaaaagctcggctttaggacgaatccttcatggggcagcaagcggaccgatttgatccagtctgtcgaattttccaccccggagcagatgatcgcgttttgccaggcgattcagtacgcttctccgatcaatgcccatgtgacgccgtatccgagctatatgccgggctatgaagacgatgtcattatggctgcaggcactttcgtacagggagcaagcattgaattatcagcggatggccctataagaccgccttatgtggcgtatgtccaaggcggattaacctactcccatgtgaaaaatgcgatatgcagtgctgtggatgcgctcatgaagcagggattaatgtaa

SEQ ID NO: 2129 - DNA, 408 bp, Bacillus licheniformis
atgagtgataaaattcgccgctcaatgcccttatttccgataggtatcgtcatgcagctgactgaactgtccgcaaggcaaattcggtattatgaggaaaatggactggtatttcctgcaagaagcgaagggaacagacgtttattttcattccatgatgtagataagctgctcgaaattaaagatttgatcgaacaaggtgtaaacatggcggggatcaaacaaattttcgccaaaacagaaaacgaacaaaaagaagacaaacaagacaagccgaaaaaagcagagaagcacaacttgtcggatgaagaactgagaaaactgctgaaaaacgagctcatccaagcaggccgtttccaaagagggacgacattccgccagggagacatgtccaggttttttcattaa

SEQ ID NO: 2130 - DNA, 1335 bp, Bacillus licheniformis
atggcaaagtatacaagagacgacattgttaaactagtaaatgaggagaatgtaaaatatattcgccttcagtttacagacattcttggaacgattaaaaacgttgaaattcctgtgagccagctggaaaaagcacttgataataaagtcatgttcgacggctcttcaatcgagggattcgtccgcattgaagaatccgatatgtacttataccctgacttagatacatttgtgattttcccatggaccgccgaaaaaggtaaagtagcccgcttcatctgcgatatttataatccggacggcacgccgtttgaaggtgatccgcgcaacaacttaaaacgcattttgaaagaaatggaagacatgggcttctcagatttcaatcttggaccagagccggaattcttcctgttcaagctagacgaaaaaggcgagcctacgcttgaactgaacgacaaaggcggatatttcgaccttgcgccgactgatcttggcgaaaactgccgccgcgacatcgtacttgagctcgaagaaatgggctttgaaatcgaagcgtctcaccacgaagttgcacctggacagcacgaaatcgacttcaaatacgccggagccatccgcgcttgcgatgacatccaaacgttcaagctcgttgttaaaacaatcgcgcgcaaacacggcctgcacgcaacattcatgccaaaaccgttgttcggcgtaaacggatcaggcatgcactgcaatctatcactcttccgaaacggcgccaacgccttctttgacaaagacgccgatcttcagctgagtgaaacggcaaagcaattcatcgccggcatcgtcaagcacgcaacaagctttacagctgtgacaaacccgactgtcaactcttacaagcgccttgttccaggctatgaagcaccttgctatgtggcatggagcgcgcaaaacagaagcccgttaatccgcatcccggcttcccgcggcatcagcacgcgcgtagaagtcagaagcgtagacccttctgcgaacccgtaccttgccttgagcgtacttcttgcagcaggacttgacggcatcaaaaacaagctggaagcaccggctccgatcgaccgcaacatctatgtcatgacaaaagaagagcgcctcgaaaacggaatcgtcgaccttcctgcgacactcgcagacgctctcgaagaattcaaatcaaacgaagtcatggtcaaagccctcggcgaccatctattcgaacacttcgtcgaagcaaaagaaatcgaatgggatatgttccgcacacaagtccatccttgggagcgcgagcagtatatgtctcagtattaa

SEQ ID NO: 2131 - DNA, 204 bp, Bacillus licheniformis
atgcttgaattggataggaatataaacaaagtaaacggccttaaagaagagcacgcaaagggaatcctgaagattatttgcggaaaactggataatctaaaacacgcgggtgatcaatatacagagaaagaatttgtcgaagatattcgatcgataattgagaactttccagaattagataataaagaagagaataatgaataa

SEQ ID NO: 2132 - DNA, 168 bp, Bacillus licheniformis
atgagtattattattttggcatccatgcttttatggggtgcattaatttatgaactaagtaaatcttcaaaaaagcaaaacaaccgaaaaattgtatctttgatatctttgggctctttatcaactttagttattactatttcgctttttcaaaacctcccgttttaa

SEQ ID NO: 2133 - DNA, 468 bp, Bacillus licheniformis
atgaacttatctcgttttttgaattccattcaattatccccacaatcaaaacctatgatggagctacttgaattaaatgaaaaaacaaaagagcatggcctgatcttaacacccagcgatataaaaatgttaatcgtttatagaaataaagtgcttcatgatcatggacgtatagaactggggattgaagtactaaaggaattaattgaggtgtttgctgcttcaccctatatggatgaggataattatgtcgaaacgttaatcgagcttcaggagattttttattatctcagaaatgaaacagaagataagataggggacatgaaactgattcatcagatgatggagtgttttaacgggccttctgccgggtctttagagatattaagaagtaaaatggaggaactcgcggagagtttcagaagagatacgatgagaagtgagtctttatataaaggtgatgaataa

SEQ ID NO: 2134 - DNA, 1437 bp, Bacillus licheniformis
atggacaaagaaaacactttaaatcgctatgatttggtttcaaattttacgattgataaatcaaagttaaagcaaagccaatatatgttgtcgcttctaaaagaaggccaaagtgttggagttattaccagcgagaaagcatacaagatacaggtagagattatgcaaattctgcaacgattggtaggccagtataccaaaggggaaagtatgtcggtgacaacggaaacggcggaagggattatggtttccctcatgtatgcaatagatgcttatgctctccattttgagaaacctgaagagtttatagtacatttacattctgatagtataaaaaatatatatacaaatggtgtcgcattacttcactgttattttgaagaagctaaacaattatatcaagacgtaaaaaaaataaaattagatgtgcctgttgatgcttatactttaaccattgacgaatcgttacctgtatttatgaatcattataatgttatttttgaagctcaaaataccatggcgagcattgactatcctttagccattgacaacatggaactgcaaggtgttttttatattaaacagtatttagagcgactgctgatagaaacgagattctgtcacttttttaaccatcacgatttaatgtatgtcttggcaaactttggaagaatatgtcattttaattatcgcatagaactttttaatatttttgagttaatgataaacaatgctgttttttcactcctatccgggggcgaagccaatcaagtcagaatttctgaagttcaatatgacaggttaagtcgcttgttaagtgattgccatgctgataaaagggcaaacttaattaacaatgcatttgatcggttacagcgggatttaaagacggatcaaacaatttctgattatatcaatttgtatcgcaatgaatttattcaaagggtaaataacgctgcggaaattgatggcttcaaaatgttgatcatcagagaaattgaagagagagaaaaaccaatagcgttaatgttaaatgaaaatgatcgcatgagtgatattgaattgcggaaattggtggattgcatcatggaacgaaaaaacacagcagaaaaaatattgctgatccgcgatcattttgtttcactacatgattatttggatttgctaaattcggggtgtctgtttgacgacgaatatgacgcactttttgctacgtttgggaattttgaattggccatttttgcgaaaattgtattttatgaagaattaagagggggaattctcaatttcattgacattgttgctgactgctctgaagcaaagagcgagtgggaaacatattatatgaaatttattaaacaactagaagatgagcgcattgcaactattggacacctgatcaacgatattgactatgaggagatttcgttttattaa

SEQ ID NO: 2135 - DNA, 315 bp, Bacillus licheniformis
atgtttataaaatataatgaatatgatttactggaactttttgagagcgagccggtcagtatagctgatgatccagaggccggcgaattgatttatacttttaaagataatcaaaacttcaagttaattttaacgctggatgtttatcaactaacttgtagcctggatataacctataaagatttcttagtatttacaggtgtttttcaaaacataactagcattaagaaagttgaagatttcatggttataagtattggagaagaaaagagaataaaagtaaaattcactaagcaaattggagtagagttactt

SEQ ID NO: 2136 - DNA, 426 bp, Bacillus licheniformis
atgaatagtgaaatagacaaatgtatattttgtgaaatagttagtcggaaaatttcaagttttgaggtttataaaactgactatgtgacagcatttcttgatataaatcctgttacaaatggccatacattaatcataccaaataagcatattgaaagactggatcatataaacgatccccatctatctaatgaaataatggattctttaattaaagttcctcaattattaattcagtcaggtatttgtgatgactacacgatactctcagacaacggtcactttgctcagcaagatattaaacacctgcattttcatgtcataccgagacatatgaatgaaaagtttgaattcaaattaaacaccgactttactgcagctaagaagagtaacttactttcgatatggaaaaagattgtagggaga

SEQ ID NO: 2137 - DNA, 303 bp, Bacillus licheniformis
atgaatttcgatccggaaaaactaaggaaatttcttaattgcgcgtcaaacccgtcaagcccaaagaatacaaagattaaaaattactgtgtgaatcaagaatgccaggagtttgtagcctttgatattgattttgaaaatgtagacatcgctctgcgtattgccggcatgttggggaaatccgccacgaaatttacgataaatcattttcttttccctggtacgaacaaaatagattatattcaatttataatttttgaaattaatgattcagaactattagcatttttagagcaactataa

SEQ ID NO: 2138 - DNA, 978 bp, Bacillus licheniformis
gtgttttttgcaaagatcatcgatcgtttagccttatatgatttgcacagaaaaagaagtaaagatgaacatttttccgctttttcattgaatccgattgacagagacgaattttataaagcaaaagcggctgatgtcgccattatgctttatgaatcaagaaaaaaccatttggccggacatttcagctatgaatctttaattccatccggggaccctgtcaacgatgctttaaaaggcgaggtttttttaaataaaaatgatatagatcagcctaatgttatttttgtgcacggctggcgaatggattcatacgacagaataaaaaagatatttcatgatcgtattatgaacgaattaggctggaacttgtattactattctcttccatatcattttgaaagagagccggaacattcgctttacagcggagaattgatgataagcgcgaatttgaatcgtacggttgattcgacgagacaagctatcgtcgatttacgggctctgattcattggatcaaagcaaataaaaacggccctgttattatagtgggcgtcagtttaggcgggtggatgacaaatttactggctacccttgagactcaaatcgacatagtggtatcgatattttatgctaatcgtctttcttatgcgatatggaataccatcccgggtaaattcataagagaagaattagaacagcacggtgtgacatatgaggatttaaaaacatattgggaaatcacagatcccagccaagctgcgccgaaaattaacaaagataacattttgctgatttccgccgtgcatgaccaatatgttcacttagaggatgctgataagttgtgggaaagctgggggaaacccgaaagacatctctacaactgcggccatgccggaattgttctttgtcgcaaaaaactggcattagatacaatttctttcatccgaaaaaaattaaagcagcttcataagtaa

SEQ ID NO: 2139 - DNA, 243 bp, Bacillus licheniformis
atgtactttgtttccggatttgtttcagttttgcttggtctcgtcatgctatttaccttacggttgttatctgttgctattcctcatgttataactgatgcagctggcaatgatgaagcttcagcttattttcaatcctctgtattattttatcctgtgctgctgcttattttaggcgtagtcttgattatcgttcatttgcgaacaaatgataaggaaaaggattcattcaaaggcgagtaa

SEQ ID NO: 2140 - DNA, 480 bp, Bacillus licheniformis
ttgtttcgatctaaacataatatcccaaaagtgaaatttgattataagttcacatctgatgaatcagatatcccaatgaaaatgagaaaaggcccttcagtagcaatgagagtagagggagaacttgaaatcaaaataaatgaaattacatattttaaagaaaatatcgccttattggaattttatgtttctttaaatgagtggattaaaaagaacaagaaaaaaaacaaagttacggagtatagatattacacaatggagtatgaaaagggcgaacccattatttcattgataccatttgattataaggctcgactaacgaccatttggaaaactcaacaattatataatgtattcgaccttgattacatcaccgaacaaatggaaatttcacacaaaaaacttggacgtgatattgaacatcattataggatttcattgaaaagctttgttggtaagatcccattaagaaaatattga

SEQ ID NO: 2141 - DNA, 597 bp, Bacillus licheniformis
atgaacttttggcacaagcgctttcaagatgagaactatgtgtatggaactgaaccgaatgcgtttttggcagattcgcagaaaaaacttcaattgtcgggcgatgctttagccatcgcagaaggcgaggggcgcaatgcggtttttttagcagaacaagggatgaacgtcacttcatgggattatgccgaatctggactgaaaaagacgcaaaagcttgctgaaacccgtcatgtatcagtaaagacggagcttgttgatttaaatgaagcgtcttggaatcaagatcagtgggacgagattgtatgtatttttggacattttccagaagagctgcgccgaaaaacgcttctgggagtaaaaaaagccgtgaagcccgggggctttttcgtaacggaagtgtattcgacgcaccaaatcccttacaaaagcggcgggccgcaggatccagaacttttatatacacccgaagaatttttgcaaatcttttcagattggcgtactgtccacttttttatgggagaagtcgttcgtcatgaaggagattcgcacaacggcctgtcccacgtcattcaatttattgggcaaaagcaataa

SEQ ID NO: 2142 - DNA, 480 bp, Bacillus licheniformis
atgaaaaacaatattagactcaagcggctgctgatgatcagcgcaattttgcttttaatcgtcgggggatatgtcagtgcaatgatctttggaaagaaagtggtgtatgaaggaacgggagaaagcggtctgtggcatgcttcgattgagaaatcggataaaacgtcaatcgggcctaattattttttgaatttatattggaatggcacggaagaagatgcgaaaagaacgatcgtgaaaacaatcaccttatacatagatggcaaaaagtatgatgacagaggagaatacgatctttccgagtatacgggagaggaaatggatggcggaggccatatggaagatcatatcgcgacttttgattttatgcctgaagaggatgttatcgggcatgcattatcagttaaagtggaatggaaaaccggagatgaagaaaacgcggaaacaatgaaattaaacaagattccgtggtataaatga

SEQ ID NO: 2143 - DNA, 576 bp, Bacillus licheniformis
atgaacgatattgagatcagaaggccgcgaattgacgacgttgaagagctgaatcagtttttcagaattgtggtcgaggataccttcgctaaagagggaatagccgatctgctcgatgataaagaaagtgaaattgaaagtaagaggcaatacttgaaagcagatttagacagcaaggggaatagccggcacttttttatcgcttcagatcaacgtctgaataaaatcatcggtactatcgaatatggccctgcaagcgaattgatcggcatttgtacggatggagctttaaaggatttatatgaggtaggaacggtatttgtccacccggattatcaaagacgcggaatcgggactttgctgttgaacgtcatgtttttgacttttttgaatcagggagtaaatgaattttgtttggacagcggctatcccggtgcccagagaatatggaagaagaaattcggcgagcctgactatgtgctgaaagattattgggggaagggatacgatcatatgatttggaggagacggacgaaggatatgccgattgatacaagaacatcagtcatgccgtag

SEQ ID NO: 2144 - DNA, 477 bp, Bacillus licheniformis
atgttcaacgaaagagaagcgttgcgtttgagacttgaacagctaggtgatgcggagatccaggtgatgcgggaattgcgaaaagaacgagagggcatttattcgaagctgcgtgaattggatcgggagagtgagcctgcaattaacaaaaaatcttcattaatcgacttggcaagcgctgcagcagaggaattaaaacaatcccagcatgccgctgacaaacatccgcctatcaagaccccatctcatactattttccaatcaaaaacaaccatacagcgtgaggctgccataaacattttaagccgctatgaagagggcttgaaaggcattaagctcaaaactgaaatcgagaaagaaaccggctttccgattaaaaacatgacgacatttatgaagagcttaatgaaacatcgcccagatattaaaaagcctgcccgcggccattatattttgcataaagaaaaagacctttga

SEQ ID NO: 2145 - DNA, 174 bp, Bacillus licheniformis
atgttggataaaaagaaatacttcatgattatggtaccggctttaattttagggtttttatttcaattttttgttccctcagaacaaaggtacttggggattgtgtttattttagcaggcggggtgatttattatctttgggtgcatatcgaaaaggacaaacagaaagattga

SEQ ID NO: 2146 - DNA, 621 bp, Bacillus licheniformis
atggaacttacgatcaccagagcactaagcgaactcaaaatgttggataaaagaatcaagcgggccgtaaatgaagccacattcggaggcttgatgatcggaaaaaaactgccaaacggatttcggacaaccgaagacttggaatccagagcgaaagccgattaccaatcaatcgaagccttaatcaaaaggcgaaatgccattaagtctgccattgttgtatccaacgcgacgaccaaaatcgaagtggccggagtcaagatgaccgtagctgaagccatcgaaagaaaaacctctatcagctacgacattcagcttttggataaactgaaggaagtgtacgctgatttagtcggcgaagccgagaacgtcaatcaaaaagtaacggaaagactggacaagcatctcgagacacttttcggaaaagacggcaaagtaaaagcggctgaaaaccaggaaatcgtcaaatctttcctcgcagaaaatgaagcaaaaatcatcgatccgctgaatctaaaagagaagatcgattgcttatcaaaaaagatcgaggactttgaaatggaagttgactttgcattgtccgagagcaatacactcaccaaaatcaccatcgattga

SEQ ID NO: 2147 - DNA, 114 bp, Bacillus licheniformis
atgaacattgcatttcccttgaagcagaacagggagatcagcaaaaaatttaatatgctcgacaatgaggactggtatcaaaatatcgccaaccgactgggaacctttcagtaa

SEQ ID NO: 2148 - DNA, 120 bp, Bacillus licheniformis
atggagttgatattgttgaaaccgctgatcaagctggcatgcggagctgcctcccttatcgcagccgtcctcgctgtatgttttgcagtgaaacgaacaaagacaaacaataggaattaa

SEQ ID NO: 2149 - DNA, 585 bp, Bacillus licheniformis
atgtcaaagcaaacgtccgggaaatatgaaaagattttgcaggcggccattgaagtcatttctgaaaaagggcttgataaggcgtcgatttcagatatcgtgaaaaaggcgggtactgcgcaaggcactttttatctttatttctcatccaaaaatgcgctgattccagcgatcgcggaaaatcttctgacacattctttggaccatattaagagcaaggtcgacggaaccatgtctttctggaccgccttggatatcatgatcgatgagacgttcaacatgacggaacttcatcaggatattatcgttctttgctactcaggtcttgcctttgaccattcgatggaaaaatgggaggcaatctatcagccttattattcctggcttgaaggacttattgaaaaagcagttgagaaaaacgaggtcattccggacattaatgtgcgctggacggcccgaacgattatcaactttgtcgaaaacacagcggaacgttattacatcggggcggaaaacgacgaagagctcagtgtgttcaaaaaagaaatatttacttttctgaagagaagcataggaaccaagtaa

SEQ ID NO: 2150 - DNA, 336 bp, Bacillus licheniformis
ttgagttggctcctcgtaattgctgcgggttttttggaagtggtgtgggcctcaggtcttaaacatgcggattcattcgtcgattggctgatgatctttgtactgatcgcggtaagctttattatgctgatacgatcttacaggaacattccgatggcgtcggcttataccgtatttgtcgggatcggaacggccggcacatatgtgacgggtatttttatgggcgagaccttttcaggagggcaaatattctttttgatcgtgctgttgggaggcattattggcatgaagatgtttacaaaagagaacaatgcccagtcaggaggtgatgaatga

SEQ ID NO: 2151 - DNA, 318 bp, Bacillus licheniformis
atgccatggatgtttttagtgatttccggaatcgaagaggttattgccgccatcgctatgaaatatgtagacggcacaagaaaaaaatggccgattatcgtcatggtgttggggtttggcttgtcttttttctgcctttcaaaagcaatgcagatgctatcagccggtgttgcatatgccgtatggaccggaatcggcagcatcggcattacggcagtcagtttattttggtttaaggagcgtattcgtgctccgcagctcatctcgcttggctttattataatcggggtgatcggcctgcgccttacatcatcttaa

SEQ ID NO: 2152 - DNA, 543 bp, Bacillus licheniformis
atgattaatcagcttaaattgcgtccgcttgaaagagaagaccttccgtttgtccaccgtcttaacaacgatgcgaaaattatgtcatattggtttgaagaaccgtacgagacttttgttgagctgcaggatttatttgacaaacacattcacgaccaaagcgagcggcgctttatcatagagaaagagactgagatgatcggattggtagagctggtcgaaattgattatattcacaggcgggcggagtttcaaatcataattgatcccgagcatcaagggaacggttattcgtcaagcgcaacatatttggcaatgaactacgcattttccgtcttgaacttgcacaaattgtatttgatcgtcgacgaagataatgcaaaagcgattcacttgtataaaaaggcagggttcactatcgagagcgagctgcaggatgaatttttcgtcgacggctattatcgtaacgccattagaatgtgcatttttcaggatgagtttttatcacttaaaaaaagcaaagaggaaggcatgcagggataa

SEQ ID NO: 2153 - DNA, 357 bp, Bacillus licheniformis
gtgaaaaaccatattccatggatcagcctgatgatcatatttgccgcatttttaagcggatgtaacttaaaccgtgtggggacggacgaatattatgttcacattactggaaacggggaggaagacacgtcgaaatttgacgacggcgaggaatactccgtcttcaaatatgaactggccggttttgatgaagacggtcaagaaaaaacaatggaattcacagctgataaaaaccttcgcataggcgcgtttttgaggcttttctattctgaaaacaaaggcgtgaagtcatgggaagaggttgacaaagacgatattcccgccaaagccaaagagcaattaggtgtgaaaaattaa

SEQ ID NO: 2154 - DNA, 435 bp, Bacillus licheniformis
atgaaaaaaatcgtatgtttgatggtgttttcaatcatgacggccttcggtattcacatccagcctgctgaagctgcggttataaaagatgagaaaaagatgaccatgacaatgactgaagatcatgtgggattttttatggcggacagcaccaatgtaaattactacccgacatggctgtattacaagcttacgatttttaacgcggaaggctgcacactcaacatcaagctgcagagaatcacgttaacaggacatgcggtcactttaagcgagaaagagtatacgggaaatcatcttcatttaagtgctgcagataaagtgagcgggtcgccgcaccgaaatcatttcttggatatcacaaaagtgtcggggtgcggggatgttggaatcacaggtttttacggctttgagcaccaaatgccgggctactaa

SEQ ID NO: 2155 - DNA, 147 bp, Bacillus licheniformis
ttgctgctatgttctgcggctggttatgctctttatcagcatgttgccggaggccggaatgaacaggcaggcgccgtccttcatcagcaggcattacattttaaattatcgactttagagggcggtgacatcgaactgaaaaaatga

SEQ ID NO: 2156 - DNA, 1221 bp, Bacillus licheniformis
atgcaaaaagcttatgaccgttttaaaggagacggttttgaaatcatcgctgtcaatgtgcgtgaatcgaaaggtgcggtaaagagctttgtcgaccgccatggcttaacttttccggtcgcttggatcaatcggctgaagtttaccgttcttgggaaatgtattatttgcctgcaagtatattcattaatcgggaagggagagcgtagcgaatgtatgtcggaggaatgtctgagcggcaagttgatatgtgggttgcagacattcttagcgattcatagaaactcattcaaaaggcatagacaaacacctattgttcttatcgttcataaggtagctcaggagaggagcgatcttatgttttttcatattaaagaactacagtatcacgcaaagcctgataaacccgatccattatttgcgaaaaagctgcaagagatacttggaggacagttcggggaaatatcagtagctctgcagtatcttttccaaggatggagtgtcaggggcaatggcaagtacaaagatctgctgatggatacaggagctgaagagcttgcccatatcgagatgctggcgacgatgatcgcaaggcttttggacggtgcgccggtcggtgatcttgaaaaagcggcaaaagatcctgtgatcggtgccattctgggagggatgaatccgcagcatgccatcgtatcaggattaggggcgatgccggccgacagtgtgggaaaccgctggaccgccgattatattatcgcaagcggaaatttgcttgccgactttcgggcaaatttaaacgcggaatcacaggggcgcctgcaggccgtccgcctttatgaagagacgacggaccgcggtgttaaagatatgctctcctggctgattgcaagggatacgatgcatcaaaaccagtggcttgcagccatcaaagaactggaagcgaaagaaaatgtcgtcgtcccaagtacgtttccgcgcaatctggaaaaaagggaagtctcccatgtattatttaatttttcaagaggcaacgagagcgctgcaggcagatgggcgaagggaccgagcatggatggagaaggcgtttttcagtatgttgagcatcctcagccccttgcgaaaaaaccggtgttaagacctgcgcctccatatattcatgatacgccgccatcagttattcaacatcaccgggatgatgtactgcctccgaatctttattga

SEQ ID NO: 2157 - DNA, 801 bp, Bacillus licheniformis
ttgaaaacttataaggaaacggccgttttcgaacataccttttggcttcaggttttaggtgatcatgcgcgttttattttggactctctcgccgaaagggaaaaaaacgatattcaaaaggcgaagcagttcaagcaagcgtttgatgttttgctgaaaaaagtgaacgcttcgcctgatttgtattcattaacgcttgaagctgaagaatatgctcttcagttcaggaaatttaaactcttcatcattaaaaggcacctgacaggcgatattaaaattcacctttctccaacttttatcaaccatatggtaaatgaactggaggaatatttgcttgtgctaaaatacttgaaaaagcgggaagcgccgcctgttttccacgagctgcaccaccatatgctgtggctgatggatgccgccggacatgccggcgcgattgccgatgacttggatgcggttgaaaaacgattgaaagaaaagagccgggagtttgtcaaacactttgaacagttctacattaaatccgttgaattgacgggatatctcagagcgaatgttgaatcttttcccgctctcagaaggatgaacaaagacgtgaagcttgagatcgaactgttccgtacatttttgaaagaagtggaggaattggagcttacagatcagatgctcggtacgttctccgcactgatggcagaccatatgatgagggaagaatgctattatttaatgaaaatcgccgaatcgacaaatacgcaagaacctgcgtgcgaccctgcaaaaccgaggctgcttgaaaagtaa

SEQ ID NO: 2158 - DNA, 519 bp, Bacillus licheniformis
gtgcaagtcagaaaaataaaggattcagatgccaaaagctatctcaaactctgtgaaacgatcgatgaagaatctgaattcatgctgtttgaaccaggtgaacgaaagcttcacgcgcaacggcaaatcaaacagatcgaatccggaatgtgcgaagtttttgtttgtgcggctgacgacggaagcttaatcggatatgttgcagcagccaaggggcaggttcagagagctcgccaccgcgcccatgtggtgatcggcatacgccaagcgtatatcggacaaggtattggagtaaagctttttcaggcattggaaaaatgggcctgtgaagaaaagattcacagacttgaactgactgttatgactcataatacagctgccgttcgtttatacaaaaaaacgggctttatcattgaaggcactaaaaagcatgctttgaaagtaaaagggcaatatgttgatgaatatgtcatgtccaaattaatcaacgaacagcaaagggaggtttcaaatgaatga

SEQ ID NO: 2159 - DNA, 303 bp, Bacillus licheniformis
atgaatgacgggtgccatcaggccattgctgctgtcagctattacaaaacagaacggacgattgattttaaccggcaaacttatacaaaaaagcagaatcaaatgtacttgtacaacgataaaattttaacagcaagccgccagtatcgtttggagcacgtctatgacgtttcatacagacctttttccgaggccggtttgctttacctccatacgaaccagggggtatttgcttatgaagtgaacgttgaccccgggtatttcattgaggcttttaaaaaacagaaaaatccaattaaataa

SEQ ID NO: 2160 - DNA, 597 bp, Bacillus licheniformis
atgaaaaagaagacacagaatacggttcaaaagatcgtagaagccggatatcgtctgttcgcccaaaatggatattcggcaacctctgtagatgaaattatgaaagaagccggtttttctaaagctacgttttatttgtattttaagtcaaaggagatgctgtttctccatattatgaatgagcagatggaagatcgctttcagaccagcatgaattgttttcgaaaaaagacgctgaggggattgctcgcggggattgaacacttgattcaaacatcaaataaagagcattcgacagctttatttttggaatttatggcaaatagtcatagatatcctgagattcaaagaaaggtagcccttctgtatgagcagtggagggagttttttgtcgaaatgattgagcagctgcaggaagaaggcattgttcagaaacagctccatccgaaggtgatggcgtctacgctgattgccatctttaacggctacaaccatcaacaccacgcggatccgtcgattaataaacaggaacagcttcagtccattattttcttgctgaatccgaagctgcatcttcagataaaagacaagctatga

SEQ ID NO: 2161 - DNA, 456 bp, Bacillus licheniformis
atgggcagtcaagatatggagagatatgaagaggagttgtctttaaaggcatttattgtcttgtctcgagcattacaatcgattaaaaagcgtgtggaagaagacattaaatgtttaggattaaatccaactgagtttgctgttttagaattaatctataataaaggcgatcagccgatacaaaaaataggcgaaaaggtattaatcgcaagcagcagtattacctatgttatagataagctggagaagaaaagtttaatagtaagaaggccttgtcctaaagatcgccgtataacatacgctgccttaacgaatgaaggaactgcactgatgaacaatctttttcctaaacataaagcagctatgaaaggcattttcggcgggctggacattaaagaaaaagaagttctaattgaaaagttgaaaaaactgggcttccatgcccaaagcatgtaa

SEQ ID NO: 2162 - DNA, 624 bp, Bacillus licheniformis
atgaccgaatttctagagttagtaaaagaaagacgatcagcaagtaattttcttcctggatattcaatttctgaacaggagcttaatgaaatatttgaaattgtaaaattggctccctctgcttttaatttgcagcatacaaactatattgcggtgttggataaagaaaagaagaacatgttgcatgaagcagctaatggccaatacaagatcctaagctcgtcggcagtcatcatcgttttgggtgacaaaaaggcctttcatcaagcaaaagaaatctacgaaggtttaaaactgctcggagtacttaataaacaagaatatgatgatatggttcacgatacggtttctttctatcaatccagaggagaagcatttcaaagggatgaagccatcaggaatggctcattatcttctatgctctttatgatggctgctaaagaaaaaggttgggatacttgtcccatgattggctttgatcctcaaaaggtaaaagaggtattgaatataaatgagcaatatgaggtcgtcatgatgatcacccttgggaaggaaaaattagaaagcagaaaaccgcggggatttagaaaacctgtaaatgaatttgtaacctatatctcataa

SEQ ID NO: 2163 - DNA, 939 bp, Bacillus licheniformis
atgaaaaagaaaacaagcggaatccatcacattaccgcgattgtcggccatccgcaagagaatgtcgatttttacgctggcgttctaggtttacgtttagtgaaaaaaactgttaattttgatgatccgggaacataccacctgtatttcggtaatgaaggcggaaaaccgggaacgattattacattctttccatgggtgggtgctcgccgaggagtcattggagatggccaggtgggagttacttcatacgtcgttcctaaaggcgcaatggcattttgggaaaacagattggcaaaatttaatttgccttatacaaaaatgaaccgttttggagaggagtacttagagttcgatgatcctcatggacttcatctggaaattgtcgaaagagaagaaggggaaaagaacagctggaagataggagaaattacaccggacaaagcaatcaaaggatttggcggagcaacacttttatccaaacaaccggaaaaaacggctgaattattagaaaaggtcatgggacttgaaaaagttggtgaagaaggagattttgtacgttttcgttcttctggtgatatcgggaatataattgatttgaaattaacaactataggcagcggacaaatggggattggtacagttcaccatattgcctggagagctattgatgacaatgatcaattagaatggcaaaaatatgttgcagaaaatggttatcgtgttacacccgtgcaagacagaaattattttaacgcgatttattttagagaacacggggagattttatttgaaattgcaacagatcctccagggttcgcccatgatgaatcacatcaaacaatgggagaacagttaatgttgccggctcagtatgaacactacagagagcagttagaaagaagattaattcctataacagtgaaggcgctggattaa

SEQ ID NO: 2164 - DNA, 609 bp, Bacillus licheniformis
atgctgtccattgatccgcttacaaaaacggaaagagagaactacaagtttttaatcgggagtatcataccaagacccgtggcgtttgttacaagcctgtcagaggagggcgtcttaaacggagctccatttagttattttaatattgtatcttcaaatcctcccatgatctccctgtccatacaacgttctgaagggagccaaaaagatacagcgagaaacattctgaagagcaaagaatttgtggtccatatcgttgatgaacaaaatgttgaaaaagtgaatgcaacggccgcgagcctacctccaagtcaaagtgaaattcagttagcggagttaaccccggttgaaagtgtgaaagtctcggtaccgggggttaaagaagcgaaagtgcgcatggaatgtgttctggagtattcattagagttgggagataaacactctcccggctgcgatttcatgataggtcaagtcgttcaatatcatatcgagagcggcatttatgaaaatggaaaaatagatccgagaggcctcggagccatcagccgattggccgggcatgattacgcaaagattggtgaaatctttaccagggaaagaccgaagtaa

SEQ ID NO: 2165 - DNA, 660 bp, Bacillus licheniformis
atgggatttttagacaaattatttagaaaatcaaaggagatggatcatatgtcaaatgtgaaattagctgtagttttttatagtatgggcggaacaaactatcaattagcaaaatgggctgcagaaggcgcaaaagaagcaggcgctgacgtcaaagtattaaaagtacaagaattggctccgcaatcagttattgaaggaaatgaagtatggaaagcaactgttgatgcaacaaaagacattccagtcgtaacctcagaagatatagagtgggcagacgctattatattcagtacaccaacgcgttttggcaatatggcatcccaaatgaaacagtttcttgatacacaaggcggactttgggcaaacggcaagacagttaataaagttgtaagtgcaatgtcctccgctcaaaatccacatggtggtcaagaagcgacgatcttgtccttatatacttcaatgatgcactggggagctattattgcttctcctggatacactgatcctgtcctatttggggctggcggaaatccatatggaacgagtgttacagtcgatcaagacgggaagatgattgaagacgtagaagccgcagtgaaacatcaagcaaaacgaacggtgaccgtagctgaatgggtcaaaaagggcaatcagtaa

SEQ ID NO: 2166 - DNA, 141 bp, Bacillus licheniformis
gtgaaagtcatgattggttcgatcatattgctgctcattatagggtttggcgtatggcttatgttgagcccgctttttaaaaaagtcggaagcggggcgaccaaaataaagaaaacgctggaggacgacaaagatgaatga

SEQ ID NO: 2167 - DNA, 834 bp, Bacillus licheniformis
atgaatgaaaaacaaccaaagaaaaataaaaacaaaacgctgctcggcggaatcattgtcgctgccgctttaattattggaggattcacggcctccctgttcatcgagaaaatcccgaacggatatgtcggcgtcgtttattccccgaatggcggggtaaaatcggaaacgctggatcaaggctggcatttagtcgggctgtttgacaaagtcacaagatatccggtacggatgcagactgtaaacaatcaggatattcaagtggctacttccgacggcaaaaacatctcaatggacattgcctacaactatgtcgttcagcctgataaagtcgtagaattgtttaataaattcggagcggtcgatattgaatcaatcgaaaacagctacttgaaaacaaggctgtgggacgctgcgagaaagtcgatttccaaatattccgtcattgatacatacggacaaaaatcatctgatgccgctgcagaaattcaaaaaacatttgcagatgatatgaaggggctcggctttgtcattgacgatttaacactcggcgtgccgaagcctgataaagcgactcaggaagcgattgacgcgcgcgtgaagtcttcgcaggaactggaaagaacacagacggagctgaagatcgccgaagcggaagcgaaaaagaaaaagatcgaagcccaaggtattgccgagtacaacgaaattattaaaaagtcgatgtcggatgaaatgatcaagtatcaatggatccaaaaatgggacggaaaaatgcctaaagcgaccggatcgaattccctgatccagattccgaccgatgagaaaggaaaataa

SEQ ID NO: 2168 - DNA, 762 bp, Bacillus licheniformis
atgttgtttgctccggaagccattctccgtacgtggagaaaatttgactcttttccgatggaaacgctgacaaaagcatggttttatcatcaggcaggagatgggagacagcgggaagtatcgatgatgaaggagcactatcaagagtacgggattgccggcaattgttttgacctttcgatttggctgctggatgagttcacaaaagaaggagtggaagcttttccaatcggccgttcgttcaaaacggaacgcgcgcatgccgcagtcatcgcccttgatgaaagaggccggcgctttttgtgtgatctgggagaccaatggctgcatccgattctgatcgattgcgaatctgaagattataccaatgaaaagctgggcggttttttccctgccgcacaagttcaagtcatgccgacagccggcggagttgaggtcctttaccatcggccgaacggaaaggtgtcgactcaagtctacaatacagaccctattgacatgtccgtttttttaaaggcggctgaatactcgcaggcggcattgaagcctgcgcctttactggaatgcagaattccgtttcagcatgaaatcgcccattgggaattcagcggctgggacatatatcttagtacgagcaaaggattatacagagaagcgaagccggacacaatcgaaggatggactgaaaaaatccacgatatctcaggatacgataaaaatgttctcaagaaagcattggagatttatcaaacccgcgcgtga

SEQ ID NO: 2169 - DNA, 840 bp, Bacillus licheniformis
atgagccattatgaccagcaatacaatgcaatcatacaaaaaattattgaatcagggatctccgatgaagaatatcaggttcggacgaagtgggattcagacggaacgccggctcatacgctgagcatcatgagcgaaaaaatgcggtttgacaattcagaagtgccgattttgacgacgaagaaggtggcgtggaaaacggccattaaagagctgctttggatttggcagctgaaatccaatgatgttcaagttctgaatgatatgggggttcatatttgggatcaatggcgtcttgaagacggcacaatcggagcagcgtacggctatcaattagggaagaaaaacagaacggttaacggccagaaagtcgatcaagtggattatttgcttcatcagttaaagcataacccttcttcacgcaggcatttgaccatgctgtggaatcccgatgatttggatggcatggctttgacgccctgcgtctatgagacgcaatggtatgtgaaagaaggaaagctctctttagaagtaagagcgagaagcaacgacatggcgcttggcaacccgttcaatgtgtttcaatataatgtcttgcagcgcatgatcgcgcaagtcctcggttatgagctgggcgaatacatcttcaacatcggtgactgccacatctatacccgtcacatcgacaatttaaacattcagatgaaacgcgagcagtatgaagcgccaaagctatggatcaacccggatatcaaaaatttttatgactttacaatcgatgattttaaattaatcgactataagcacggcgacaagctgacatttgaagttgccgtatga

SEQ ID NO: 2170 - DNA, 429 bp, Bacillus licheniformis
atgatcaaaaaatgggcggttcatctgctgttttccgcattggtactgcttgggctttcgggaggcgccgcatattctcctcagcatgccgaaggtgctgcaaggtatgacgacatattgtattttccggcatcacgctatcccgaaaccggcgctcatatcagcgacgcaatcaaagcagggcattcagatgtctgcacgattgaaagatcgggagcggataagcgccgccaggaatcactgaaggggattccgactaagccgggctttgaccgtgacgaatggccgatggccatgtgtgaagaagggggcaaaggagcgtctgtcagatatgtcagctcatcggataaccgcggagccggctcctgggtcgggaacaggctgagcggtttcgccgacgggacgagaattttgtttatcgttcaataa

SEQ ID NO: 2171 - DNA, 141 bp, Bacillus licheniformis
gtgggggataatggtaatgtaagcatattatcattccctctgtttcaggttcgcatccttcattgccgaatggatgtgaacctgttttttcgtgcaaaaaaaccgccgaccggcggttttgctgatgagtccgtgttttaa

SEQ ID NO: 2172 - DNA, 624 bp, Bacillus licheniformis
atgacgaagctatcaaaaagacaacttgatattttgcgtttcattaaagaagaagtgaagcgcaaaggctatccgccttccgtcagggagatcggagaagcggtcggcctggcgtcaagttcaacggtacacggccacttggcaaggcttgaaacgaagggattgatcagaagggatccgacgaagccgagagcgatcgaaattctcgatacagaggaggaaattcatattccgaaaaaccaggttgtcaatgtcccggtcatcggaaaggtgaccgccggtacaccgattaccgcagtcgaaaacatcgaggaatactttccgcttcccgaacgcctggcgccgccggatgagcacgtcttcatgctggagatcatgggagaaagcatgatcgatgccggaattcttgatcaagattatgtgattgtcaagcagcagaacaccgcaaacaacggggatatcgtcgttgcgatgaccgaagacgacgaagcgactgttaagcggtttttcaaggaggaaacccatatccgccttcagccggaaaacccgacgatggagccgatcatccttcagaatgtgacgattctcggaaaagtcatcggcgttttccgcactgttcattaa

SEQ ID NO: 2173 - DNA, 312 bp, Bacillus licheniformis
atgaaaaaagaatcattgatttttgtcagtctgtttactgctgtgatcagctgctgtattctgtttgtgtcttttgccggtaagatcgaagaaagaaagcaatatgttaaaatagaagtgcaagaaggcgatacattgtgggagctggccgaccggatcaaaggcggaaaaaccgctgacaaacacaaattcatcgaatgggtcgccgataaaaacaatctgccgacctctgtcattaaaccgggagatgtcttgatcctgccggtagccaaacagcactccgatcaatatcagcttgcagttgtagaataa

SEQ ID NO: 2174 - DNA, 648 bp, Bacillus licheniformis
atgaatgcgattatttacaccagggtaagcactgcgaaggagcagcaggaaacctcattaaagcggcaggaggaagagcttaagtcgcttgccgccgaacacgggatgaacgtcgtgagcgtcatttccgagcaggcgagcggatatgaaatggaccgcgacggcgtcttcgatctgctcgaggaaatcaaaacatcagacatcgacgcggttttaatacaggatgatacgcggcttggaagagggaatgccaaaattgcccttcttcactgtttatataaagaaggcgttcaaatctacacgctggctcaccgcggaaagctcgagctttccgaagcggactcgatggttttggagattgtcggcattgtcgaggaataccagcggaaaatacataacctgaaaattaagcggggaatgaagaaggcggtcgaaaacggctaccgcccggagaggaacctaaaacaccgcaatgaaggcggcgggagagagcgaatcgaagcgcctctttcagaaatcgtcaggctcagggagaacaagctgacgtttgcggagattgcagccgtgttgagaggcttcggatacagcatatcaaaagcaaccgttcaccgccgctaccaggagtataaggacggccttgcagactaa

SEQ ID NO: 2175 - DNA, 234 bp, Bacillus licheniformis
atgatttctaaagaaaaaatagccagaattaacgagcttgccaaaaaagcaaagagcggatctttaacagacgaagaaaaagcagaacagcagaagcttcgccaggaataccttcaaggcgtccgcgcgtctatgaaaaacacgttgaaaactgtgacgattgttgaccctgaaggtaatgatgtgactcctgaaaagctcaaacaggaaaaaagaaaccgccgattgcattaa

SEQ ID NO: 2176 - DNA, 2004 bp, Bacillus licheniformis
atgaaaacgattgaattaaaatctgtcgcaacaatacgaacactctccatagacgcgattgaaaaagctaaatccggtcaccccggcatgccgatggggactgctccgatggcttatgcgctttggacaaaaatgatgaatgtcagccctgaaaatccgaattggtttaacagggaccgttttgtgctttccgccggacacggatcaatgcttttgtacagcatgcttcacttaagcggatatgacgtttcaattgaagacctcaaaaatttccgccaatggggaagcaaaactcctgggcatccggaattcggacatactccgggtgtagatgcgactacaggtccgcttggccaaggaatcggaatggctgtcggaatggcgcttgctgaacgtcaccttgctgaaacttacaaccgtgacgactatcgcgtcgttgaccattatacatacagcatttgcggtgacggagacttgatggagggaatttcatccgaagcggcttcgcttgcgggacatttgaacctcggccgtctcatcgtgctttatgattcaaatgacatttcgcttgacggcgaactaaaccgctcattctctgaaaatgtaaagcagcgctttgaagcgatgaattgggaagtgctttatgttgaagacggcaacaacattgccgaaattacggcggccatcgagaaagcgaaacaaaatgaaaagcagccgacattaattgaagtgaaaacaacgatcggtttcggttctccaaaccgtgcgggcacatccggcgtccacggcgctccgctcggatcagaagaggcgaaattaacgaaggaagcgtatgagtggacatacgaagaagatttttatgttccttccgaagtgtacgagcactttaacgaaacagtgaaggaagcgggcaagaaaaaagaggcggaatggaacgaactgttctccgcatacaagaaagcccacccggaacttgccgaagagcttgaactggcgatcaaaggcgagcttcctgaaggatgggatcagaaagtacctgtatatgaaaaaggaagcagccttgcttcacgtgcatcctcaggtgaagtgttaaacggaatcgctcaacaagtgccgtttttctttggcggatccgcggacttggccggttccaacaaaacgacaatcaaaaacggcggagatgtttcagcgaaggattacgccggcagaaatatctggttcggtgtaagggaatttgcgatgggagcagctttgaacggaatggctcttcacggaggcctccgcgtattcggcggaacgttcttcgttttctccgattacttgagaccagcgattcgtcttgctgcattgatggggcttcctgtcacctatgtatttacacatgacagcattgccgtcggtgaagacggaccgactcatgagccgattgaacagctggcatcacttcgtgcgctgccgaacttgtccgtcatcagacctgccgacggaaatgaaacagcagctgcctggaagctcgcgcttcaatcaaaagaccagccgactgcgcttgtgttgacacgccaaaacttgccgacaatcgatcagtctgctgaaacggcttatgaaggcgttaaaaagggtgcatatgtcgtttcaaaaagccaaaacgaaaaaccggaagcgatcttgcttgcgagcggatctgaagttggccttgcgcttgatgcacaaagcgagctgcaaaaagaaggcattgacgtatccgttgtcagcgttccgtcatgggatcgatttgacaagcagccggctgaatataaaaacgctgttcttccaactgatgtgacaaagcgtctcgcaattgaatgggatcgccgctcggatgggagagatatacaggcactggacggggacattctcggaatcgaccagttcggtgcatcagctcctggcgaaacgatcatgaaagaatacggttttacgcctgcgaatgtagttgaccgggtgaaaaaactgttaaatcgctaa

SEQ ID NO: 2177 - DNA, 438 bp, Bacillus licheniformis
atggaacgccattattatacgtatttgatagaagaggaatttgccagccattattttggaagagagtctgtcatgttcaaactgttttacgattatcattggacgagccccgatcaaaagtctcaattagccgcgaaacagatcgagtttattacaaaaccgattcccgctgctcatatacacaaaagaatgaaaatgaacctctgccgggaagactatacacaggttgactatgtatacagattgattgttccaaaaggaagcgcttcttttattatcaaagaccgtcatattgagattttggcaaagggtccattcgatgccgaaacggttttctttgaggtattgcgaaaagtcagtccgtgttttcttgcgatggattttaatatgaaacgttatggctggctgaaccctgtgaaagaaagaaattttgtataa

SEQ ID NO: 2178 - DNA, 219 bp, Bacillus licheniformis
atggatttgtgggttgtcatcctagtgggcgttttagcattgctcgcaggtgttgcactcggattttttattgctcgtaaatatatgatgaactatttgaaaaaaaatccgccaattaatgaacaaatgctgcgcatgatgatgatgcagatgggtatgaaaccatcccagaagaaaattaatcaaatgatgaaagccatggaaaatcaaacgaaataa

SEQ ID NO: 2179 - DNA, 165 bp, Bacillus licheniformis
gtgatgaaagaaaatctgcttcatgaaattgaggaaaaaagaaaagagctgctaaaaatcgtcatgacaaacggcatgacttcacatatcaccattcagcacagccagcagctggatatccttctcttggaataccaaaaactatctctcggaaatacacaataa

SEQ ID NO: 2180 - DNA, 708 bp, Bacillus licheniformis
atggctgatatcaattatattctcgctttcggtgcagggtttctatcgtttatttcgccatgctgcctgccgctttatcccgcttttttatcatatattaccggtgtcagcatgagtgaaatccattctgacaaacttatgtttcaaaaaaggagcttggtacatacggtctttttcctgatcggcttttcgatgatctttgtggcactcggctacagcacgtcgcttgtcgggtcgttttttaaggattatcatcagctcatcaggcagcttggtgcggtttttatcatctttttcggatttgtcactttgggggtttttaagcctgaatttttaatgaaagaaaggcgcctccaatttaaaaacaggcctggaggtctgctcggttccatcggaatcggaatggcatttgccgccggctggacgccctgcaccggcccgattcttgcagcggttattgcactcgccggaacgaacccgatgtcggccgtgccttatatggtgctttatgcactcggattcagcttgccgtttctgcttctgtcttttttcattacaaagatgaaatggcttcggaagcatcagctcatcatcatgaagatcggcggagttgcaatgattgtagtcggcatcctgctgttctttgactggatgacgaaaatcattatcgtattgtcaagcctgttcggcgatttcagaggcttttaa

SEQ ID NO: 2181 - DNA, 372 bp, Bacillus licheniformis
atgacaagggttttaattgttgatgatgcaaaatttatgagagataaaattagagaaatacttgaaacagaagacttgcaagtcgcgggtgaagccgagaacggggaagaagctgttttgctttatcaagagctgcagccggacttggttatcatggatattacgatgcctgtgaaaaacgggatagaagctttaaaggatatgatccagctgaacccgaaagtgaaagtgatcatgtgtacggccatgcggcaaaagcggatcgtcgttgaggcgatcgaagccggagccaaggacttcatcgtcaagcctttcgaggaaacgaaagtcgtcgaagcgattcggcatgtgctcggaaatgcttgcagctga

SEQ ID NO: 2182 - DNA, 486 bp, Bacillus licheniformis
atgatgatcgtcgtttcatctatacttgctatcgtgatggccatcattgtcatggctgtcagaatcaagtcatctgaaaaaccggctacggccaaaaaaattatactgcctccgatttttatgagcaccggtgctctcatgtttttatttccggtgttccacgtaaccggtgctgaatttttggaagctctcaccgtgggcatgatcttttctattttcttaattaaaacctcaaaatttgaaatccgcgatgataaaatctatattaaacggtccaaatcgtttgtgtttattttaattgcgctgctcgtcatccggatcgtgatgaagagcatattaagcacaacgatcgattacggcgcactgagcggaatgttttggattctggctttcgggatgatcgttccttggcgggttgccatgtatttatcgtttagaaagctttcaagccagattgaagcgtcaaatcacatacaggtcaattaa

SEQ ID NO: 2183 - DNA, 429 bp, Bacillus licheniformis
atgctggaaggatggtttttatggctgatgctcgcttggatcgtcatcatgatcgtcctcttgtcaatcggcggttttttcatgtttcgcaaatttttaaaaaggctgcctaaagaagatgggaaatctgagctggactggcaggattattatattgaacagacaaggcatttgtggaatgacgaagaaaaagaactgcttgaggaattggtttcacccgtacccgagctgtttcgcgatgtagcaaaagcaaaaatcgccggtaagatcggggagcttgcattgaaagaaaaagcaggcgccatcgaccgggatttaatcatcagaggctatattatggccacaccgaaaagagaccataagttcctcgtgaaacgtttaaaagaaaagaacattgatcactctacatatcaagagctttttaaataa

SEQ ID NO: 2184 - DNA, 408 bp, Bacillus licheniformis
atgacaaatacaaaacgtttcgattccgcagattttgataaagaatggatgaaacagtttgttgacgacccttttctcctctatgatgaaactttaccgattgacctttatgaaacgagcactgaatatataattgaagcagatttaagccacttgaatgtccggcatcttgacttgacgttttcaggctacgatttcaagcttgcagttaaaaccgatgagcagctttacgagaaatcgctgatgcttcctttctttttgaatgacaaacagatcgaagcggaatgcgaaaacaacattcttgcagttaaaatcaataaagaatcaagcaaagatgacatttcgctttcaatcaatattccttttatatcaaacctgcacaacaagcagaacccggacagcgcttaa

SEQ ID NO: 2185 - DNA, 147 bp, Bacillus licheniformis
ttgacaaataaaaacgacggcaaagatatgcgcaaaaacgcaccgaaaggagctcagccggggcagccagagcctttgagcggaagcaaaaaagtaaaaaaccggaaccatacaagacaaaaacacaattccagtcacgatatgtaa

SEQ ID NO: 2186 - DNA, 147 bp, Bacillus licheniformis
ttggccaaacgaaaagcgaatcatgtaataaatggaatgaataatgcgaaacgccaaggaaacggcgcgggatatattgaaaatgatcagcacatactcactgaggcggaacgccaaaacaacaaaaaacggaaaaccaatcaataa

SEQ ID NO: 2187 - DNA, 2727 bp, Bacillus licheniformis
atggcgaatcagcaacaaatcgcaaaaaaagacgcttttcaatcaagaaaaacgtttacagtacaaggcaaaacgtacagctattattctttaaaagcattagaggatcaaggaatcggaaacgtatcaaaacttccttattccattaaagttttgctcgaatccgttcttcgtcaagtagacgggagagtcattactgaggaacacgttgaaaacttggcaaaatggggcactgccgaattaaaagatattgacgttcctttcaaaccatcccgcgttattttgcaggactttaccggcgttccagccgttgtagaccttgcttcattaagaaaagcgatggcttcagtcggcggagatccggataaaatcaatcctgaaataccggtagaccttgtcatcgaccactccgtacaagttgacaaagcgggtacggaagatgcattgaccgttaatatggaccttgaattccaacgaaatgcagagcgttacaaatttttaagctgggctaagaaagcgtttaataactatcaagctgttccccctgctacaggtattgttcaccaggtgaaccttgagtatttggcaaacgttgtccatgcagtggaagaagacggcgagattgtcacttatcctgacacgcttgtcggtactgactcccatacaacgatgatcaacggaatcggcgttctcggctggggcgtcggcggaattgaagctgaagcaggcatgctcggccagccttcatatttccctgtacctgaagtaatcggtgcgaagcttgtcggaaagctgccgaacggtacgacagcgacggaccttgcgcttaaagtgacacaggtgctgcgtgaaaaaggcgtagtcggaaagttcgtcgaattcttcggtccgggtgttgcggaactaccgcttgcagaccgtgcgacaatcgcaaatatggctcctgaatacggcgcgacttgcggtttcttccctgtcgatgaggaagcattggaatacatgcgtttaacaggacgtgatgaagaacatatcaatgtggtgaaagaatattgccgtcaaaacggactgttctacacgcctgatcaggaagatcctgtatttaccgatatcgttgaaatcgacttgtcaaaagttgaagcgaacctttcaggtccgaagcgtcctcaggatctcattccgctgactgacatgaaagaaacgttccacaagcatttggcaagccctgcgggcaaccagggattcggtttaaacgcgagcgaggctgacaaagaaatcaaatttaagcttgaaaacggcgaagaagccgtcatgaaaacgggtgcgatcgcaattgcggcgattaccagctgtacaaatacatcaaacccttatgtcttaatcggtgcgggcctcgtcgccaaaaaagcggttgaactgggattgaaagtaccgaactatgtgaaaacatctctcgctccgggttcaaaagtcgtaacaggctacttggttaattcaggcctgctgccgtatatgcgcgagcttggatttaacatcgtcggctacggctgtacgacatgtatcgggaactccggaccgcttgcgcctgaaatcgaaaaagcggttgccgaaaacgacctgctgattacgtctgtcctttccggtaaccgtaactttgaaggccggattcatccgcttgtcaaaggaaactacttggcgtctccgcctctagtcgtggcctatgcattggcaggtacggtagatatcgacctgaaaaacgaaccgatcggcgtcggcaaagacggtcaaaatgtgtacttcaacgatatttggccgacgatggacgaaatcaattccgtcgtgaagcaaaccgttactcctgagctgttcagaaaagaatacgagcgcgtgtttgatgacaatgaacgctggaatgcgattgaaacaacggatgaagccctgtataaatgggatgaagagtccacttacattcagaacccgccattctttgaaaacatgtcagttgagccaggtacagttgaaccgcttaaaggcttgcgcattgtcggcaaattcggagactctgtcacgacagaccatatctctcctgcgggagcgatcggcaaagacacgccggccggaaaatatttgcaggaaaaaggcgtttctcctagagacttcaactcatatggttcaagacgcggaaaccatgaagtcatgatgaggggaacattcgccaacatcagaatcaaaaaccagatcgctccgggcactgaaggcggttatacaacgtattggccgaccggagaagtgatgtccatttatgatgcctgcatgaagtataaagaagacggcacaggtctggtcgtcattgccggaaaagactacggaatgggttcttcccgcgactgggcggcaaaaggaacaaatctgctcggcatcaaaaccgtcattgcagaaagctttgaaagaattcacagaagcaaccttgtgctgatgggcgttcttccgctgcaatttaaagagggagaaaacgctgaaacgctcggtttgaccgggaaagaaacaattgaagtagacgtgagtgagacggtgcgcccgcgcgatctcgtccaagtcaaagcgattgccgaagacggcacggtcaagtcgtttgaagctgttgtccgctttgacagcgaagtggaaatcgattattaccgtcacggcggaatcctgcaaatggtgctccgcaataaaatgaaacagtaa

SEQ ID NO: 2188 - DNA, 504 bp, Bacillus licheniformis
atgaaaaaagtgctggctgccgcgtttcttttagtcttggccggtcttgcggtttggaattttacagggcaaaaggaagccgaaatcggcattgagaaaggagacaaggcgcctgattttacgctgccgtcattaaagaatggaaacgatgtatctttgtcagactttaaagggaaaaaagtgctgttaaatttttgggccacctggtgtagaccgtgtgaaaccgaaatgcctgcaatggaagagcttcaaaatgaaaatcaggacattgccgttttagccgtcaactttacatcttccgagaaaaacgaaaagacggtcaaagcgtttgccgaaaggcacggtttacatttccccatcgtcttagaccgaacgggcatcaatgcgaaatacgagattttttcatatccgacgacatttatcattgatgaaaacggaatcattaaagatatcgtgctggggacgatgtcgaaaaagaatatggaagaaaagctgggattataa

SEQ ID NO: 2189 - DNA, 126 bp, Bacillus licheniformis
atgaaaaaagcgaaaaggcgaacatttgaagaacttgtctcggaaaataaaaaggagctcatgaccaaccaggagtttcttgatcggctggaagataagcttgaagagaaatttaagctgaagtga

SEQ ID NO: 2190 - DNA, 144 bp, Bacillus licheniformis
atgccgagagaacacgacaaacagtctaaatttgccccgagccatcttgggacaaaaccggtagaatataagcgcaacaaaggaaaaaagatgcatgataaatcaggagaaacaccgatcattatgcagacaaaaggcgagtaa

SEQ ID NO: 2191 - DNA, 237 bp, Bacillus licheniformis
atgacacatcaaaaacatcatccggatgacagatcagacaacgtagaaaagcttcaagacatggtgcagaacacaatcgaaaacattgaggagtctgaagagcagctgtcttttgccagcgaggcggaacaggaacagatccgcgaaaaaaatgaacgccgaaatgaaagcattgaggcgatgcgcaatgaaatccatgacgaggcggaagcccgcaaaaacggatatcatcaataa

SEQ ID NO: 2192 - DNA, 417 bp, Bacillus licheniformis
ttgtacgtctcaaaaaaagaaatagaagtccgctatgccgaaacagaccaaatgggtgtcgtctatcacgccaattatttgatttggatggaggtaggccggacggctttaattaaagaactcggcttttcttatgccgaaatggagaaagacggcatcctgtcgcctgtcgtggatatcaatgtccgctacgtcaaacctcttcgctacggtgaaacagcgacggtacatacgtggattgaagattacaacggctttaaaacggtatatgggtatgaaatttttaattccgccggagaaaccgctgtgaagggaacatcgtcccatatttgcgttgacggggacagcttcaaaccggttcagttccgcaagctttatccaaagtggcatgaagcatacgaagaggccaaaaagtaa

SEQ ID NO: 2193 - DNA, 303 bp, Bacillus licheniformis
atggcgttcggtattaaaagaaacgagctgaacgaatggaagcgcgccgttttaaacggcgaagttgcgtttcttacgcattactggctcgatgacaggtatccggatgtcaaaacggtgacaaaagcaggatgcgcgaacattgagaagcttgcagagtggggcaaacagtacggactgaaaaaagagtggattgataaaagaagcgaatttccccactttgatttattgggagagaagcagatcatgattttaaaacaagaaaagctctcaagccatatcaagcgtttcaggcttgaataa

SEQ ID NO: 2194 - DNA, 138 bp, Bacillus licheniformis
gtgattgaaacagatgatgacaatataactgaaactaaagatacgtttttgctcatcaaaatgaaacaagcaagaacaatgcttgcttgtttcaaggatgtccgagtttctttaaaacaccgtattattcaagcctga

SEQ ID NO: 2195 - DNA, 360 bp, Bacillus licheniformis
atgaaatggtttttaggaattttaacggcaggactgataattttggtcgggggctactttttatattccggatattattcaacggaagattattacgtcaaaattacaacagatccaaaagtcgtgaaagaaaaagcaagtgatggatacacatatataaattataactatgatgttacgggttatgataaagatgggaaatccaaaaacctaaagctctcttctcaagaaaaaatacagaaaggtcagtactatattattcattggaaagatagaagggaaatcatatccagcaaagaaaaagcgagcgagaagcaaatagataaggacatcctgcataaattagacaatcaaaattaa

SEQ ID NO: 2196 - DNA, 165 bp, Bacillus licheniformis
atgttttcaaagcaaaaggacatctttccggcgaagatgtcctttgaaaatatccatcattatctattgggacttccatcaatatatctctgcacccttgttggggatgactgcaatagaaagtgtgccatccggacaaaccaaaatctcaagacgcatttttga

SEQ ID NO: 2197 - DNA, 1032 bp, Bacillus licheniformis
atggtttacggtgtgacaacttttattttactggctgtttttctgatcttttatttaacggaccgaagaaggatcatcaacggttttttattcaatctatttttttgttcatttcttgttctttcctactatctggcatacgttgtcggaattggctttttcagacttttcgtcattgtaccgctgctgatctttttctttatcctaacgttcggtctatttgctttaatgatcgggttatttctgaatgcgagaattcttatcaaaagagaaggacgacgattgtctaattgtttgactttaatttccgggctaggcattatcatattttttctattgtcagtgattgaccccgctcgttttttatcgccaaatgttcagccgttgtttgcgggatcatcgcttattgcggtctatttcttctttcatttaacaaatttcttaacagcctattttctatatcaatttaacagaccgaaacttaatcaggattacatcatcgttctcggaagcggattaattaacgatactgtacccccgcttttagcaagcaggatagataaggctgtcgatttttatcggaaacaagcagctgttgctcctccgccgaaaattattttttccggcgggcaaggacctgatgaaaacctttctgaagcagaagccatgcagagatatgctttaaaaaaagggatacctgaagagcacactttcaaagaagaccgttctgtaaatacatatcaaaatatgcttttctccaaacaactgatggactcattatcagacggcaaatacaacagcatcttcacaacaaacaatttccacctgttccgcgccagcctatatgcaaaacgagcaggcttaaagagccaggggatcggttcaaaaaccgctttttattattggccgaacgccatgatccgtgaatatatcgctgttgttgtaatgaatcgtaaacggcatagcattgtcgtaggtactattttaggtttttctataattttgactgctcttaattttttcattgattaa

SEQ ID NO: 2198 - DNA, 129 bp, Bacillus licheniformis
ttgaatatcagtaaaatatcattttttacggcttgcagagaatcccccgtttttctgcaagtttttttatttttcttcgtcattgaagtgccgaaaaaaagccttcaaaatctagggtggcttgcctga

SEQ ID NO: 2199 - DNA, 288 bp, Bacillus licheniformis
gtgaatttgaaaattaatgaagaggcgcttaaatggtataagaacgagcttgatttaaaagaaggtgatcaggttcgcttctttgtccgctacggaggatgcagcaatgttcaaaaaggcttctcccttggggtctcaaaagatgagccgcagcaaatcggtgtaagtgcggaaaaagacggcattacgtttttcgttgaagaaagcgatgtatggtatttcgacggccatgatctgcttgtcacctataacgaatctgcggaagaacctgtttttgaatatcagtaa

SEQ ID NO: 2200 - DNA, 594 bp, Bacillus licheniformis
atgttaatagctttattatttattttagcctatctactcggcagcattccgtccggcttgattgtcggaaaggccgccaaaggaatcgacatcagggaacacggcagcgggaatcttggcgccaccaacgcatttcggacactcggcgtaaaagccggctctatcgttgtggctgcggacattttgaaagggacgctcgccgcctttctgcccgccatcctgcacatcggcgtacaccctttgctggccggcgtagccgcagtcatcgggcatatgttccctgtgttcgcaaaatttaaaggcggaaaagctgtcgctacttccggaggcgtattgctttgctatcagcctcttctgtttctcacaatggttgcggtgttctttctgtttttgtatatcacaaaatatgtatcgctttcttccattttaaccggcttgtatacaacggtttacagtctgtttacgaaagaccttttattggtggcagtcgtcgcctttcttacggcgtttgtcgtatacagacacaggacgaacattaaacgcatcatcgataaaaccgagcccaaaatcaagtggatgtccggcaaaagatga

SEQ ID NO: 2201 - DNA, 414 bp, Bacillus licheniformis
gtggaaaatccttctaaacaggaaatcaaaaccattcttgaaaacagcagacgaattgcggtagtcggcttgtccgacaaccctgaaagaacatcgtacatggtatcaaaagcgatgcaggacgcgggatatgacatcatccctgtcaatccgaccattgatgaggcgctgggcgtcaaggctgtggcatccttaaaagacattgaaggacacgttgatatcgtcaatgtgttcagaagatccgagcatctgcctgatgtcgcaaaggaattcctggagatagacgcagatgtgttttgggcgcagcaggggcttgtcaatgaagaagcttatcagcttctgagcgaaaaaggctatacggtgattatggatttgtgcataaaagtggcacactcgttaacaaaatcggcataa

SEQ ID NO: 2202 - DNA, 1968 bp, Bacillus licheniformis
ttggttaaaaaacagcaagttgactataatgatgattccatacaggtgctcgaaggccttgaagcggtcagaaaacgccccggtatgtacatcggttcgacagacagccggggactgcaccatctcgtatatgaaatcgtcgataattccgtcgatgaagtccttgcgggccatggggatcacattatagtaaaaatacataaagataacagcatatcggtgcaagacagaggccggggaatgccaacaggaatgcataagctcggcaagccgactccagaaattattttgacagtgctgcatgccggaggaaagttcggccaaggcggctataaaacgagcgggggtctgcacggcgtcggtgcatccgttgtaaacgcactgtccgagtggctgacagtcacgattgagcgggacggaaatgtttacaggcagcgttttgaaaacggcggcaaaccggtgacatcccttgataaaatcggaacgaccaaaaagaccggcaccctgattcatttcaagcctgatcctgcgatgttcagcacgacgacgtttaactttgaaacgctttcagagcgtctgagagaatcagcctttttgttaaaaggactaaaaatagaattgatcgatgaacgcgatcaaacaaaagaaacgtttttatacgaaaacggaatcgaagcttttgtcgcttatttaaatgaggagaaagacgcgctttctgaagtggtctcatttgaaggagagcacaacggcatcgaggttgacttcgcgtttcagtttaatgacggctattccgaaaacatcctgtcgttcgtcaataatgtcagaacgaaagatggaggaacccatgagtccggtgccaaaacggcgatgacgagagcattcaacgagtatgcgagaaaggtggcccttttaaaagaaaaggacaaaaaccttgaaggaacggatatcagggaaggcctgtcagccatcgtttccgtccggattcccgaagagcttcttcaatttgaaggacagacaaaaggaaagctcggcacaagtgaagcacggtcagccgttgatgcaatcgtctctgagcagctcgcctattttcttgaagaaaacagggaaacggcaacattgcttgtcaaaaaagcaattaaagcctcccaggcgagagaggctgcgagaaaagcaagagaagaggcaagaagcggaaagaaaagaaagaaatccgaagcgacgctctccgggaagctgacgcctgcacaatcaaggaatccatccaagaacgaattgtatctcgtggagggtgattctgcgggaggatcagcaaagcagggacgagaccggaaattccaggctgtcctgccgctccgcggaaaagttatcaatacggaaaaagcgaagctggccgatatttttaaaaatgaagagatcaatacgatcattcacgcgatcggcggaggggtcggcgccgattttgacattgaggacatcaattacgacaaagtcattatcatgacagatgcggatacagacggcgcgcatatccaagtgctgctcctgacttttttctaccgctatatgaagccgctgatcgagcacggaaaagtgtttatcgcactgccgccgctctataaagtgagcaaagggtcgggcaaaaaagaaatcattgaatatgcctggtctgatgaggaaatggacgacgtcctcaaaaaagtcggaaaaggatatacgatccagcgctataaaggtctcggcgaaatgaacgctgaccagctttgggaaacgacaatgaaccccgagtcaagaacacttgtcagggttaaaatcgatgacgcggcccgggtggaacggcgcgtaacgacattgatgggcgacaaagttgagccgaggagaaaatggattgagaaaaacgtcgctttcggacttgatgaagaaagcaacattttggaaaacgagaatttatcggtcgctgaggaggtttaa

SEQ ID NO: 2203 - DNA, 2424 bp, Bacillus licheniformis
atggcacagccagagatttatcatgatttaccattggaagacgtgatcggcgaccgtttcggccgatacagcaaatatattattcaggaccgggcgctccctgatgcgcgcgacggcctgaagcctgttcaaagaagaatcttatacgccatgcatgcggaagggaacacacacgataagaatttccgcaaggccgcaaaaacggtcggtaatgtaatcggaaactatcatcctcacggagacagctcggtctacgaagcgatggtgcggatgagccaggactggaaggttcgcaacgtgctgattgaaatgcacggaaacaacggaagcatcgacggtgatccgccggctgcgatgcgttatacagaagcaaggctcgcggcgatcgcgtcagagctattgcgggatattgacaaagaaacggtcgagtttgtaccaaactttgatgatacgagcaaagagcctgtcgtccttccggcaatgttcccgaacctgcttgtcaacggatcgacagggatttccgccgggtatgcgactgacattccgccgcatcatctcggggaagtgatcgatgccgtgattaagcggatcgactcgccgaactgcagcgtggatgacctcatggagttcgtaaaaggtccggactttccgaccggaggaatcatccaggggaaagaaggcataaaaaaagcctatgaaaccggaaaaggaaaaatcatcatcaggggcaaagccgagatcgaaacaatcagaggcggccgccagcaaattgtcattactgaaattccgtttgaagtcaacaaagcgaatttagtgaaaaaaatggacgaattcaggattgaacggaaggtcgaagggatttcagaagtccgtgacgagaccgaccggacaggcctcagaatcgtgattgagctgaaaaaagaagcggatgcacaaggcattttaaatttcttatacaaaaacacggatttgcagattccttacaactttaacatggtcgccatccataacagaagaccgatgctgatgaatctcacatcgattttggacgcttatatcggccaccaaaaagaagtcatcaccaaccgttctcagtatgagctgaaaaaagcgaaggaaaggcatcatatcgtagaaggcttaatgaaggcactgtccattttggatgaggtcattgcgacgatccgctcctccaatgacaagcgcgatgccaaaaacaatctgatcgaaaagttcgcatttactgagccgcaggctgaagcgatcgtttccttgcagctgtacaggctgacaaacacagatattacggccctcgaggaagaagcaaaagaactggaccagaagatcaaagagctggaagagatcctttccaatgataagaaacttttgaaagtgatcaaagacagcttgaaaaaggttaaaaatacctatgccggtcaaaggcgctctgtcatcgaagaaaaaatcgaagaaattaaaatcaaccttgaagtgatggtggcgtcggaagacgtttatgtgaccgtaacgaaagacggttatattaaacgaacgagccagcggtctttcgccgcatcaaacggccaggacttcggcatgaaagataccgaccgtctgctctgtcagctggaaatgaatacgacagacgttctgctcttgttcacaaataaagggagctatgtctattgtccagttcaccagctccctgatatcagatggaaagatttaggtcagcatataacgaatatcatatcgattgacagcgatgagtccatcgtcaaggcgattcctgtcagagagtttaccgaatctgaatacctgctgttctttacgaaaaacggaatggcgaaaagaactcagctgatgcagtataaagcacagcgctattcaaaagcactggttgcccttaatttaaaaggcgacgatgaagtggtcgatgttcatgtaacggacggaacgaaagatttgtttattgcgacacattccggctacggtctgtggttcacagaagatgaagtcagcgtcgtcggcgcaagggcggccggtgtcaagggcgtcaatttgaaagacggcgactttgtcgccagcggacaggttttagaggaaaaagacgtgcttgtgctcgtgacccagcgcggatctattaagcggatgaaccgcagcgaatttgaaaaaacgtcaagggcgaaacgaggggttctcatgctgagggaactgaagaaaaaacctcaccgcattgccggcctgctcgcatgttcatatcatgatcaaatcacgcttcaaaccgaaaaaggcatcacagaggagatgcttgtcaaagaaatcaagcttcatgaccggtacagcaacggttctttcatcatcgacgaagatgaagcaggggaagtaacggatgtatggatcagcaaacatgagctggagtga

SEQ ID NO: 2204 - DNA, 135 bp, Bacillus licheniformis
atgtatggatcagcaaacatgagctggagtgaaatcgaacagcacgccgttgatcattcaatatctaggggcgtcaccacatgtctatcaagccgtttcaatgctcagaaaaagagcatgccggataaaccttaa

SEQ ID NO: 2205 - DNA, 120 bp, Bacillus licheniformis
atgttcactaaaggcgcgaacacggactgggttgttttactctggtatcaattaagcaaagaaatgttgaatcagaaaaacgggcgaaaatctcaccgaagagaaaaaatcagtctctga

SEQ ID NO: 2206 - DNA, 1092 bp, Bacillus licheniformis
atgaaaccaaagtataaggtcatcattaatgacataaaaagtaaaatactttcaggagtttacagagcgggagaccaaattcctactgaatccgccatacaggaagagtacaaagtcagccgccacactgttcgaaaagccattttagaactatcgaacgaaggattcttaagaagtgaaaaagggtctggcacttatgttagtaaccagtatcaatcaaaagccggcgggaattccaataacaaaataatcggtgtaatcacgacctacatttctgattacattttcccctccattattcgtggaattgaagggagattgaatgaggctaattattcgctactattagctagtacaaataatgatgtcgaacaagaaaaaaaagctttggaaatgatgctgtcatttggcgtagatggtttaattgttgaacctacgaaaagcaatctgtacaatcccaatattgcctactacctatcgtttaaggaacaggatattcctttcatcatgatcaatgcttattatgaagaattagatgttccttttctttgtctcgatgacgtgcagtcaagctatctcgcaacaaaagaattaatatcaaaaggacatacacaaattggtctcatttcaaaaatggatgatttacaaggaaagtatcgaatgaaggggtatataaaagcgcttggtgaagccaaattacgattttacccggagcatgtgctttcgtacaatacagagacgaagctggacctatacacagacctgaagaagtttctaaatgaaaaaagagacgtgttgactgcaatcgtctgctacaacgacgaagtagggctggaagtagcaaatgtatgcagacaacttaatatttctatcccggacaaattgtcaattattggtcatgacaattcgtatatcgccaaaaatgcgaatatcaaactaacaacattgacccatcctcaagaacaaatgggacacgatgcagctgattgggtcattaaaaaattacaaggaaagaaggatttaccaaacgaaacctactatcaacctgtgttagttgaaggagaaaccgtaaaagagttagaaatacaataa

SEQ ID NO: 2207 - DNA, 1608 bp, Bacillus licheniformis
gtgaaagcgaatcgagtaaacatcaagcaagccataactgagggagaaacatcacttggaattgaattcggatccacacgtattaaagcagtgttgattgatagcagttttgaaacaatcgcatctggaagctatgagtgggaaaacctcttggaagatggattttggacgtacaacttggtagatattatcactggattgcaaacagcttatagtgaaatgaagaatgaagttgaacgaaattatggcatcaccattcgcaaaatcggttctattggaatttctgcaatgatgcatgggtatatggcttttgacaaaacaggggagctgcttgttccgtttcgaacttggcgtaactcaacaaccggtgctgcagcaaaagaattaactgatcaatttcaattcaatatccccgaacggtggagtattgctcacctttatcaagcgatattaaatgaagagaagcatttgcctcgcattgactatatcaccaccttagccgggtacattcactggttactgactggtaataaagcaattggcattggagatgcttcgggcatgttcccgattgatgaatcaacgcaaaattacaatgaatcgatggtcaagcagtttgatgaactgatttcgaacaaaggctaccctaggaagctgaaggatattcttcctaaagtttatatttcaggcgagcaggctggtgaattaaccgaaattggtgcaaaaattctggatcagtcaaaaaatttacaaccaggcattccaatttgtccaccggaaggcgatgctggaacaggaatggttgctacgaatagtgtgaggaaacgcactggaaacatttcggtgggaacttcagtttttgccatgattgtattagaaaaagaactttcaaaagtatatccagaaattgatttggtcacaacgccaaacggcagtccggttggaatggttcatgcgaataactgctcaagcgatattaatgcttggctaggattgtttcgtgaattttttgaagcaatgggacaaaagattgaaacgaataaattattcgaagtgatgttaaataaagctttggaagctgactcagatggcggcggtttgctaagctacggctatttctccggtgaaaatattacgggattagaaaaaggccggccattatttgtccgctcaccagagagtcgtttcaatttagcaaacttcatgcggacacacctttttacagcctttgctgctttgaaaatcggaatggatattttgaccaaagaggaaaaaattgaaatcgatagcattttagctcacggcggtttattcaaaacccctcttgtcggacaaaaaattgttgcagctgcaatgaatacgccggtatcagttatggaaacagccggagaaggcggtgcgtggggaatggctattcttgcttcttacatgatgaacaaaggtcaagaagagagcttagaagacttcctcgacaaaaaagtctttgaagaggatgccgggcaggaaatttaccctgatcaattagatgtagaaggatttgaagcatttatcgaacggtacaaaaaaggtttaatgattgagcaggccgctgtagaccatttgatttaa

SEQ ID NO: 2208 - DNA, 696 bp, Bacillus licheniformis
gtgctagaacaactgaaagaagaagtattacaagcgaatttggacctgcctaaatacggactcgtgaaatacacatggggaaatgcaagtgccattgaccgtgaaacaggtctattcgttatcaaaccgagcggtgttgattatgaaacgatgaaagctagtgatatggtggttgttgatttagatggcaatgttgttgaaggagagctgaggccttcatcagatacagcgactcacgcagtgctttataagcgctaccctgaaattggaggaattgtacacactcattcaacttgggcgacaatctgggctcaagcaggccttgatgttccagcgatggggaccactcatgcagacacattctatggttccgtaccatgtgcccgttacttgacacaagaggagattgatcgcggttacgaagcagaaacaggtcatgtgattatcgaaacatttgaggagcgagggttagatattttagctgttcccggtgtcttacttcacggtcatggtccatttacttggggcaaagatgtaaaatcagccgtattgaatagtgtggtgttggaggaagttgcgaaaatgaatttatttacaagagaattaaatctttttgcaaaagaattaccacaacgtattttagataaacattacttacgaaaacacggtaaaaatgcttattatggtcaaaagtaa

SEQ ID NO: 2209 - DNA, 1425 bp, Bacillus licheniformis
atgttaacaacagggaaaaaagaattttggtttgtcgtaggttcacagcatctttatggggaagaaacgttagcggaagtcagagcgcacgcgcaagccatgaccgatgcattaaatgaaagcgctgttttgccatatccgcttgtattgcaagatttggctgttaatgcagataaaatcactagcatcatgaaagaagtaaattatcgtgacgaagtcgccggtgttatcacttggatgcatactttctcgcctgcgaaaatgtggattcgcggaacaaaattattgcaaaaaccattacttcatttagcgacacaatttaatgaaagtattccatggccaacgattgacatggactttatgaacctcaaccaatctgctcatggcgaccgtgaatacggttttatcaatgcccgtttgaaaaaacaaaataaagttgtcgtaggttattgggagcgacctgaagtgcaacagcaaattgcagaatggatggacgtagcggttgcttataacgaaagcttcaacatcaaggtcgctcggtttggtgacaacatgcgtaacgttgctgttactgaaggggataagattgaagcgcaaattcaatttggctggacagttgattactttggcatcggtgatcttgttcaatacgtgaatgcggttacagatgaagagattaatcgtttgtttgcagaatacgcagacctttatgaatttgattatggcacttacagtcgggaagattgggagaagagtgtaaaagtacaagcaagctatgaaatcgctattaaacgtttccttgatgatggtggttacaatgctttcacaactaactttgaagatttatatggaatgaaacagcttccgggtcttgccgtccaacgtttgatggcgcaaggatatggctttgccggtgaaggagattggaaaactgcagcgctcgaccgcttgctcaaagtgatgagccgtaaccaatcaactggttttatggaagattacacatatgaattggctgccggtcaagaatcaattcttcaatcgcatatgcttgaagttgacccatctttagcaagcaataaaccaaaaattatcgtctctccattaggtattggtgatcgtgaagacccggcacgcctagtgttcgacggaaaagcaggagatggcgtggttgtttcaatggcagactttggtacgcactacaaattgttgattaacgaagtttctgcatttgaaccaactgttccagcaccaaaccttccagttgcacgggtgctttgggaagtgaagcctaacttccaagatggagtgaaagcatggcttgagaatggcggcggccaccatacagttgtttcattgaatttaacaacagaccaaatgatcacttatgcaaagctcgttgacttggaatatgtagtgattaagtaa

SEQ ID NO: 2210 - DNA, 1395 bp, Bacillus licheniformis
atggttaatgaaaagaaaatctcaagtggcttcatttacttttttggggcttttgcgggcattcttttcggttatgatatcggcgttatgacgggtgctttgccttttctgcaaaatgattggaaccttcaagacaacgccggggttattggatggattacctcttcggtaatgttaggcgctatttttggaggcgcccttgccggacaactttctgatcgtttgggacggcgcaaaatgattttaatttccgctatcatttttgttgttggatccattttgtcaggaatagcacctcataatgggatactatttttgattgtttctcgggttttattgggattggccgttggtgccgcttctgcattggtcccagcctatatgtcggaaatggcgcctgcacgtttacgtggacggctgtcaggaattaatcaaacaatgatttgttctggaatgttgctttcttacattgttgattttctattgaaagatttgccggaaacaatggcgtggcggttgatgcttggtttggctgctgtacctgctttgatcttatatgttggaatgctaaaattacccgaatcaccacgttttttaataaagaacaataaacttgatgaagctcgcaaggtgttgagctatattctctctaacaaaggagagattgattctgaaataacgcaaattcaagaaactgccagagaagaagcgaaggcaaatcaaaatgcatcatgggctaccctcttaagcaataaatatcgttttttattaattgctggtgtgggtgttgctgcttttcaacaattccagggtgcaaacgcaattttttattacattcctttaattgtagaaaaagcaacaggaaatgcagcaagttcagctttgatgtggccgattattcaaggagttattctcgtgctaggttcattaatattcttagtgattgctgataaatttaatcgccgtactttattaacagtaggcggaacaataatggggctgtcctttattttgccggcaatattgaatatattaattcctaatgcgaatccgatgatgatggttgtctttttgagtatctatgtagcactttattcattcacatgggctcctttaacttgggtcatagttggagaaattttcccgctggtaattcgcgggcgtgcgtctggtttagcttcatcatttaactggattggttctttcttggttggattgctatttcctgttatgaccgcttcgatgtctcaagaagctgtgtttgcaatcttcggtgtgatttgtttgcttggagttgtatttatccggacacgcgtccctgaaactcgaggtcgcagtttagaggaaatcgaaaaaaatggagaaaataaacgagttgacggaaaaagcgcgtaa

SEQ ID NO: 2211 - DNA, 126 bp, Bacillus licheniformis
atgattgcccaggtccctttatctgttgaaggacggctccatcatttaggatataacgaagcgggacaattgagcggaaatgatacaaacaagaggctaattttaattaaaaaaaggccgaagtga

SEQ ID NO: 2212 - DNA, 783 bp, Bacillus licheniformis
atgagtaaagtatctggaaaaattgcttttgttactggcggcggtcaaggaattggagaagcaatctgcaaacgattggcagaggacggattcgcagttgcagttgccgattataatgtagaaactgcaacacaagttgctgaggacatcaataagcttaacggcaaagcaattgcggttaaagtggatgttgctgatcgcgatgatgtttttaaagctgtcgatgaaacagtaaaacgtcttggcggtcttgatgtggtgattaataatgcgggtcttggaccaaccacccctattgaaagcattacatatgaagattatcggaaagtctatgatgttaacgttggcggtacttattggggaatacaagcagctgtaaaagcctttaaagaacttggacacggcgggaaaatcattaatgcatcttctcaagccggccaagtcggcaacccgggcttagcggtttacggaggaacaaagttcgctgttcgcgggattacccaaactgcggcaaaagatctagctgaattaggtattactgtaaacgccttttgtccgggtatcgttaaaactcctatgatgatggggattgcacagcaaaccgctgatgaagcaggcaagccgtttgaatggggcatggaacaattcgctaaaaatattgcattaaaacgcttatccgagccggaagatgtagcagcatgcgtttcttaccttgcagggccagattcagattatatgactggtcaagctcttatcattgatggcggaatggtatttaattaa

SEQ ID NO: 2213 - DNA, 126 bp, Bacillus licheniformis
atgttatttatcataagaatggtgattattggactattttcattgacagcaatcaatctgtttgtttttcaaggaattgaattcatgcacgcgattaccgatcttttcaatcgccaggacagctga

SEQ ID NO: 2214 - DNA, 345 bp, Bacillus licheniformis
atgaaaaagacattgtttctgcaactgtccatattctttttagtcattgcgagccttcattcgttctcaatgccccagatgccggcaaatcaccatgcgcaaaaagccgctgtttcaggagacgaactccatgaactgacagtcggaaaatatggtgaagaaaaggcgaaatcattatggaattcactcggtttcggagctgaatccgtccttctcttaatcttagctgccgcttccggtcaagcgttcatgatgaacaggcggaaagagcatctgaaggcatttatgctcgcggtgttctatcactcttcttatttcgataaagcgcatgttttaaaaccataa

SEQ ID NO: 2215 - DNA, 1413 bp, Bacillus licheniformis
atggaagaaattttaagcgaaatcatcaatgtcccgagcggttttatttggacttatttagtctatatattaataggaataggcctgttctttacgtttaaattgaaattcgttcaattccgctatttcttcgagatgtttcgtatcgtcggacaaaaagaggagaaaggaaaaggcgtctcgtctttacaggcattctttatttccgccgcttcccgtgtcggaacgggtaacctgaccggtgtggcgcttgctgttgcaacaggcggaccgggagcggtcttttggatgtgggtcgtcgcgcttgtcggaatggcttcaagctttgtggaaagtacgctggctcaagtctacaaggtcaaagacggcgatcatttcagaggaggccctgcttattacatggaaaaagcgctgggcgccagatggatggggattatctttgccgttttaattacaattacattcggcttgatttttaatgcggttcaagccaacacgatcgtcggttcgatgcaaggggctttcaacctggataaaacagtggtaggcatcatccttgctgcaatcaccggatttatcattttcggcggattgaaacgcgttgtgacagtttcgcagttgatcgttccggtcatggcgatcatttatcttggacttgctttatttgtcgtgctgacgaatatttctcaaataccggccgttttcgcgatgattgtgaaggatgctttcgggatcgagcagattgcagggggtacgctcggcagcatcattattatcggtgcgaagcgcggtttgttttcaaacgaagccggaatgggaagcgcgccgaacgcagcagcgactgccaatgtctctcaccccgcgaagcaaggctttatccaaacgcttggcgtattctttgatacgatggtcatctgcagtgcaacagcctttatgatcctgctgttcaatctgacgcctggcaaagagcttgacggcattcaaattacacaagcagccatgcagcatcacattggaagctgggcgcctgcatttgtcgcagtggcgatttttctgttcgctttcagttcaatcgtcggaaactactattatggtgagacgaacattgaatttattaaaaagagcaagacggcgcttgctgtttaccgtacagccgttgtagcaatggtgatcttcggatctgtatccggtttccagcttgtgtgggacatggcggatttatttatgggattaatggcgatcattaacctgattgcgattctgcttctttccggaattgctgcgaaagtgctgaaagactatactgaacagcgcaaagcaggaaagaaccccgtctttaaggcaagctcgattccaggtctgaaaaatacagaggcttgggaagacgagaaggaaacattgcaatcgaaataa

SEQ ID NO: 2216 - DNA, 345 bp, Bacillus licheniformis
ttgtatccatacgatccttcactatatgatccgtatcgccagcaatttccgccggggccgcctccgggagcaggaggacagcagcaacagcagctgctccccccgccgccgagccaatttccgcaagactccggcccttcggtatttgccgttgatcctggcggaatcagaagatgcctgttcagatacacgttcatccgcttgagaaacggcagccgtttttggttctacccggttttcgtcggccgtcgttcgattgcgggctaccgctggaggccgcgtcaattccgctgggtttacttcggtattgacctgaacgagatcacttctttcagctgtcagtaa

SEQ ID NO: 2217 - DNA, 687 bp, Bacillus licheniformis
atgatcgaacaaatactgtgggtcatcctcccctacattgtcatcaccatttttatcggagggcatatataccgctatcaacatgatcaatttggctggacggccaaatctagcgagatgctcgaaaagaaaaaacttgcgcttggcagcagccttttccactggggaatcttttttgtcatcggcggacatgtgatgggaattttaattccggaaagcctttatgaggcgctcggcgtttcagagcatatgtaccataagatcgcgatcggcttcggactgcctgcaggcatcgccgcgctgtcagggcttctcatattgacctaccgccgattcacggacaaacggattcgaaaaacgagctctgccggcgatttaatcacccttgtcgctttgttattcgtgatgaccactgggcttgcggcaaccttcttaaacatcgattcaaaaggattcgactacaggacaacaatcggcacgtggtttcgcaacattttcttattcaagccggatgccgggcttatggcgagcgtgcccctctggtttaagcttcacatcatcatgggctacgtcattttcatcgtctggccgttcacccggctcgtccacgtattcagcatgccgctaaaatatttgacaagaagctatgttgtttaccggaaacgggcgccccgcaaaagcatgtaa

SEQ ID NO: 2218 - DNA, 543 bp, Bacillus licheniformis
atggatggaacagacaaacaaaccgtttttgccgctctttcttacctcctctcctaccctgatgaagagtggagaaaagaacgttccgaatggcagcagatcatcggcgaaatcgagcatgaagcgctgaaaggacatctgcttgccttcttggaaagcgcggcttcctattcgtctgaggaattgattgaaacatacgtatatacgtttgatttcggcaaaaaaacaaacctttatgtcacctatttcaactccggcgaacaaagggagcgcggtattgaattgctgcagctgaaagatctgtatcagcagtccggttttcagccgacagataaagagctgccggattatctgccgctcatgcttgaatttgccgcagttgcggatcaagaaaaagctgctgctgttttccaaaaatacgcagcaaacctggaagaattgagatcgcagctttcagagaatgaaagcatctatacaccgttattggacggattaatgctgatcttagaggaaattggtgttgaaaggaatgtacagccatga

SEQ ID NO: 2219 - DNA, 1470 bp, Bacillus licheniformis
ttgaagattaaagcgcaaatcggaatggtaatgaaccttgacaaatgcatcggctgccatacatgcagcgtcacatgcaaaaacacttggacaaaccgttccggtgcagaatatatgtacttcaacaacgtcgaaacaaaaccgggcatcggctaccctaaacaatgggagaaccaggataaatacaaaggcggctgggagctgaaaaaaggcaagctccagcttaaatcaggcgccaaagcaacgcggctcatgaatttattctacaacccgtatcagccgacgatcgatgactactatgaaccttggaactatgattatgaaacgctgacaaacagtccggagaaaaaacatcagcctgttgcaaggccgaagtcttccattacgggagacttcatgaaccttgaatggggtccgaactgggaagacgatcttgccggcggccacattacaggcctccaagatccaaacgtcaaaaaaatggaagaatccatcaaaaccgaatttgaagacgtctttatgatgtatctgccaaggatatgcgaacactgcatcaatccttcctgcgtctcctcctgtccgtcgggagcgatgtacaaacgcgaggaagacggcatcgttctcgtcgatcaaaatgcgtgccgctcatggagacactgtgtatcatcatgtccttataaaaaagtgtatttcaactggcagactaacaaggcggaaaaatgcacattgtgcttccctcgtcttgaagcaggactgccgacaatctgctctgagacatgcgtcggcagaatccgctatctcggagtcatgctttatgacgcagaaaaagtcgaagaagcggcttcagccgaaaatgaaaaagatttgtatcactcacagctggagattttccttgacccgaatgatcccgctgttgcagaagaagcaaaagctcaaggcattccgctggagtggattgaagcagcgcaaaaatctccgatctacaaaatgatcatcgattggaaaatcgctctgccgctgcatcctgaataccggacattgccgatggtatggtatattcctccgctcagtccgattatgaatatgtttgaaggaaaaggaacagcccaatcagctgaagatatcttccctgctattgatgaaatgcggattccgatcgaatatttggccaatttgctgactgccggtgatacacaccatattagaacgacattaaagaaaatgtctgtgatgcgtatgcacatgcgggcgacccaaacgaacaaacagatcgattcatctctgattcaagataccggattgactgaagagcagattgaagacatgtaccgtctgcttgcaatcgccaaatacgatgaccggttcgtcattcctcaaacccatcgcgaagaagtcgcggatctatacatggaacaaggaagctgcggattatcgtttgccggaggacccggctcttgccaaaacatataa

SEQ ID NO: 2220 - DNA, 3687 bp, Bacillus licheniformis
atgaaaaaaaagaaaaagagtcccattttcaggagattaaattatttctcccctattgaacgccattccaatcaacacagccaaaccacttatgaagaccgggattgggaagatgtatacagaaatagatggcagcatgataaagtggttcgctctacccatggggtgaactgtacaggatcctgcagctggaatatctacgtcaaaaacgggatcgtcacatgggaagggcagcggcttgattacccttcgacaggccctgatatgccggactttgaaccgcgcggctgtccgcggggagccagcttttcctggtatatatacagcccgctccgcgtgaaatacccgtatgtacgcggtgtgctgatccagatgtggcgcgaggcgctaaacagcagcaaaaatccgcttgaagcatggaaatcaattgtcgaaaaccctgaaaaagcgaaagcctataaacaggcgcgcggaaaaggcggatttgtccgcgccgaatggagcgaagtcctgaagctgatttcggcttcccttctgtataccattgccaaatacggccctgaccgcaatgtcggcttttcgccgattccagccatgtcgatgctcagccatgcagcaggatcacgctttatgtccctgatcggcgggccgatgctgagcttctatgactggtatgccgacctccctcctgcttcaccgcaaatttggggagatcaaaccgacgttccggaaagcagcgactggtacaattctggctacatcatgacatggggctctaatgtcccgcttaccagaacgcctgacgctcactttttagccgaagcccgctataaaggagcaaaagtgatttcgatcagcccggactttgccgagtcctcaaagttttccgatgattggctgagcatcagacaaggcacggacggcgcactggccatggcgatgggccacgttattctgcaagacttttatgtcaaccagaaaacggaacgttttattgattatgcaaaacaatataccgatttcccgtttttggtgactttgaaagaggaaaacggaacgttcacagcaggccgcttcctccatgctaaagatatcgggcgcgcgacagagcacgatgagtggaagcctgccgtttgggacgaagacacagatggatttgcgattccgcagggcacgatgggctcccgctgggacggcaaaggaaaatggaacctgcgcatggttgatgaggattcagaaaaaccgatcacacctcggctttccatgcttggatacgaagatatgatcggcacggtcaacatcccgtatttctcacatgacggcaataaagtgcttgaaagaccgcttccgatcaaaaaagtcatcttgaacggcgaggaagtctttgtttccaccgttttcgacctgactctcgccaactatggcgtcaaccgcggaatcggcggacagacgccggcatcatttgatgatcctgaaccgtttacaccggcttggcaagagccgattactggcattaaaagtgaaatggtgatcaagatcgcgagggaattcgcgcaaaatgcgattgacacagagggccgctcgatgatcattgtcggcgccggaattaaccattggttcaattcagacaccatttacagagctgtactgaaccttgtgcttctcgtcggagcccaaggagttaacggaggaggctgggctcactatgtcggccaggaaaaactccggccggccgaaggatggcagacgatcgcgatggccaaggactggggaggccctgccaaactgcaaaacggcacatcatttttctacttcgccaccgaccagtggcgctatgaagatcaggaaatcagcgggctcgcttcaccaatcgcaaaaacatcgcgctacaagcaccatgccgattacaatgtgctggcggcgagactcggctggcttccatcgtatccgacgtttgagaaaaacggcatcgacttgtataaagaagcagaaaaagcgggcgctgagaacgctcagcaagtcggaatctatattgccagacagctcgaggagaaaaagctcaagttttcgattgaagatcctgacaatgaaaagaacttcccgagaaatctatttgtctggagagccaatttaatctcaagctccggcaaaggccatgaatattttctgaaacacttgctcggcacgacaaacggactgatgaacgatgatcaggacagcatccgtccggaagaaatcacttggcgtgacaaagcgcctgaaggcaaactcgatttactgatcaatctcgatttccggatggcgggaacagccctttattcagacatcgtgctccctgcggccacctggtacgaaaaacacgatctcagcagcacggatatgcatccgttcatccacccgtttaatccggcaatcagcgcgccgtgggaagcaaagtctgattgggatatttttaaagcactggcaaaagcggtttccgatctggctgaagaagtggatatggaacctgtcaaagaggctgttgcgactcctcttctccatgacactccacaagaaatggcgcagccgctcgggaaaatcaaagattggagcaaaggcgactgccctgccgtaccaggcaaaacaatgccgcaaattcacgttgtggagcgggattataagcagattttcaataagatgacatcgcttgggccgaatgttgtcaaacagccgtttggtacgaaaggaatgaactggtctgttgaagcggaatataattctctcaaaaaaacgctcggcgtcgtaaaagacgacacgatcgccaagggctgtcccgacatcagtgatgctagacaagctgctgaagcggtattgactctctcttccacttcaaacgggaaagtagccgttaaagcgtgggaatcgcttgaaaaaattacgaatcttgagttgaaagatttagctgaagaacgggaagaggaatgcttcacatttgagcaaatttcagctcagccgaaaacggtgatcacctcccctgctttcagcggttctgaaaaaggcggacgacgctattctccgtttacgacaaacgttgaaaaactgattccgtggagaacgctgaccggcagacagtctttttaccttgatcatgaaatgatgacagaattcggcgaaaacatggcgacattcaagccgatcctgatccaccgccctttcttgaacaagcgtccggatcaggaaggaaaagaaatcgttttaaactacttaacgccgcataataaatggtcggttcacagcatgtattttgattccctgccgatgcttacccttttcagaggcgggccgacagtctggatgaataaagacgatgccgaagaaaccgacattcaggacaacgactggatcgagtgcttcaaccgaaacggtgtcgtcgtcgcacgggccgtgacatcacaccggattccaaagggaatggcgtttatgcaccatgcccaagacagacatatcaacgtgccgggaacaaagctgacgaataaccgcggaggaacccataacagcccgacccgcatccatgtcaagccgacgcagatgatcggaggctacggacagctcagctacggattcaactactacgggccgacaggaaatcagcgcgacctcaatgtcgtgatcagaaaattgaaggaggtcgattggcttgaagattaa

SEQ ID NO: 2221 - DNA, 132 bp, Bacillus licheniformis
atggtttcggcttttcacaaatttgtcacattttcaggagggggaagagggcggacaaaaaaacagcctgcatggaagcgggctgtcgaatggttcaatcgctcgtgttcaaaattctcttttccccgttaa

SEQ ID NO: 2222 - DNA, 1242 bp, Bacillus licheniformis
atgagcgaaatcattaacaatcgggaaacgcagcaaggtctgcctgaggaaaaaaagcagcttctgaaggagatcatcatcgaccttcataaaggaaagccgcttgccgacgtcaaaaaacggttcgaaaaggcattcggctcagtcaatgccgaagaaatcgcccagctggaacaggcgttgatgaaggaagaaggcattacacctgaagagatccaagagctctgctccgttcacgccgctgtgtttaaaggatcgattgaagacattcaccgcgcggacgccgacaagcagcctggccatcccgttcatacatttatgaaagaaaataaagaaatcgacctccttttgaactttaaaatgcagcttcatttggaacgctttgaaaaagaagatcatcgcgacaacattctcaaactgctcgcagacttaaatttgctagctgacgtcgacaaacattacagcagaaaagaaaatcttctgttcccctatttagaaaagtacggaattacagggccaagccaagtcatgtgggctgtcgacgattttatccgcaagagcattaaagaagtgaagcgtttgttggaagagtatacgccggacaaaaaagatgaggtcatccgcgaactaacgtttatcattcaagaaggcacggaaatgatttataaagaagaaaatatcctcttgccgatggcgctcagaacgctgacagaagacgaatggctgaaaatcgcagccgaaagcgacgagatcggatattgcctgactgctccggaaacggtgtggaagcctgaacgccatcagatcaaaacgagcgaagaggcggctgatggctatgtcagactccctaccggtattctgtctgtggatcagcttgaacacatgatgaaccatcttccggtcgatatcaccttcatcgatgaaaacgatgtggtccgctatttttcacacggaaaggaacggattttcgcccggacaaaagccgtaatcggccgaaccgtccaaaactgccatccgccggctagcgtccacatcgtcaacaaacttctggacgactttaaatctggcaaaaaagatgttgaagatttttggatcaaatttaaagacaaatacgtgttcatccgctattttgccgtacgcgatgaaaacggccgctatatcggcactttggaattcacccagaacatcgccccgattcaggagattaacggggaaaagagaattttgaacacgagcgattga

SEQ ID NO: 2223 - DNA, 243 bp, Bacillus licheniformis
ttgcataaaaaaattgatttggacgattccgtttacaaactttgcacattgcatcctgaactaaaagccgtgatgaaggatgccgggtttcaaaatattacaaagcccggcatgctggaaacagccgggcgcatcatgacgattccaaaaggcgcgcgaatgatgcaaatcgaatggaaccatgtcttagacatattgaaagcacacggatttgaccccgtttggaaaggagaaaaacaatga

SEQ ID NO: 2224 - DNA, 1104 bp, Bacillus licheniformis
atgatactttgcgatttcgacaagtctccgtttatcgtcatttgggagctgacaagggcttgcgagctcaagtgccttcattgccgggcatcggctcaaaataaacgcgatcctcgggagctatccctgaaagagggaaaagatttaatcgatcaaattcatgcgatggacaatcccctcctcgtgcttacaggaggcgatcctttaatgagagacgacgtattcgccattattgaatatgccgtccaaaaaggggttcgcgtctccatgaccccgagtgccacgccgaatgttacaagagaagcgattcaatcagcaaaagaaatcgggttatcccgatgggcgttcagcttggacggcccgacccgggagattcatgatcattttcggggaacggacgggtcttttgacctgactatgaaggccattcgctacattcatgaatgtcagctgcctctgcagattaataccgtcatatcctcctataacatcgattacctggatgaaatggcaaagctgatcaaagaattgaactgcgtactatggagtgtgttttttctcgtcccgacaggccgcgcgaagcgggaagatatgatttccccggtggaccatgaaaaagtctttctctggctcagccgtttggcaaaagaagcgccttttgacatcaaaacgacagcagcccagcactaccggcgggtcgtcattcagcaaaaaatgcgggaagcgaaagacccccacatgaaaatccgctatgaacacgcattgcagaaaggaaaaatggatgccatcggcggattgggccgggctccgaaaggtgtgaacgatggcaacgggttcatgtttatctcccatatcggtgatgtatatccaagcggactcctgccggttaaagccggaaacatccgcgaacagccgctggctgagatttaccgcgaatcaccgatctttaaggatcttcgaaatccggacggatttaaagggaaatgcggcgtctgtgaattccgtcatgtgtgcggcggttcgcgctcgcgtgcttatgctctgacaggcgattacctagaaagcgatccgagctgcatttatattccgaaggctttgcgctaa

SEQ ID NO: 2225 - DNA, 150 bp, Bacillus licheniformis
atgaaggcacttgagctcgcaagcccttgtcagctcccaaatgacgataaacggagacttgtcgaaatcgcaaagtatcatctttcatctgtcctttcgtttgcattcatgtgtatcgtagcggaaatgcaggagaaaaaagttaagtag

SEQ ID NO: 2226 - DNA, 467 bp, Bacillus licheniformis
atggaccggtttgactacttattgtttctgaaaaatcttcctatgtttttcggagtaccccttccgatcatcaaaaagctgctgaagaacggtaaggtgatagatatccaaccgtctcagcattcgcgatcgttccttcattcgcaatccgtctattttgttttaaaaggagaagtgcatttttccgacagaaggcttccggaagaatcacggacgatcgccgagtgggaaaaaggcgatgtttttcctattgatcaaaaaggcgaacctttcttatctccgtttatttcagtcaatactgcctctgaaaccgccgtacttgaaataccgtttcataatttcaaaaaaatgatgacttataaccgccaattacagacgaactttctcatgttgctccagcagaatttattttttcataccagctttttttgcgctacctcaactcctccgcagaagacgacgtgtga

SEQ ID NO: 2227 - DNA, 723 bp, Bacillus licheniformis
atgaaagtgttcataccgaagcagcacggcgcctgggcgatgcttgtcatcccgtttattctcggcatgttcgccggaggcgcagatgtaaagcatattccgctgttctgcggatggctgtttctatatcttgcggcatctccggctatgatgatggtgaagaagaaaaatatcgtttactatcaaaaatgggttctcatctacggcattccggccgtcgttttcctgcttatttcggtcctgctggagccgcagcttgtgtatctcggtctgccgctgtttccgctctttctcatcaatctttattatgcgaaaagaaacaacgacagggcgcttttaaatgatatagctgcaatccttgttttcagcgcgggcgggcttgcgagcttctggatgggagcggggaagcttgatggtgaggcatcgtttgtttttatccagtccgctttgtttttcacagggagcgctttttatgtcaagtcgatgatacgtgaaaagaaaaacaatcgattcaagctttattcatggggctaccatgttttcctgccgttcgtctcgctggccgcaggggcaggatgggcggtgatcggcgtagtgccgagcagtcttagagcgtggtttttccacgggaggaaactgtcgattaagacaatcggaatctctgagctggtgaatgcctgtatctttatggccgtgttgatcgtttttctgctgcaaacgtaa

SEQ ID NO: 2228 - DNA, 714 bp, Bacillus licheniformis
atgaacatttctgttagaaaatcagacacagatttgctctcagacgatctgcatcacttgctggaatcgatcagtacgcgacgaaaaatcaggcaggacacattcctttttcaagaagggatggatgcagaggaactgtatcttattcagtcaggacttgtccagatcggcaaattgacgtccgatggcaaagaactgacgcttagaatgtgcaaaaaaaatgatattgtcggggagcttacgctttttacagaagatgcgaaatatatgctgagcgcaaagatcctctctgatggcgaagtgttggtcatcaataaagataagcttgaaaaagaactcattcaaaacggtgcgctgacgtttgagtttatgaaatggatgagcacgcatttgcgaaagattcaatcgaagatccgcgaccttttgctgaatggtaaaaaaggcgcgctctactccaccttgatccgtctcgcaaacagctacggcatcacaagaagcgacgggattctcatcaatattgtcctgacgaaccaggatctggcgaaattttgtgctgctgcaagagaaagcatcacccgcatgctgagcgacctccggaagaacggtgtcatttcaattgaggactcgggaaaaatcgtcatccaccagatcaattatttaaaacgcgaaatcgactgtgaaaactgcccgctcgaaatctgcaatatcgactga

SEQ ID NO: 2229 - DNA, 1185 bp, Bacillus licheniformis
atggcaaatcgtcaaaaaatacaattaccgctgcagtcatttagtttagtcgcaggatttatggtttgggtattgatttcctctttaatgccccacattaagcaggacatcgccctgacagacagcgaggtctcccttgttacggccattccggtcatactcgggtcgcttctcaggattccgctgggctactacacgaacagatttggagcaagaattacattcatgatcagctttttgctgcttctgttcccggttttttggatcagcacagccgattcgctgttcgacttgatccttggcggcttcttcctcggcatcggcggagcggtcttttccatcggggtcacatcactgccgaaatactaccctaaagaaaagcacgggtttgtcaatgggatctacggcgctgggaacgtcggtacagcgattactacgtttgccgctcctgttgtcgcaaaaaccgccgggtgggaaaatacggtgcggatgtacatcgtgttagtcgccgtattcgctttattgaactttatccttggagatcgaaaagaaacaaaagttacggtatctgtaacagagcaaatgaaggcagtctaccgaaatcagacattatggtttttaagcttgttttacttcattacattcggatctttcgtcgcgtttacgatttatcttccgaactttcttgttaatcacttcgggcttgatcccgtcgattcagggctgagaaccgccggatttatcgctgtcgccacttttctgaggcctgtcggcggctggctggcagacaaattcaacccgctgaagctgttgatgtatgtatttgccggctgcaccttgtcagggattttattggccttttcgccgagcctcggactgtacgggtttggggtattaaccgttgccgtgtgcgccggactcggaaacgggatcatctttaagctcgtgccgctttatttttcaaatcaggccggcatcgttaatgggatcgtatcagcgatgggcggcttgggaggatttttcccgcctctcatcctgtcaagcgtttttcaggcaaccggccattatgcgatcggattcatggcgctgtcagaagcggctcttgcaagctttgtgatcgtggtctggatgtattttcaggaagtgaacaaaacatcgtccaaaacgaaggccaaccatttataa

SEQ ID NO: 2230 - DNA, 114 bp, Bacillus licheniformis
ttgctcctttcaaagggaaaaatgaataaatcaatcagcatgtttatcttacaaaaagtctttttaaaacattgtgaattacgtcacacggtcattcgcttgtttcgtgtttaa

SEQ ID NO: 2231 - DNA, 240 bp, Bacillus licheniformis
atgtttataaagcttacccaagaagaaaaacaagcgatcatcgatgaaatcaaacgcttttatgttgaagaaagaggagaagaggtcggagacattgcggcgattcaaatgttcgaattcgtaaaggaaaagctcggaccttacttttacaatcaggccttgaaggacagccgcagagtggtggaagagaaggcagcggcgattgaagaagagctctttgcactggagcgccgtctgtga

SEQ ID NO: 2232 - DNA, 669 bp, Bacillus licheniformis
atggagtttctgaagcaatttatgattttcagcgggttgaatgatgaagagttcaagcaaatcgagcagatcgcggccaagcgcacctatcagccgagaatgtttgtttttatggagggggaagagagggaagcggtatttttcatcaaatccggtcttgttaaagcctttaaaatcgatgaagacggcaatgaacaagtgatttcgattctgcaaaacggggatatgtttccccatgtcggcttttttgacctctccccatacccggcaacggcagaagccgttcaagaaaccgaattgatcgtaatccgcatcgccgattttaatgaacttttgatgaaatttccggaaatgacgataaaagtgatgcaaatcatggggaaaaagattctcgatttgcaagagcggatccagggttttatctcaaaagacgtccagcaccgcttgacacatgtattaatgaagcttgctgctgaacatggcattcctcaagaaaaaggggtctacatcagcctgcccattaccaatcaggattttgcgaacatggtcggaacgtcaagggaaacgattaaccgcacattaaatgaattgaaaaagaaaaatctgctgacagctgacaggagcggaattttcattcatgatacagactggctgaacggctgcaattaa

SEQ ID NO: 2233 - DNA, 2355 bp, Bacillus licheniformis
atggaagtacaaagaaagacggtgcccgttaaaaaagcatcaaaaaacggttttctgaaatccattctcgtctttactttaatcgtaagtttttcggtgctgcttttgggaggctattggatcttcaaaggacttgcaccaagacctgttgaagtgtccgggccaaacggagaggtgctcatgacaaaatcgtctatttcaggcggtcaggccgtatttcaaaaatacgcgctgatggactatggaacgattttggggcacggatcttatatggggcctgattacacggccgaagccctgaaaatctatacggaagggatgcaggattttaaggcggaggcacaatacggcaagcgctttaaacaactttcagatgaaaagcagtccaccatccggaatcacgtcatccgcgaaatgagaaaaaaccgttatgatcgcccatcagatacattgaagctgacagacgcgcaggtctacggcttgcatcaagtgcgcgatcattaccgcaaagtctttacaaaaggagacggctgggggcttgagcccggtttaattaaagaaagccacatgcctgaacgcaacagggcgtgggtcgacagcgaagaccaaatcacgcaggtctccgattttatcttttggacggcatggctttccagtacattaaggccgggcgacgacattacgtacacgaacaactggccgtatgatgaagatgcgggcaacacgatgtcattcgccgccgtttggtggagcggcgcaagcgttaccatcctcattttatttgtcggcattattttattcgtgttttaccgttacaagcttggaatgaaagaggcttaccaggaaggggcgtttccggtatttgatctggataaacagccgctcaccgcttcacaggttaaaaccggaaaatatttcgccgttgtgtcgctgctgttttttgttcaggcgatgttcggggctttgctcgcccactattatattgaaccggacagcttttttgggattgattggatcagggagctgttgcccttcagcatatctaagggatttcaccttcagctggcgatcttctggattgcaacttcatggctcgggatgggtatttatgcggcgccgcttgtcggaggccgcgagccgaaaagacaggggctgcttgtcgacattctgttttgggcgctgatcgtccttgtcggcggaagcatggtcggcgaatggctcggagcgaaaggctttttaggaaacaactggttcttattcggccatcaaggaatggaatatattgaactcggccgcttttggcaggtcattcttgcgctcggcatgctgatttggctgtttatcgtcttcagaggcattaagagcggcctcaagcgggagcctgataaaggcggtttgattcatctgctgttttattcttcgatcgccattccgctgttttacggtgctgcctttttctttaatcccggcactaatattacaatgtcggatttttggcggtggtggatcatccatctttgggtggaagggatttttgaagtctttgccgtcgtggtcatcggctttttgctcgtgcaaatgaacctggtgacgaaaaagtcgactgtcagaacgctctattttcaattgacgatcctgctggggagcggtgtcatcgggatcggacaccattactattacaacgggtcttccgaagtctggatcggcctcggttccgtcttctcatgcctggaagtcatcccgcttaccctgcttgtattggaagcttacgaacaatacaagatgatgaaagacggcggacatcacttcccgtataaagcaacgttctggttcctgatttcaacggcgatctggaatctggtcggcgccggggtattgggctttttgatcaacttgcctgccgtcagctattttgagcacgggcagttcttgacacccgcccacggacacggggcgatgatgggtgtgtacggcatgtttgccattgccgtctggctgtatacgctccgcaatatcgccaaaaaagaagcatggaatgataaatggctgaaaatagcctgctggtcgctgaacatcggcctgttcggaatggtgtttatcaatttgctgccggtcggttttcttcaattgaaaaaagcgtttgaagacgggtactggagctcaagggcgcctgagtttttacagcaggatgcagtgcaaacgctgctgacttggagggccgtgcccgatacgatctttttagccggaatcgtgattttggttgtattcagcatcagagcattattccatctccgcaaaccgacgcatcgggaaggagaagcgctgcctgttaaagacattgcttcagatgaatag

SEQ ID NO: 2234 - DNA, 714 bp, Bacillus licheniformis
atggaagcagtttttgatcaaaatacaaaaacgggtgatattgttacacgttttccaagagccagccggctgctgaaagaatatcgcatcgacttttgctgcgggggcaaccgcccgatcggtgaagcgataaaagagcaggatttaaatgaagaagagatcttagctagaatcaatacattatatcaagagacaaaggcattaaacgcaaaagagacgaactggagtgaagccccgtattcacagctgatcgaccatgtgattcatacgcaccatgcctacctgtatgaggtgcttcctgaactgtcaggctttgttacaaaagtataccgggttcatggcatccatcatccggagctcgcccaggtccatcaattgttccatcagctgaaaacagaactcgaacatcacctcttccaggaagaggaacatattttcccgaaagtgatggcctatgaagagacgcgatcaatggaccgcttagcagaagcggttcagacgatcgacgtccttgaacaagagcatgaagccgcaggcagcatcctgaaggaactgagaagagtgaccaatgactatacccttcctgaaggggcatgcacaacatatacactgacttacttaaagcttgatgaattggaaacggatctttttcagcacattcacctggaaaacaatattttgttcccgcggcttgaagcggaagccaatcaataa

SEQ ID NO: 2235 - DNA, 372 bp, Bacillus licheniformis
atggagcatatatcctggcttacatttacgatgctgattctcgccagttaccggttaactcatttgattgtttttgataagatcacggagtttatccggaaaccgttcatgaagaagaagcagacgattgatgaacaagggcatgtagaaacgaaaaaagtgccgaaatcaaacttcggctatttgctgaattgctattggtgcgcagggatatggtgcgcgttgatcattgctgtcggatatctgattgccccaaaagcgatattcccgttgattttgattttgtcggtcgccggggggcaggcgattcttgaaacgtttgtcggtgtcgccacaaaacttgtcggctttttctccgatttaaagaagtaa

SEQ ID NO: 2236 - DNA, 132 bp, Bacillus licheniformis
ttggcgcttaaaaaatctatctatttcctcttttcgtataaaatgggaggtctgaatactagtgaccgcaagcttttaaaacaaatggccggggactttgcacatcctttttctctcaattctaaattttaa

SEQ ID NO: 2237 - DNA, 1605 bp, Bacillus licheniformis
atggctgcggaaaaagtattttcgaaaaataaaatcattggagggaaaagaatgtcatatatgaaacgttccatctctgtcttcatcgcctgttttatggtagcggcgcttggcatcagcggtatcattgcaccgaaagcggctgccgcttctaaaacacccgttgctgtaaacggacagcttaccttaaaaggtacgcagctcgtcaatcaaaacggaaaagcggttcagctgaaaggaatcagctcccacggtctacagtggtatggcgattatgtcaacaaagactcgttaaaatggctgagagacgactggggcatcaatgtcttccgcgcggccatgtatacagctgaaggcggctatattgacaatccgtcggttaaaaacaaagtgaaggaagccgtcgaagcggcaaaagaactcggaatctatgtgatcattgactggcacatactgagcgatggcaatccaaaccaaaacaaagcgaaagcaaaagaattttttaacgaaatgtcaagactttatggcaagacgccaaacgtcatttttgaaattgccaacgagccgaacggcgatgtcaactggaatcgcgacattaaaccttacgccgaagaaatcctgtccgtgattcgcaaaaactctccgaaaaatattgtgattgtcggaacaggcacctggagccaggatgtcaatgatgcggcggacaatcagctgaaagacggcaatgtcatgtacgcgctccatttttatgcgggcacgcacggtcagtctttgcgggataaagccgattatgcactcagcaaaggagcgccgattttcgtcacagaatggggaacgagcgatgcttcaggaaacggcggggtctaccttgaccaatccagggagtggctgaaatatttagacagcaaaaaaatcagctgggtaaactggaacttatccgacaaacaagagtcgtcagcagctttaaacccaggcgcctctaaaaacggaggatggtcgcaatccgacttgtccccatcaggcaaattcgtcagggataacatccgcagcgggtcaaacggttcgtcaggagactctggatcgaattcgaaagggtcagatcaaaaagaccaaaaaaaggatcaggataaaccaggtcaagacagcggcgctgcagccaacacgatagcagtacaatacagagcgggggacaacaatgtaaacggcaaccaaatccgccctcagctcaacattaaaaacaacagcaaaaaaaccgtctctttaaatcgaatcaccgtccgctactggtataaaacgaatcgcaaaggaaaaaattttgactgcgactatgcccaaatcggctgcagcaaaatcacgcacaaattcgtccaattaaaaaaagcggtaaacggagcagacacgtatcttgaagtagggtttaaaaatggtacattggcgccgggtgcaagtacaggtgaaatccagatccgtcttcacaatgacggctggagcaattatgcccaaagcggcgactattcatttttaaattcaaacacgtttaaaaatacgaaaaaaatcacgttgtatgagaacggaaagctgatttggggcactgaacctaaataa

SEQ ID NO: 2238 - DNA, 258 bp, Bacillus licheniformis
atgaatgaaacattgcagcaatacatgatgcttgtcaaggaacactatgacacgatcaatggaccggattacacaggcaaagaggaagacattgaaaagagaaaagagcaaatcgagctttacgccaaaacgctccagcaaggcttttcaacagatgacgactatgatgaattcgcagatgccgtgattaaatgcgcatacggagatctgacgatggaagaattggaaacggtttatcgggaattaacgtctccataa

SEQ ID NO: 2239 - DNA, 507 bp, Bacillus licheniformis
atgaaagacatgatcatgaagacagaccggctgattttgcgaaaaatgaggcatgatgacgccgaaaacctgctcgaaatcttttctgacccggcagccatggaatattatccatcgacaaagaatgaaaaacagacattgcaatggatcgactggacgcttgaaaactatgaaaaacacggaaccggtctttggattgcagaacataaacaaaccagcgaatttttaggccaatgcggcatcgttccacaggaagtcgaaggatcgaacgaaatggaaatcggctatttgtttaaacggagcgtttggaaaaacggctatgcaaccgaagcagcatcagcatgcaaacaatatggatttgagtcatttcacctgaaaaaaatcgcatctttacctgatgcgaaaaatcttccgtccagaaaagtagccgaacgaatcggcatgactttagaaaaaacgatacataaatggggaaaagaaattgccgtatattcagtgtatcgctaa

SEQ ID NO: 2240 - DNA, 559 bp, Bacillus licheniformis
ttgaccagagagaatataaagcgtgcagcggttcgccaatttaatgaattgggctatgagggagtcaaaatgtcgcatattgcaaaagaattgggaatcagaaaacaatctcttgcttatcatttttcatacaaaaaaagagctgctgatggaaatataccccgagattgtagaagaggaaatttcatttatcaacgaattcttcgattcaagaaaacatacgcctgcaaagagtcaaatatatgactttttaaaagaaacccaagtccgttttcatgcattgccgaatgtagcttttttgcaggcaatgtcctttaaagcgcctgctgaagtaagcgattttatttcagcccaataccttttatatctgcatactttaaaggaacggatagcgaatgttttcaaggaatcggatgtgaaatgtcctccggagaagtgcacaataggatttattacgctttatgacgggctcaacattcaactggtatacgaaaacaaacaatcatttgaacggtctttagagatatcatttgatattttttggcgcggactgttgtaa

SEQ ID NO: 2241 - DNA, 1216 bp, Bacillus licheniformis
atgcgtgagaagaaaaataaaaacagaggtagccaaatggaattgaatgtagaaaaaatacatactgcaaaaatgtggtcattgtcatttgtttttgtgacgcttgcaaatgctttcttgtttatggtatttgaaatgttattgccgactttgcctttgtttgtgacggctattggaggaggggcaaaacaagtcgggtatgttacaggcatttttatggtctctgcaattgctgttcgtccttttgcaggggcattggctttacggttcaataaaaaatatttgctcatttttggacttgcgatcagcgctttctcaacaggcgcatattacctggcgtctgatgtcagcgctttattactgattcgcttaatacatggcgccgggtttggattggcgacgacctattttgcgacaatcgcagccgaaattattcctaaagagcgcaggggtgaaggaattggatattttggagtaggtgagacaattgctgtttccgttggaccgatgatcggtatcgcgactctggagctttatgattttcaaagactttttttaggcgggatgtccgttcttttgctggcggcacttatggctgttttcgtgcgcagacagccggaaacaacaggcactggcggaaagggcactgtaaagttgaaagtcttggaaagacgtgtgctgtttccgtcaattcttattttattcgtcggcgttgctgcatctggaattatgtctttcttttcgctttatgcaattgaaaaggggtttcaaagtgtcgggatgtttttctttttgattgcaggagccagttttttttatacggcttatttccggcagggtatttgaccgttacggagctgccgccatccttattcccgcctcgctgttttcaatagcagggctgtcaatattatatttcgcacaaacaaatgcaatgttttttacagcggctatatgctatgggtttggtttcggctcaatatttcccgccatccaaacatggtgtataaatcttgtggaagagcatgatcatgaggatgcaatgggaacgttctttaactttttcgatatgggaattggcggaggctccttattattaggtttggttgcaacggtttattcctatcgggagatctatattgccgccattttcatgtacttgctgtttcttttattatatgttttatatatctgcatgaagagaaaaacagcctga

SEQ ID NO: 2242 - DNA, 1407 bp, Bacillus licheniformis
atgagaaaatggtattttattatatcagcgtgtattttagtttctgttatcatcgcttttgcttacgataagaccggagcaaaagaagcagaaccggctaactgcttatttgtttcccccgatggaaatgatcaaaatgaaggaacgaaagaaaagccgtttcgaactctgaaacaggcagcaaaaaaggctgtccccggcacaactgtcatgattcgggaaggcacgtatcatgaaacgcttgatgtgagagagagcgggtcggctgaaaagcctatcacatttcaaaactatgagaatgaaaaagtcgtcatcagcggagaatctgttaaggacgctgaatatgaaacaccgctcattcagattcacaatcaacagtacatcacaatcagcggactgacgattcaagacctttccgtttcatcagaagaagcaacagccatgggaatttatgtgtcaggctccagcagccatatcaccattaaaaacaatcacgtccgggatataaaaacaacagcggatgatggcaatgcccatgggattgccgtctatggatccggcagcatgaaagacattaagatcgaggacaatacggttgaaaagctgacactcggagcgagtgaagcggttgtgctgaacggaaatattgacggttttgcgatcagaggcaatgtggttcgcgacaataacaacatcggaatcgatctgatcggttatgaaggaacggccgctcaaaacgattttgtgcgcaacggtatcgtagaaaacaacacggtttacgacaactccacttacggaaatcccgcctatggggatgactactctgcgggcggaatatatgttgacggaggccaaagcattgatattaagaaaaacacggtctacggcaacgatatcgggatagaagcaacgtctgaacataaaggaaagtatgcggatgatattcaaataaccgacaacacggtatatgagaatgcgtacacgggcatttctatcggcggatacgaccaaaagcggggaggcaccagccattctgtcatttcgcacaatattgtttaccgcaatgatacaaaggggctcgatggcggacagcttttgctccaatatgatacaaaaaacaatacaatcgaaaaaaacatcataacagcaagcgattcgcgaatattcatcgcaaacgattttacgaaaaatgaaggtaacaaagtgaatcataacgtgtaccacaaggaaaccggcaaagacggcctgtggatttggaagaagaatgaatacgactcgtttacgccgtatcaaaacgcaacaaatcaagatcaagattcgatctatgccgatccgatgtatcgcgacgagaagtcttatgactttacattagatccggattcaccggcttggccggtcgttaaataa

SEQ ID NO: 2243 - DNA, 1302 bp, Bacillus licheniformis
atgctattcgcattatttttcggtgcaggaaatctcattttcccgcctatgctgggtcagatggccggagagaatgtatggacagccaatgcaggattcttggtgaccggagtcggattgcctttactcgccattacggcattcgttttttcaggaaaaaatgatttgcagtctctggccagtcgtgtgcatccgttgttcggcattgtatttacaacggttctctatttagcaatcggccctttttttgcgattcccagatccggtaatgtgtcgtttgaaataggggttaaaccttttttatcaaatgatgcgggccctgttgccttaatcatatttactgttttatttttcactgtggcatgcttgctgtccctgaatccaactaaaattatcgatgtaatcggaaaatttctaactcctattaaattaacatttatcggattgctcgttgttacggctattattcatccaatcggaagctttcaagctccgtctgaaggatatgcatcacacgtattttttaaaggattcaaagaaggttactttactcttgatgcccttgtcgcttttgtatttggaatcatcattgtgaacgccatgaaagagaagggagcggcctccaaaaaacagctcatgatcgtttgtgcaaaatcgacggcgattgcagcggcgctcttggctctgatctattcagcgctttcatatatgggggcttccagcgttgaaaaactgggtctattagaaaatggagccgaggttttggcaaaggtttcatcctattatttcggaccatatggttccgtttttttgggcttaatgataactgtagcatgtctgacaacaagtgtgggactcatcacagcatgctcttcgtttttccacggcttgtttccaaacatctcctataaaaaaattgctgtcattctgtcaatgttcagcacccttgtagcaaatataggattaacacagctgattaacgtttcaatgccggttttaacaactttgtatcccattgcgatttctttaatattcttaacatttttacatcctttatttaaagggaagagggatgtgtatcaaggcagtctgatattgacctttatcatcagcctgtttgacggcctgaatgctgccggattcaaaattgcagctattaatcaatttttcactcagtttctcccgatgtatgacatcggactagggtgggtgcttccggcgattgtaggaggaattggcggctatctcgttcatagactgcggaagaaaagtcatataaggtacgcggaaaagctgaattaa

SEQ ID NO: 2244 - DNA, 1059 bp, Bacillus licheniformis
atgtgtaatctgcataaaaccatctcaacccgtgtactgagtgctccgagagccaaggcgaaatttgaacagaccacaattgaaagaagggaattacaaccgaatgacgttttaatcgatattaagtacagcggcatttgccattcggatatccatagcgcgtacgatgaatggggaggcggaatcttcccaatggttccgggacatgaaatcgccggcatcgtcaaagcagttgggacaagtgttaaaaaatttgctgtcggcgaccgcgtgggggtcggctgcttcgttgactcctgcggcgaatgtgaatactgccagagcggagaggagcaattttgtacgaaaggcgtgatccaaacgtataactgtttagactacgatggaaatccgacatatggcggttacagccaatacatcgtggtcaaagaagatttcgttgtccgcataccggacagcctaaacttggatgttgcaagcccgctcttgtgcgcaggcatcaccacgtactctcctttgaagcattggaacgcaggccccggcaagaaagttgccgttgtgggaatggggggactcggccacgtcgccatccaatttgcgcatgccatgggggcagaagtaacggtcttaagccgctctttgaataaacaggaagaagccttgcgttttggcgcagatcattactttgcaactggcgaccctgcagtattcactgagctggccggacgctttgatcttattttaaacacggtgtccgccaatctggacgttgatgcatacttatcgcttcttcgcgccgatggaacacttgttaacgtcggcgcgccggcagaacgggatcagtacagtgtgttttccttaatcatgggccgccgcagcattgcaggttcgcttgtcggcggcattcgggagacacaagagatgcttgatttcgctgctgaacacggcttggctccgcaaattgaggtcatcggagctgaccaagtagatgaagcatatgagcgcgtccttacaagcgatgtgcgttatcgattcgtgattgatgtctctactttgtaa

SEQ ID NO: 2245 - DNA, 396 bp, Bacillus licheniformis
atggggtattctataaaagaagttgctgaaaaagtaggtttgcctacacatacactccgatattatgaaaaagaaggtcttctgccttttattaaaagagacgcaaatggaaaccgcatttttgaagaaaaagacttgtcatggttggagcttgtgatatgcttgcggaaaactgacattgcgctttcggaattacgggaaatcgtcaatttaacaaaagaaggagattggaccatctcgaagcgcaaacaaatacttgaaaaacataaagaaaaaatgcttgaaaagcaaagagtcctggaacgcgcctttttaaaaatcgatgagaaaatcatgtactatgatggattagaaaaaaagaatcaggcaatgtccttgaaagcggatgaaaagtaa

SEQ ID NO: 2246 - DNA, 258 bp, Bacillus licheniformis
gttagtaacaaatcaacagttcggctcccccgggggcttcaggccaggcatacgaccctatttgtccgcaaagcgatttcattcaaaagtgaaatcgtactcgctaaaaacgggcagaccgcaaacgggaaagatctgatggaaatccttcaattaggagtgcaagaaggggatgagatcacgttaatggtctatggtacggatgagcaagccgcaaaggagactttggaaaaatttcttttgaatgtagtgccataa

SEQ ID NO: 2247 - DNA, 1101 bp, Bacillus licheniformis
atgatgtttttattcatttttatcatcatcttagctgcggctgttttattgttcatcaatttacatcctgtgtttggaggaaatccaagcaaggaacaaaaaaagctgtatcaaagctttgacaattatgccgatggcaaatttcttaatcaaacacaagaaaagatggatatgggcggaatatccggagttttctcaatgatgagagacgctgtttccggcggcaaggagcgcaatccttccgatcaaatccctgtttctgagattgattggaacatcgttaaaagtaacgaagacagcttaacatggtttggacattccgcttttttactgagcatcgaccgcaaaaaaatactcgtagaccctatgctgggtccaattgcttcacccgtatcattcatcggaagcagacgctacagcgaagacatcctgcatacggtcaatgatatgccgccgattgacgccgtcttgattacacatgaccattatgatcacttagattatccatccatcttaaagctgaaggaaaaggccggtcatttcttcgttccttacggaatcagcgcacacttgatccggtggggaattgagaaagaaaaaatcaccgaactcaattggtgggatgaaacggagtttcaaggtttgacaatagccctgacaccgtccaaacacttttcaggcagaggattattgaatcgaaacacgaccctgtggggcggctgggtcatcctcggaaaacatacgcgtttttatacgagcggtgacgggggatatgatgaacactttaaggaaatcggcaaaaaatacggccctttcgatatcacattaatggaaggcggccaatatgacagacgctggtccgggattcatatgacacccgaacaatctgtacaagcccataaagatgtaaaaggaaagaacatgatgttgattcattggggagcctttaccctcgcataccacggctggaaagagccgattgaacgcgcattgaaagaggccgagaaaaaaggcgccaacatgattgctccggcgattggcgaaacggttccgttaaacagccaatactcgcttcccgaaaccttttggtgggatatataa

SEQ ID NO: 2248 - DNA, 444 bp, Bacillus licheniformis
atgtatactgacaatatttggttggaggttgacaacatgaacatcggaaaattaagcaagtatttcttgtcactagccattgcccttgcgacgattctgtcctttcatgccgtttctgcaaatgctgcatcagttggtactattaaaccaagcgaatgctcaactcacatcttcaccgtatacgacgaaacagttggcattggcggttccggccgtgcgcatttctattgcggcagtataaatggaggtcctcaaattgaattttcggacgaagatttagaggttgcggtcgatgacccctttattctccatgcatatgctaatccgagcatgaactcagtagactacgaaggacgccaaaagggagacgcggaggtaacgatttattggaaaaacaaaccggagggcaccaaatacacatttttattagtgcaaattaaataa

SEQ ID NO: 2249 - DNA, 1062 bp, Bacillus licheniformis
atgtccgatgacgtgctgttttccgtcaatcaaaacggcgccgcagcgattgttctgaatcgcccgaaagcgctcaactcactcacatacgacatggtccgtctgattggtgaaaagttaaacgagtgggagacagatcaaaacgtttctatcgtggtcatcaaaggtgcaggaccaaaaggactatgtgccggaggggatattaaggcactctatgaagctcgttcgtcaaaacaggccctgcaagatgccgagcgcttttttgaaacagagtacgaagtcgatatggcagtccatcgattttcgaaaccgatcatcgcctgcttggacgggatcgtcatggggggaggcgtcggcctgacgtacggggccagccaccggatcgtcacggagaggacaaaatgggcgatgcccgaaatgaatatcggcttctttccggatgtcggggcagcctattttttaaacaaagccccgggccgcttagggcggtatcttggattaacggcgtctgtcatccatgcagccgacgtgctgtatatcaatggggcagacgcctacatggagagcggcgctttagaacgattgcttcaagcagtggaacaaaccgattggcgccttgcaagcgttgaagaaaagctcgatcagctgatccgcgaatcgaaaacggagccctcccaggagagcacgctcgcccgtgatcagcaagcgattgaccgtcattttaagtatgataagctggaagagatccttcaatcgctcgaaagcgagggaagcacctttagctcgaatgtgaaaaaaacaatgctttccaaatcgccattttcattaaaaatcacattgaaacagctggcggacggacgtcaaaaaacactggaagaatgctttgccacggatctggtgctggcaaagaactttttgaagcacaatgatttcttcgaaggcgtcaggtccgtcctgatcgaccgtgatcaatcaccgaactataagtaccggcacgtttcagatgtaaccgatgaagcggtggaccggtttttccaaccctctgaatctgtccggttttaa

SEQ ID NO: 2250 - DNA, 786 bp, Bacillus licheniformis
ttgaacttgaaatatgccacacttaaaacagaacatggcatcacaaccgtgacgttgaacaatccgccggcaaatacactttcttcttcctgtatcgccgaattgcgctctctttttcgggaattggcccgcgacgaggagacaaaagcaatcatcattactggagaaggccgcttttttgtggcgggagcggatataaaagaattcgtttcaaaacttggggaccaaaaacaaggattggcgctcgcacaagggggccaggcgctctgcgatgaaatcgaagcttccaaaaaacccatcattgcggcgataaacggaccggctcttggcggaggcctggaactcgcgatgagctgccacttcagaatcgtatcagacgatgcaacagtcggtcttcccgaattaaagctcggcttgattcctgcatttggtggtacacagcggcttcgcaacataacggacacagcgacagcactcgaccttatcctgacgggccgatcgctttcagctcaagaggcggtagagctgaaaattgcacagatggctgtaaagggagaggaactgatgaagacggcagctgctgtcgcgtcgtcttttatcgaaggaaaaagcatgaccagcgtgaggcgcgccgtcgaatgtgtcgtacagggcgccagcgaaagcatggaacaagcactggagagggagcgaaacagattcgccgagctgtttgtcacttcagatgccaaagaaggaattcacgcatttgtcgaaaaacgcaaaccaaactttcatcattcataa

SEQ ID NO: 2251 - DNA, 1455 bp, Bacillus licheniformis
atgatcacaaccaatgcaaaaaaaatgatgaaccatatcgacggggaatgggtcaattctctaggtgcggaatcggaagaagtcgtcaatcctgcaaacggaaacgtcatcgcttatgcgcctctatctgtgagagcggatgtagatcgtgccgtgcaggctgccaagcacgcttatcagacctggtcgcttgtgcccgtccccaatcgggcaaggcttttatacaagtatttacagcttctccaggagcaaaaagaacaattggcagacattattacgacggaaaacggcaaaacgttaaaagacgcccgcggcgaagtgcagcggggaatcgaagttgttgagcttgcgacagccacacctactttaatgatgggagaatcccttcccgcgatagccgggggcatcgacggatcgatttggcgctatcctttgggagtcgtcgccggcattacgccgtttaactttccaatgatggttcccctgtggatgtttccgctcgccatcgcctgcggaaacacgttcgtcctgaaaccttcggaacggactcctaatcttgccgggaagcttgttgagctgttctatgaagccgggtttccaaaaggtgtgttaaacctcgtccatggaggaaaggatgttgtaaacggaatattggagaacgatgatattaaagccgtctccttcgttggttcagaaccggtcgcaaaatatgtgtatcaaacgggcacagccaacgggaaacgcgttcaggcgctggccggcgctaaaaaccatgcgattgttatgccggattgccatcttgaaaagactgttcaaggcatcatcggtgcggcattcggcagcagcggggaacgctgtatggcctgctccgttgcggcggtcgttgatgacatcgccgatgacttcatggaaatgctcgtctctgaaacacggaagctgaagacaggagacggcagatccgaggatcactttgtcggcccgctgatccgcgaagtccataaacaacgcgtccttgactatatcgacagcggtataaaagaaggggccgcactcgccgtagacggacgcaatccggatgttcgagaaggatactttgtgggagccacgattttcgatcatgtgacaccagagatgaaaatctggcaggacgaaatctttgcaccggtcttgagcgtcgtccgtgtacaagatcttgacgaggggatcgagctcgccaatcaatccaagtttgccaacggcgctgtcatctacacatcgagcgggaaaagcgcccagcagttccgcgacaaaatcgatgccggaatgatcggcgtcaatgtcaacgtcccggctccgatggcgttcttctccttcgcagggaacaaagcctctttctatggagatcttgggacaaacggaaaggacggcgtccagttttacacgcgtaaaaaggtcgtcaccgaacgctggttctaa

SEQ ID NO: 2252 - DNA, 888 bp, Bacillus licheniformis
ttgaaaaaaatcggatttatcggtttgggcaatatgggtctgccaatgtcgaagaatctgcttcaggagaactttacggtttatggaatggaccttaacaaagaagctgaattggccttgcatcatgcaggaggaacgatcgggatttcagttgaaaaaatggttgaagagtgtgacgccatcctcacaagccttccttcctcaaaagctgcagaggaggtttttctgggaaaaaaagggctcgtacacctggctgaaccgggcgtcctcctgatcgatacaagcacggtcgctcctgaactgaatatccgaattgcggaggaagcgaaaagcaaaggtatcgattttcttgcggcgccggtcagcggcggtgtgatcggggcggtcaaccggacgctgacctttatggtcgggggtccgaagtccgtttttgataaagcgttgcctgttttcaatgcattgggcgagaatatttttcatgtgaacgaaaacatcgacagcggaacgaatacaaagctgatcaacaacctcttaatcggtttttatacagccggcgtcagtgaagccttgcaccttgccaaaaacagcaatctcgacctcgaccaattgtttgagatgctgaacgtcagctatgggcagagccggatctatgagcgcaactataaaagtttcatagcggatgaaaactataaacctggcttttctttgaagctgctgctgaaagaccttggctttgcattggatttggctgagaagaacaacgttgaactgccggtgagcaagattctcttcggcatttacgaagaagccgatcagaacggatacggggaaaaagatatgtctgttttatacaaaaaaataagcgaacagaagacaacttatcagtaa

SEQ ID NO: 2253 - DNA, 1716 bp, Bacillus licheniformis
atggggaaagcaaaacttcgatggaatgaacccttgatttctcaacacgaatcggctgctgaaggatttacaccggaagatttcacagaggaagatcgactgatttcaaaaacgacagaatcatttgtcaaaaacgaagtcatgccccttcttgaatcgattgatcagcaggatcacgaaagcgtgaaaaaattgtttcaaaaagcaggagagctcggtttgctcagtatcgaagttccggaggattgcggcggcctttcactcagcaagaagctttccgggttggtggcagagaaaatgggagccggcggatcgttcagcgtctcctttaatattcatgcgggagtcgggacactgccgtatatttattatggaacagaggaacaaaaacaaaaataccttccaaaactggcatcgggcgaatggatcggagcatatgctctgacagagccgggcgcaggatcggatgctttaaacgcaaaaacgacagccgtcttgaatagggaagggacagcctggattttaaatggggaaaagcagtggattacgaacgcgcaagtagctgatgtatatgttgtctttgcaaaaacggcggaaggcatgacagcatttatcgtcgaacgctcgtttaaaggtgtttccatcggacctgaagagaagaagatgggaatcaaagggtcttcgacagcaaccttaatcttggaggaagtcgaggtgccaagcgacaatgttctaggtcatatcgggaaaggtcatcacgtcgctttgaacattttaaacatggcccgcttaaagctcgcgttttcgaacattggaacggcaaaacaagcattgaaccttgctgttagctacgccaaacagcgaaagcaatttaacaagccgatcatcggtttttcaatgattcaagaaaagattgccgacatggcggtctcgattttcggcgcggaaagcgctgcttacagaacggcagattgcttggacaatgttttagattcggctctcccattagacgatagactgagaaaactcacaaactatgcatccgaatgtgcgatcaataaagtttactgctccgaaatcctcggccggatcgcagacgaagcggtgcagattcatggcggctacggatacatgcaggagtacgaagtcgaacgattgtaccgggacgcgaggatcagccggattttcgaggggacaaatgaaataaaccgcttaacgatcgccaaactgctcatgaaagaagtgcagcaaaacggcatctcagagccggaagctcaactaggcagcgagggaaatcgaaaccggcgatttattcagctgtccaacaggcttttcggcaagacactgaaagcgcttatccgctctcgcgtgaacactcaagaagatcaggaatacgcacggcttctcgccgacatgaaaaaagaaatctatgtgatggaatcctccgcccgccgaaccgaaaaagctaggcaaatatacggtggtgaaaaagcacggttgaaagaaatgatgacgaatgtcatttgtgaagaaggctaccgcagaatcgaagagatggcggtgaccgccttatcaagcatagcatctgatgaagccgaaagaaaactcgcatttgaagaggctcgcagcctttctttgcctcttttcagcaatctgtttactcaaaaacgcgaaatcgcagaaaaaatagccgctcatgaaaaatatacggtgtga

SEQ ID NO: 2254 - DNA, 117 bp, Bacillus licheniformis
atgattcgtatcagcaaaaatgtaagcggattcatcgtctttttatctcggtttatcactctttttagcggaagcgaggaggtaagcaatggggaaagcaaaacttcgatggaatga

SEQ ID NO: 2255 - DNA, 171 bp, Bacillus licheniformis
ttgtttcatgaagcagctgttccgcgaaaagtcccgggcagtgcagctgatgaaagatatgaagcttttaatatcagcttatcaaataattggaagatttccaaatgtttttttggtttactctattttacttgtgaaagcttgggaatatgcattgtcagccctctgtga

SEQ ID NO: 2256 - DNA, 954 bp, Bacillus licheniformis
atgactgaaccgttatttttcgagcctgtttttaaagaaagaatatggggcggaacggctttagcctctttcggctatgacattccatccgaacaaacaggggagtgctgggctttcgccgcacatcaaaatggacaaagcgtcgtgaaaaacggcttgtataaagggctcacattaagcgaattatgggatgaacaccgtcatttattcggacatataaagggagaccgctttcctcttttgacaaaaattttggacgccgaccaagacctatccgtacaagtgcatccaaatgatgaatatgcaaagctgcacgaaaacggggagcttggaaagacggaatgctggtatatcattgattgcaaggaagatgcggagatcatttacggccaccatgccaagacgcgggaagaactggtctcaatgatcgaaaacggaaaatggaatgagcttttgcgccgcgtcaaagtgaagccgggagatttcttctatgtgccgagcggaaccgtccatgcgatcggaaaaggcattttgattttggagacgcagcagaattctgacacaacctacagactatatgattatgacagaaaagacactgaaggaaacctgcgcgagctccatttgcaaaaaagcatagaagtgatcgacgttccgtcttcccctgatcgcgaaaccgttcaatacgaaacatcgggcgacgtcaagactgccgcactgattgattgtccttatttctcagtagaaaaatgggatgtaaaaggatcggcctgtttcaaacaggataaaccgtttcttcttgccagcgtcatagaaggggaagggcgcatcgcatctggcggccataacttttcatttaaaaaaggagatcacatgctgctgccctggggctttggagaatttacgctcgccggccatgcggaatgtatcgtctcaagcttatcaattgaataa

SEQ ID NO: 2257 - DNA, 1944 bp, Bacillus licheniformis
atgaaactgttagcgattacatcatgtccaaacggcattgcccatacgtatatggctgcggaaaatttgcaaaaagcggccgatcgaatgggcgttcaaatgaaagtcgaaacacaaggcggcatcggggtggaaaatgagctgaccgagcaggaaatccgcgaggctgacgcgattattatagccgcagaccgctcggtcaacaaagaccgttttatcggaaaaaaacttctggctgtcggtgttcaggaaggcatccgaaaaccggaagaattaatacaaaaagcgatcggcggcgatatacctgtctatcgttcggctgtgaaaacggaagcctccgctcaaacggagaaaaagcaaaatccgatttacaggcatttaatgaacggtgtatcgtttatggttcctttcattgtcgtcggcggattattgattgcggtcgcattgacgcttggaggcgaaaagacgccgaaagggttagtgatccctgatgattctttttggaaaacgattgagcaaatcggggcagcctcattctcattcatgatcccgattttagccggttacatcgcctacagtatcgccgataaaccggggcttgtgccgggaatgatcggcggatacatcgcagcgacgggaagcttttacggcagcgggagcggtgcagggttcctcggcggcattatcgcgggctttctagccggatatgcggcgctggccatcaaaaaattaaaagtgccaaaagccatacagccgatcatgccgatcatcgtcataccggtggtttcctcgctcattgtaggcttggcgttcgtattgctgatcggcgcgcctgtcgcgcaaatctttgaatcattgacggtttggctggctggtatgcagggctcaagctcgattctgctggcattaattttaggggcgatgatctcatttgatatgggcggccccgtcaataaagtggcattcttgtttggctcggccatgatcggtgaaggcaactatgaaattatgggaccgatcgccgtcgccatttgtattcctccgatcgggcttggaatcgcaacgtttttagggaaaagaaaatttcaggcgcaagaaagagaaatgggaaaagcagcatttacaatgggattattcggcattactgaaggcgccatcccgtttgctgcacaggatccgctccgcgtcataccaagtattatggcgggttcaatgacaggttccgtgatcgccatgatcggtaatgtaggggacagagtcgcccacggcggaccgatcgtagcggtgcttggcgctgtcgatcatgtgttgatgttctttatcgctgttattgccggatccctggttaccgctcttttggtcaatgtgctcaaaaaagaggtcacagctgcacccgcagggataagtgaagctgctgcagggaacgacattccacaaccgaacatcgaaatcgaagcggaaagcaaaaaaatcgaaaagccggaaattacaaagctcacagacatcatcgatacagatttgatcgaacctcatttgtcaggagatacgagagacgacattattgatgaaatgatccaaaaattgtcccggaaaggcgtactgcattcagaaagcgaatttaaacaagctatcatcaatcgcgaacttgagggtacaacggcgatcggtatgaatatcgcgatcccgcacgggaagtctgacgccgtcaagaagccgagtgtagcattcggcattaaacgttcgggcgtagactggaggagtcttgacggaactgacgccaaactgatttttatgatcgccgtcccgaaagaaagcggaggaaacgagcatctgaagcttctgcaaatgctctccagaaaactgatggatgacacctaccgggacaagcttctctctgcccaaacaaaagaagaagcatacaaacttctggatgaaatcatctaa

SEQ ID NO: 2258 - DNA, 177 bp, Bacillus licheniformis
atgtttacaccccctcgacaaatttcagctccctattgcaatacggcacatttttttcaaattcagtcccatatgtttttacaagtcgccgctcactgcagtcctgctttaaaaaaaccgatttttccggagcctgcggtaaaaatcaacgcttttacacgcacgtttttattataa

SEQ ID NO: 2259 - DNA, 339 bp, Bacillus licheniformis
atgatgagattacttattagttttatattcggggctttaggggcagttataatgtataacgtaaaatcaaacttttctttccctgtgacaacaattgttttagtggtttttgtggctgcttgtttgcattttgacctggttaaacgtaaaaagagcaaagatcagaatgataaaaagtatgagtttatatggtggatcgcaacaattctcatggttctagtgatgactcttaataccgtctttgtaaaaattgaccctaagtataatatcatcgttgtattgattcacattttgtttatggtgattattaagagtagatggaagaaagctaagacagac

SEQ ID NO: 2260 - DNA, 171 bp, Bacillus licheniformis
ttggataatcaagttttgcaagcgatctacgaaatgcaaaaggaaatgaaagaagacttcaaaagcgtaaacgagcggttagatacaatcaacaaaacattaacacgcatagaggaaaacgatcctgaaaaagtcatatccatgcttaaactaatcaataagaaacattga

SEQ ID NO: 2261 - DNA, 270 bp, Bacillus licheniformis
atgaattatgatgaagcacaacatctacatattagttacaataaaaagggattagatcttgaagcggtaggattaaaacgcctagatatcgatgtgtgggacgtgtattttaactttcaggatcatgggatagatgagccacctttgagtttttcaaaaatcgatccattcggttgcaatatactttcaataacaagcaaagatttaaagattaatgaggctactcaatacttcgaactttggattaaacatgagttatataaagatctc

SEQ ID NO: 2262 - DNA, 1944 bp, Bacillus licheniformis
atgaatacgaggcaaaaagacattctgaatctgttgttatctgaacctgatgactatttagtcgtacaagatttcgcagacagggtaaagtgttctgaaaaaacgatcagaaatgatctgaaaacgattgaagactatctcaatcagcgttctgatgctcaattaattcgcaaaccgggattgggcgtttatttgaatattgaagatcaagaaagagtccgtttaagccggcaattatataccgaacatcacgccgcacagcagctacccgatgaagaaagaatgctgcaaatcgcttatcagctattaatgaatccaaagccggtttctgcaaaagaaatggctgccgagcatttcttgaataagtcttccatcaaaagggatttgaataaaattgacgtttggctgaagcggtttggcctcacactggtatccaagcagcgcctcggtttaaagatcgaaggaagtgaaaaaaataagagaaaagcgctggcgcgcatctcggagttgattgacaacccggagtttacaagccgatttattaaaagtaaatttttaagccatgaagtggaatttgttaaaagtgagattagatcattgcaaaggcggcattctttatatttcactgatgaaacgttcgaaaatttactgttgcatacattgctgatgatccgccgcatcaaaatgaaacagccgatcaccatttcgccgggggaaatcgatgcagtcaaaaacaaaaaagaatttcagtggacgtttgcctgtttaaaacggctggaagctgtttttgcgatccgctttcctgaagaagaggccgtctatttaacattgcatatattaggcggaaaagttcgctacccatttggaaaagaaggggacagcggactggaaaaccctttgcttccaaaggttgtcgaatatttaatcaatcgcgtatcagagttgaaaatgatggatttccgcgaggaccgggttttgatcaatggattgaaagttcaccttaataccgttttaaaccggctgagctatgacctttccgtatcaaatccgatgctcaacgatatcaaaaaaatgtacccttatctgtttcatattgtcattgatgctcttgaagacatcaaccaaacgttttcactttcgattcccgaggaagaagccgcctatctgacattgcatttccaagcggcgatcgagcgcttcagctatggaaaagacaagcataaaaaagcgatcatcgtttgtcatatgggcatcggaatgtcacagctgctgcggacaaaaatcgaacggaaattccaccaaattgccgtgatggactgcatcgcgaaagcagatttggcggactatactgcaagatataaagatatcgagcttgtcatatcaacggtcagcctggaggatttatcaattcctcatattgttgtatcaccgctgctcgagtcggctgatgagaaaaagctcagcgactttatggatcagctcggtgaatcgacccgccaaaaacaaaaaacgtttaaagtgctgaacgacacgactccttttctcgttttcttgcagcaagagtcagaacaccgctacaagctgattgaacagctggcaatcgctttatacgagaaaggctatgtggaaaaagaatatgccgtacacgccgtcttgagagagaaaatgtcggcgacaaacatcggagcgggcatcgcgattccccacgcgaacgccaaattgattaaacaatcagccattgcgatcgccacattaaaggagccgcttgactggggctctgaaaaagtatcgctcgtctttatgctggctgtcaaacatgaggatcaaaacatgacaaaacaattgttccaagagctgtccagcttaagcgagcagccggccttcatccaaaagctgacgaaagaaacaaatgtgatgaagttcttatcttatttggattattaa

SEQ ID NO: 2263 - DNA, 189 bp, Bacillus licheniformis
ttgatcctttttccgttgctcagaaccgtgcggctgttttcattctgccgtctgcttttctctttcccctcactatcatctattataaaaaattcctataaaagaaaaatttccgagttgattaaaagcattttttccggaagtttcggtaaaaaacgaaacttttggcccttttatttcactgtataa

SEQ ID NO: 2264 - DNA, 657 bp, Bacillus licheniformis
gtgtatcatcttattaaaaaagatattttaatgcagaaaagggcaatgaagctatcgctgttattgatgatttttttcacttttacattgtcgcagcttgagcttgtcggatatacggtcgctgtattggctgtcacgtaccagctggcattaggcgcaagctccttggaagacaaaaacaacagtgacaaaatcctgatcagcttgcctattaaaagaaacatcatcgtattatcgaaatatgtatcggtttatgtctatgcggcttatgccattctcttctattctttgatcaatgcggtcggacatttgctgcacttgccgcttgatttcccattgacattttcaagagcgatgggtgctgttgtggctgtcactttatttagctcgatctcatttccgctgatttttaagtacggctatttgaagtccaaaatggcgaatatcctcatatttttcttcattatttttggaggaacagccttttttaaatttatagacgcggacgagaaccttgcattgagccaaaaattaacggcttttctgagcggaatgtcaaatgcgggtacattcatccttttggttggtgtactgctcgtgatgatctccgtttcatacgcgatatcgctcagcttttataataaaagagaattttaa

SEQ ID NO: 2265 - DNA, 879 bp, Bacillus licheniformis
gtgaccagcatactggaattaaagaatgtaacaaaacactatcaagatttctctttaaaaaacatcaacttctcgcttgagaaaggttatattatgggttttatcggcccgaacggagccggaaaaagcacgaccatcaagctgatcatgaacctgatcaaaaaagacgaagggaacatcagcattttcggtctcgacaatgaaaaacacaatatcgaaatcaagcagagaatcggctttgtatacgatgaaaatcatttttacgaagaactgacaccaaacgaaatgaaaggaatcatcagaccgttttacaaaaagtgggacgaagctgtttttcagcggtacgcaaaagacttccagctccctttaaacaaacagatcaaaaacttgtcaaaagggatgaagatgaaattctcattggcggtcgcgctttcccatcatgccgaattattgatcatggatgaaccgacatcaggactggatccgcttgtcaggtccgagctcctcgacgtgctgcaaacattgctgcaggacgagaacaagtcgattttcttttcgacgcatattacctctgatttagaaaaagtagcggactatattactttcattcataacggccggctcgtgctgagcaagacaaaggatgagctgttggaggagtactgcattgtgaaaggagacctcgatacgctgcgcaaagggaacgaagacgccttaatcgccatcaagaaaaaccgctatggttttgaagcgctctccagagataagcgggaagtcgttcagcatttcggggattccgtcatgatagaaaaacccactttggaagatattttggtattttcaaccggcaggagtgatcatcgtgtatcatcttattaa

SEQ ID NO: 2266 - DNA, 375 bp, Bacillus licheniformis
ttgaatatcatcatttcaaattcatctgatgaaccgatttatttgcagatcgtcaaccaattaaaagatcaaatcgtcaagggagaactctcagagtcagaggcgctcccgtcgatcagaaacctggccaaagagcttaaaatcagcgtaattacaacaaaaagagcctatgacgagctggagagagaagggtttatcgtcacagtcgcgggaaagggctcgtatgtcgcagccattaacaaggacatgctgcgggaaacaaaagtcaaattaatcgaagaacacatagcagaagccgttactgaagcgaaacaaatcggctttacatacgaagaactccaagagatgctcaaactggtttatgaggagtggtaa

SEQ ID NO: 2267 - DNA, 797 bp, Bacillus licheniformis
gtgcagattccttttcatgtaaacttgaaagataaggtggctgtagtgacagggggaagcggcatcttatgcagctgtttcgctaaagcattggctcaatgcggggcaaaagtagcagtagtcagccgaagagctgaatcggcagacagagtagcgaaagagatccaagaaaacggaggcgaagcacttgcccttacagcaaacgtccttgataaacaaagccttgaacaagcgaaacaactcattaacagaaccttcggcagatgcaatatcctcattaacggtgcaggcggcaaccatccaaagggaacaacagataaagaatatttatataaaaaagacttgaatactaaagaattgactacgttttttgatttagaaatagagggtgtaaggtccgtatttgatttgaactttcttggtacactgttaaccactcaagtatttgcaaaagacatggctgatcacgacggaagtgtcatcgttaacatctcatccatgaacgcctatacgccgctgacgaaaattcccgcctacagcggtgcaaaagcggccgtaagtaactttacccaatggcttgccgtgcatatgtcaaaagtcggaattcgtgtcaatgccattgccccaggcttttttcttactgcccaaaacagaagcctattacgttggatagatttggggttccggaagatctaatcggaacgttattatggttggtaagcgataaagcctcgcgatttgtcactggaaccatcataccggtcgatggaggattctccgcctattctggagtataa

SEQ ID NO: 2268 - DNA, 1056 bp, Bacillus licheniformis
atgcaaatgacgtttcgatggtatggagacagcgacccggtcacattagagtatattcgccaaattcccggcgttactggaattgtttcggccatttatgatattcctgtaggggaagcatggccttatgagaaaattgtagagttaaaagaaaaaattgaaaatcatggtttatcgttaagtgtcattgaaagtgtacctgtccatgaagatattaaattaggtcttccgacaagagatcaatatattgaaaactataaaacgacgatacgcaacttggcaaaagccggtgttaaaatcgtttgttataatttcatgccggtctttgactggacccgttcttctttagactatgcactagaagacggttctacagcattaatttatgaagaagagaaagttagacaaatgaatccattacatggtgaactaaaacttcccggttgggacacaagctatgaagatggacagctaaagaatctttttcaacaatatcagcacatgacggaagaggatttatgggaaaatctttcgtattttattaaagcggttatacccgtggcagaaaatgaacgagtcaaaatggcgattcacccagatgatccgccatggcctatctttgaactgcctcgaatcataacgaacaaaaagaatttggagcgattgattcatctctatgacagctcctttaacggcttgtgtttatgcagcgggtcgctgggtgtgaattcaacaaatgatattccagaattgattcgttatttcggaaaaaaaggaaaagtcaactttgttcacctgagaaacattaagatcattggggaaaagtcatttcaagaatcatcccaccgttcagaagacgggtctttagatatgtatgaaatcgtaagagcattaagagatattgacttcgccggaccagccagaccggatcatgggagaatgatttggggagagaccggtaaaccgggttatggtttatatgaccgggcgctgggtgcagtgtatttaaatggaatgtgggacattgacgaaagaaaaaaagcggatagcttttga

SEQ ID NO: 2269 - DNA, 768 bp, Bacillus licheniformis
atggccatagcagcaggtctcattttatcggcagtattcttcatattattgtttctcggcgttccgatttctgtaagtattgcggcggcatccattgtaacaatgcttaccatttttccttttgatgttgccattttcacttcggcgcaaaaaatggtcactggaatcgacagcttttctttattagcggtaccgttcttcattttatcaggcattattatgaataatggcggtattgcaatgcggctcattaacttcgcaaaattgatcagcggcaggctgcccggttctctggcccatacaaatgttgtcggaaacatgttattcggttccatttccggttcgtctgtagctgctgctgctgcaatcggcggggtcatgtcgccgctgcaagaaaaggaaggatatgaccggacttactctgccgcagtaaatattgcttctgcaccaactggtttgcttattccgcctagcggtcttttgatcattttctcattagtcagcggcggaacatctgcagccgctttatttatggcgggttatttgcccggaatcttgtgggggctggctacgatggttgtcgcctgtatgattgcaaaaaagaaaaaataccctgttgcgccaaatgaatatactcatacatttgcctttatacatgtcgatatggagacaacagaagacgggatcaaactttcaatacaaaaggaaggaacatacgatttggaaagcaaaaacggagcgttttcttacagtttgccgtgtgattaa

SEQ ID NO: 2270 - DNA, 516 bp, Bacillus licheniformis
atgctagctttaaaaaaagcagtgaataaaacgattgaatgtttgacttgcacactaatggccatcatggtttttgttgcgatatggcaagtatttactcgatatatgctaaattctcccagtacgttttcagaagaatttttacgctattcactgatatggatttctatgttgggcggtgcctatgcattttggaaaaaaaagcacttggcgattgaatttatcgttcgaaaacttccaataaaagcagctgttttcgttcatactttcattcagattcttttgattgcttttgctctgattgtgttggtgttaggaggttcgaaagcagtgatcaccacaatggagcaatcttcagcagcattagggataccggtgggatttgtttatctatcacttcctgttgcaggcatactcatcattggatacagcttggccggtttatatgaatctttacatgaattcaattcaaaacaaaagtcaggtgatgatgtaaaaaaagcagaaaagatgtga

SEQ ID NO: 2271 - DNA, 1011 bp, Bacillus licheniformis
atgagaaaaatgctatccgtgttttttgtatgcgctttaatctttggaatgcttacggggtgtaaaagcagcgatgtaataggcgtcgataaaaccgtaacgttacggcttgctcacaaccataatgaggaacaccccatccacaagtctttactcaaattttcaaaagacgtagaaaagaaaaccaatggcaccgttaaagtgcaagtgtatccaaatgctcagctcggttcagaacgtgaagtgattgaattgacacagaccggggctgtcgatctggctaaagtaagtgcaagcgctttagaaagtttttcagaggtctactccatcttcagcttgccttatttatttgacagcaaacatcatttctatgaagccatggacagtgatattgcaaaagaaatgtatgatacaacgaaaaacatagggtttattggattaacctactatgatgccggttcgcggaacttttacacaaagaacaaaccgattatgcacccaaatgaccttaaaggtttaaaaattcgtgtgcagccgagtgctacagcgattcgaatggtggaactcatgggtggagcacctactccaatggcttatggagaagtatatacagcattgcagtcaagtgtaatcgatggcaccgaaaacaacgaaatggctttaacaagcagcaatcacggggacgtggcaaaagaatattcatactcagaacatgcgatcgttccggatattttgatcatgaatttggacaaaaaggatcaattaagcgaagagcagcagaatgcggtgatcgaagcggcgaaagagtctactgagtatcacaaaatcgtttgggctgaagaaactgaaaatgcggttgagaaagcaaaggaaatgggagtgaagttccacaagccagacaagactccattccgggatgcggtaagcccgcttcacgatgagtttgccaaaaaagaattgatcggaaaatactatagggaaattcgtgcgaaagctaaaaaagtaaaatga

SEQ ID NO: 2272 - DNA, 1011 bp, Bacillus licheniformis
atgactgtaaccattaaagacatcgccaatgcttccggagtaagctattcaacagtctcaaaggctttaagaaacagccctcttgtaaaaccggatacaaagaaaaaggtcttgcaagttgccgaacaattagggtatagtccgaattttgcagcgagaagcttggcatctaaaaaaagtcaaacgatcggtcttgtctggcctaccattgaaagaatcgctttatcagcacttgttactaaaataaatgaagtggtcgaaaagaacaactattcaatgattttatctgttaacagagctaaagaggcagtggatttgtttaagagttttcgcgtggatggaattatgatttttgaagaaggcggcgaaactcagcttagtgatgatactggattaactattcctatcttatcttacggagtgtcaggtgaacatacacatcctattatcgatgtcaatcataaaaaagcaatttacaaagccgttgcgtatctgtatcaacttggccacaaaaacattagctacgtcggcgacctctcccctgccgacaagcgtcaggttgaaaaaagcaaagggtttgaagaggttatgatggaagccggtttgaaattaagtcgaaacagtattttaaatactaatgggttaagctggtataacggttataccgctgcgaaaaaactattacaacaaaccccaaaacctacagcaatcattagcggaagctacgatatcagtgtagggattttacgagccgtaaaggaacaacagctcagtatacccgaagacctatctttaatttcttatgataatatccctcaaatggcaagccttgaaaccccgctgacgagcgtaggggttccaatcgatcaattggctcacaaaatggtcgattctctgctgtctcttattcgtgagccgggctcaataccattaactcaaaaaatggaccctgaattaaacgtaagaatgtcatgcgcttctccagcagttttaggtgaagaaaacaagtaa

SEQ ID NO: 2273 - DNA, 150 bp, Bacillus licheniformis
ttgcatttattagaaacatataaaaacacgtctgcaacatatattttctataaagaaagaacgtcccctaaggcatgcggccgttcatgtaaaaattcagaaatcaatgtaccgaggaattctgtaaaatccattgccatcagcttttaa

SEQ ID NO: 2274 - DNA, 420 bp, Bacillus licheniformis
atgtcaaaaaagaccatctattttttatgcacaggcaactcctgccgcagccaaatggctgaaggctgggcgaagaaacatctcggagacgagtggaacgtctacagtgcagggattgaagcgcacggtttaaacccgaacgcagtcaaagccatgcgagaagcaggcatcgatatttctgagcagacgtccgatatcattgatcccgatatcttacacaacgcagacctcgtcattacgctgtgcggggacgcggctgataaatgcccgatgacaccgccgcacgtcaagcgcgagcattggggttttgacgatcccgccaaagcagaagggacagaagaagaaaaatgggcattctttcagcgtgtacgcgatgaaattggagagcggatcaagcgatttgcggagacaggagaataa

SEQ ID NO: 2275 - DNA, 1296 bp, Bacillus licheniformis
atgacgacagtcttagccactttgatttttctgctgacgctcacgctcgtgatttggcagccgaaaaatctatccatcggctggtcggcctgcggaggagcggtgctggctttaattgccggagtcgtcaattttcaggatgtattagacgtaacgggaatcgtatggaatgcgactttggcatttgttgcgatcatcattatctccctgatccttgatgaaatcggatttttcgagtgggccgccctgcacatggccaaggcagctaaaggaaacggcattcggatgtttgtctatgtcaccctgctgggagccgtagtagccgcgctgtttgccaatgacggagctgctttaattttgacgccgattgtgcttgccatggtacgcgcgttaaattttcaagaaaagctcgtttttccttttattatcgcaagcggatttatcgcggatacaacatcgctgccgcttgttgtcagcaaccttgtcaatattgtctcagcagactttttcaacatcggatttatcgaatatgcaacaagaatgattgttccaaacctgttttcgcttattgcaagcatcatcgtgctttttttgtttttcagaaaaagcattccgcggcattatgacatgacaaatgtaaaacagccagcggaagcgattagagacaggaaaatattccgcttgtcatggctcatattagccgttctgttggccggttactttatcagcgagctgttctcgatccctgtctcgatcatcgcgggcgtgatcgccgtcattttcttaattacagcgaaaaacagccccgctgtgcaaacgaagaaagtgctgaagggagcgccttgggcgatcgttttcttctcaatcgggatgtatgtcgtggtatacggtttgagaaacgccggcttaacagatgttctctcacaggtcatccagaccgtcagcgatcaagggctgtttgccggaacaatgggaatgggctttatcgcagccatcctgtcttcattaatgaacaatatgccgacggtgatgattgatgcgcttgcgattcagaataccgatacacacgggattctcagagaagcgctgatttacgccaatgtcatcggctctgatctcggtccgaaaatcacgccgatcggctccctggcgacgctcttgtggcttcacgtcctttcactgaaaggcgtaaagatttcttggggaacctattttaaaacaggtgtcattttgaccattccaaccctgttcatcacgcttgccggactttatgtgtggctgctgatcatccattaa

SEQ ID NO: 2276 - DNA, 348 bp, Bacillus licheniformis
atgtccgtacaaacaaagcttgattcgaaaagcacggtgagctgcatgaagatattgagcgattctacccgactcttaattctgaaactgcttcaggagaaaccatattgcgtctgccagcttgtcgatatgtttgaaacaagccagcccgcaatcagccagcatttgcgaaagctgaaaagcgcaaatatgatcaaggaacagagaagggaacaatggcgtttttattcgcttcatgacgactttccggaacgcgaattggtccttgccgttctcaatcagatcgatgcacacgacgaggttcttcaaaccgttaaaagaaaagaaagacccgtttcgtgcagttaa

SEQ ID NO: 2277 - DNA, 213 bp, Bacillus licheniformis
ttgaaggaacctattgcaaaacgtacatacgtatatttcattgtctttggtcattatcatttgggaatccttcatgtctggctttttcattgggaactgcttgctacagaaaccggatttttcatttggggctgttcgatcctcatgggcctcatcctttatttgtccggccgcaaaaacgcagtgacacgccgatttttgcctcaactctag

SEQ ID NO: 2278 - DNA, 594 bp, Bacillus licheniformis
atgacaaatagcagaacgaatccaaaggttgatgaatttttaagcaaagccgaaaagtggaaggaagaatttaagaagctccgtcaaatcgtacttgaatgtgagctgaacgaagatttcaagtggaagcatccttgttatacgttcgagaataaaaacatcgttttaatccatggatttaaggaatattgtgcgcttttgtttcataaaggcgcattgttaaaggaccccaacgggattcttatccagcaaacggagaatgtacaagccgcgcggcaggttcgattcaccaatgtacaagaaatagctgaaatggagaccattttgaaagcttatataaatgaggccattgatgtagaaaaagccggcctgcaagtggattttaaacaggctgcagaatatacaattccagaagaacttcaaaaaaaattcgctgaaatcccagctttaaaagcggcttttgaagcattgacgccgggccggcaaagagcatatattctttatttttccaaaccaaaacaatccaaaaccagagagtcgcggattgaaaaatatactcagcaaattctcgatggaaagggattgaatgactag

SEQ ID NO: 2279 - DNA, 726 bp, Bacillus licheniformis
atgaaatttagcatcatgacgtttaatatccatcatggaaaaggaagggaccgccgcgttgatttaggtagaacagccggtgtgatcgctcaaagcggctgcgacatcatcggcctgaatgaagtggatcggcatttctcaaatagaagcgattacgaagaccaaatcggccggcttgcagaacaattgaacatgcactatgcgtactgcccctccctttcattgagttccggcgattcttctgagaaaaggcaatacgggaacgctctattaacgcgttttccgattaagaaagaacggcatcattcattcaattttgtcaaagggctgatcgaaggaaggtctcttcttgaggctgatgtccggatcggtgaccggctctttcgcgtttttgttacgcatttgagcctgaatccgtggcttcacggcaagcagacggattttttaatcgagaaggttcaagagagcgatctgcctgtgatcgtcacgggagactttaatatgaaaccttattcacggggatggaaaaaggtcgcggaaaaactggccgacctgtgggatgaaagtcaatacggacaggggttcacccacccttcccaccgcccgagacggcggttggactacatctttctcagtccgtcttttcatgtgtcagcggctgaaattgtcgccgttgatccgaacgcttccgaccatctgccgcttaagggcagcatcacatattaa

SEQ ID NO: 2280 - DNA, 858 bp, Bacillus licheniformis
atggacattttcttagcgattttaccagcgattttctggggaagcatcgtgctctttaatgtaaagcttgggggcggaccgtacagccaggtgctcggcacaacattcggcgctttaattttttcaatcggaatctacttcgtcgtccagcctgaattatccccccggatatttgccgtcggcgtcgtttccggactattttgggcgctcggccagaccaatcagctgaaaagcatcgatctgatcggcgtgtctaaaacgatgccgatctcaacagggcttcagctcgtatccacttctctgtttggggtgcttgttttccatgagtgggcgacgacaatctcgatcgttctcggcgttctggcgctgatttttatcatcgtgggaatcgtgctgacatcgctggaagaccgcagccaaaaaacagaggaaaaaaccggcgacatgaaaaaaggaatcgtgattttgctgatttcaacattcggctatctcgtgtatgtcgtcgtcgtccggctttttgatgtcagcggctgggcggctctttttcctcaggctgtcggcatggttgccggcggtttgatcttgacattcaggcataagccgtttaatttttacgtcatcaaaaatatcattcctggtttaatctgggcagcgggaaacatgtttttattcatctcccagccgcgggtcggcgtagcgaccagtttttcgctatcacagatggggatcgtcatctcaacgctcggcggcattattctgctcggcgaaaagaaaacaaagcggcagctgatcggtatcgccatcggcatcatactgatcgtcgcagccggcgttttgctgggcatcgcaaaagcttaa

SEQ ID NO: 2281 - DNA, 1188 bp, Bacillus licheniformis
atgaaagaaaagagcgcaggctgcgaaactaaagaattccgggcagtgtggatcgccaccgtcacaaatattgactggccttcaaaaaaaggactgacaatcgaagagcaaaaaacggagtatgtgaagcttttggatgatgtgacagcaatggggatgaacgcggtcgtcgttcaaattaagccggcggcggatgctttttatccttccgcatacgggccgtggtcggaatacttaacagggattcaaggaaaagaccctggatacgatccgctggcatttttgctcgaagaaacccaccggagaaagcttgaatttcatgcatggttcaacccttatcggatcacgatgaatcataccgatttgaacaggctgtcacaggatcacccggccagaacgcaccccgactgggtcgttgcctacggcagacagctgtattacaatcccggcatccctgaggcccaggaattcattgtccaaggcatagcggaagtcgtcaagaattacccggtcgacgccgttcatatggatgactatttttatccgtataaaattgcgggagtcgaatttcccgacttgagcacatatgaacaatatggaaaagaccgtttttcaaatattgaagattggcgaagggacaacgtcaaccagcttgtcaaacaaatcaatgatgccgtcaaaaaagagagggcctcagtcaaatttggaatcagcccctttggtgtatggcgaaatatagcagatgatccgacgggatcgaatacagccgccggaatgacaaactatgacgacctttacgctgacacgagggaatggatcagacagggatacatcgattacatcgccccgcaaatctactggagcatcggctttgccccagcttcctacgacatcttagtggactggtggaaaaatgaagtcagccatcgccccgttcatttatacatcggacaagcagcctataaaatcaatcaaaactcagatcccgcctggtcagaccctgaagaatatccgcggcagatcgcattaaaccgcgcctcaaatgtgatgggaagcatccatttcagcctgaaagatttaaaccggaatccgctcggcattaaagacagactgatccaggacttgtacaaaaaaccggcagctgttcccgatatgccttggcttggcagcgtaaacagtgaaaactga

SEQ ID NO: 2282 - DNA, 120 bp, Bacillus licheniformis
atgtcttggcctgttttttcatatacaaaaaagaacatccggcatataataacagaaagttctgatttttccaaaaggggagatgttcatgaaagaaaagagcgcaggctgcgaaactaa

SEQ ID NO: 2283 - DNA, 1203 bp, Bacillus licheniformis
atgtatcatttgtattctcacaacgacttggacggagtcggctgcggaattctcgcaaaagtggcttttggcgaacgggtcgaggtccgctacaattcggtcaccggactcgacatgcaagtcgggcgttttttggagcggacaaaaggcaaagaaaaacagcatgaaggcctgtttatcacggacttgtccgttcatcaagaaaatgaggaaaggctggaccaatatgcggaagcggggggaaaggtcaaactgatcgaccaccataaaactgcgcttcatttgaatgaacgcccttggggcatgataaaagttcaatatgaggatggcaggctcgcttcagcgacttctcttttttatgaatacttaatagacaacggccacattcgagagacaaaagcgatggatcagttcgtcgaactcgtacgcctctatgatacatgggaatgggaacagacgggcgcgctcgaagcgaaacgcctgaatgacctgttttttatggtatccatcgacgaatttgaggaaaaaatgatccggcgccttaaagaaagcgacgcgttttcatttgatgaattcgaagaaaaaatcttggatatggaagaagaaaaaattgaacggtatatccgcaggaaacggcgggaaatcgttcaaaccttcattaatgcgcactgcgtcggcatcgtgcatgccgaatcctatcattcagaggtggggaacgaactcgggaaaacgtatccgcacctagactatatcgccatcttaaatatgggcggcaaaaaagtgagccttcgcaccatccatgatgaaacagatgtatcagaaatcgccggcacgttcggcggaggcggccatgccaaggcagcggggtgcccgctgacagatgaagcgttcaagctgtatgtaactgaaccgtttccgctggagcccttgagagcagatgcctttaaaaacgtctataatgtaaaaaagtccgactacggcagcctttatgtcaacagggacgaggaccagttttttctctttcctagcgcaaatggctggaacattcaattaaacggcgtggctcagcatgagacattcacttcattcgaagaggcagagcggttcattaaaagaaattacgctgcatggctcgcaagggatgaagcatttgtccaatatttgatgcagcaggtgaaactggcgcttcaaacgacaggctaa

SEQ ID NO: 2284 - DNA, 759 bp, Bacillus licheniformis
atggatggaaatattcattcgatcgaaacattcggcaccgttgacggtccaggcatcaggtatgtcgtcttcacacaaggctgcctgatgcgctgtcaattttgccataatgctgatacttgggaaatcggaaccggaaaacaaatgacggtttccgaaatcgttcaggatgtccagcattatctcccgtttattcaatcatcgggcggaggcatcaccgtgagcggaggcgagccgcttttacaactgccgtttttaatcgagctgttcaaagcatgcaaaagcctcggcattcacacggcactcgattcgtccggcggatgctattcggctgcgccggcatttcaagagcagatcaaagaactgatccagtatacagaccttgttttgcttgacctcaagcatcacaacagaaaaaaacatatcaacctgacaggaatgccgaatgaccacattttagaatttgcccggtttctcgctgaacatcaagttcccgtctggatccgccacgtactggttccggggatctccgatatcgatgccgatttaacggccctcggcacgtttatcggcacgcttgcgaacgttcagaaggtggaggttcttccttatcacaagctcggcgtctacaaatgggaagcgcttggcctggattatccgttaaaaggggttgaaccgccaagtgccgacagggccgaaaatgcgtacagactgctcaccgcacacttgcaaggcggatccttgctgcaagagacataa

SEQ ID NO: 2285 - DNA, 2225 bp, Bacillus licheniformis
atggaacaatggaaaggtttcaccacaaacgtttggcaaaaagaagtcaatgtccgcgattttattctctcgaactttgagccatatcaaggtgacgaatcgtttctcgaacctccgacggaagctacatcggcattatgggatcatgtaatggatttgacaaaaaaagagcgtgaaaacggaggcgtccttgatatggatacagagatcgtctcaacgatcacctcgcacggtcccggatatttgaacaaagacctggaaaaagtcgtcggcgttcaaaccgatgagccgtttaaacggtcgcttcagcctttcggcggcatccgaatggcaaagcaggcatgcgaatcctatggttttgaactgaatgaagaagtggaaaggatctttaccgattaccgcaaaactcataaccaaggcgtgtttgacgcatatacggacgaaatgaagctcgcccgaaaagtcggaatcattaccggactgcctgatgcttacgggcgcgggcgcatcatcggtgattaccggagagtggcgctttacggcgtggatttcttgatcgatgaaaagaaaaaagatgcggccggcacctctcgggtgatgtctgaagaaaacatccgccttcgtgaagaactgtcagaacaaatccgagcattgaacgaacttaaagcgcttgcaaaaagctatgggtttgacatttccaagcctgcggcgaatgcaagagaagcatttcaatggctgtattttgcctatttggctgccattaaagagcaaaacggagcagcaatgagccttggccgcgtgtccacgttccttgatatttacatcgaaagagatttgaaaacgggcgtattaacagagcgtgaagcccaagagcttgtcgaccatttcgtcatgaagctgcgtttggtcaaattcgcgcgcacacctgactacaatgaactgttcagcggcgatccgacgtgggtgacagaatcaatcggcggaatggcgcacgacggacgcgccctggtgacgaaaaactcgttccgtttcctgcatacgcttgacaatttaggcccggcgcctgaaccgaatttaaccgttctttggtctgtcagactgccgcaaaagtttaaaaactactgtgccaaaatgtcgattaaaacaagctcgatccaatacgaaaatgacgatatcatgcgtccagaatacggtgatgactacggaatcgcctgctgtgtatcggcaatggcaatcggcaaacaaatgcagttcttcggagcacgcgccaacttggcgaaagctcttttatatgcgattaacggcggaaaagacgaaaagcataaaatgcaagtcggtccggaaatgccgccggttgcttccgacgtgctggactatgacgaagtgatgcataaattcgatcagacgatggaatggctcgcaggcttgtacatcaacacgctcaatgtcattcactacatgcatgataaatattgctatgaaagaattgaaatggccctgcacgacacggaaattttgcggacgatggccactgggatcgccggcttgagtgttgtcgccgattcattaagcgctatcaaatatgccaaagtcagcgtggtccgcgatgaaaacggcattgcggtcgattttgaaacagaaggcgactttcctaagtacggaaataacgatgagcgcgtcgacgcgatcgccgttgacattgtcaagcgctttatgaaaaaactgcgcaagcatcagacatatcgccagtccgttcagaccatgtcaattttacgatcacgtcaaacgtcgtttacggaaagaaaaccggaaatacgccggatggacgccgcgcgggagaaccgtttgctccaggtgcgaatccgatgcacggccgcgatactaaagggacgcttgcatcgctgtcttcagtggcaaagctgccttacagctatgcgctcgacggcatttccaacaccttttcaatcgtcccgaaagcgcttggcaaagacgaagagagccgcgccgccaatttgtcaagcatccttgacggatatgccgcaaaaacaggacatcacttaaatgtaaacgtatttaacagagagacactgctcgacgccatggaacatccagaggaatatccgcagttaacgattcgcgtctcaggctatgcggtcaactttattaagctgacgaaagaacagcagttagacgtcatcagcagaaccttccatgaatcgatgtag

SEQ ID NO: 2286 - DNA, 219 bp, Bacillus licheniformis
ttgagctctccgagcggaaatgcttcctcgctcagatcagtgaaaaaacgtcatgcaatagcggtctcgtcaaaagactgctatgtttgccaccagctcccaaagcaccatcgaatcattcggcaatcagactgtatcgataggctgatgatcaatatttctctgtgcaagccggccattttgccggcttttttatataacagttttcgttacctttga

SEQ ID NO: 2287 - DNA, 1470 bp, Bacillus licheniformis
atgaagaaacatatgaagctttgtctgtgtatgatgatgatctttgtattgactttggccggcagcatggacggcttgggcgctgaggaaaaaggcgggctcaaagagcaaatcgatcagctgttaaagaccgaacctgatttaaaaggagcgctcgcaggcatcagcgtcaggtctgcggaaagcgggaaaatgatatacggacatatgggcgatacacggatgagacctgcgtccaatctgaagcttttaacggcagcagctgcctattccgtcctgggcgaggactatacctttcccacagaggtaatggctgatggggcgcgagccgcgggcacactcaaaggcagcctttatataaaaggaaaaggcgatccgacgcttttgacagcggactttcaacaaatggccaaagcactccgaaaacaagggatcacagttatccggggagacttggtcggcgatgattcctggtacgatgaaatccgctattctcaagacctttcctggaccgatgaagacgcatactatggagcgcagatttcagctttaactgtttcgccaaatgaagactatgatgccggaacggtgataatcgacgtgaaccctgccggaaaaaccggaaaaaaacctgctgtattgctcaccccgcaaacaaaccatgtcaaaatcaaaaacgatgccaagactgttgctgccgacggaaaaaaagatatcacgattaaaaggaaacacggaggaaataccatccaaatcaaagggacgattccacaaggcgcttcaagggtcagacaatgggttgcggtttgggagccgtcagaatatgcactcgatttatttaaacaggctttacatcaacaaggcattcgaatcctgggaaagactaaaatcggcaaagcgccaaaaacagcgcaccgcatcaccacacatcaatccatgccgctgtcagagctgatgattccctttatgaagctcagcaacaacggccatggcgaaacgctgatcaaggaaatgggaagggccgcgagacgtgaaggaagctgggatcaagggctagaggtgttaaatacggaactgcagagatttggactggacacggaaaaaatcgttctcagagacggctcaggcatctcgcatatcaatttgatttctgcacatcagatcacaaagctattgtattccgttcaagacgagaaatggtttccgtcgtttgcccgttcactcccagttgcaggtgaaagcgacagaatggtcggcggcacattaagaaaccggctgaaagacccggctctaaaaggaaaagtcagggcgaaaactggctctctttcaaccgtcagttccttgtcgggctatgtcgatactgcaagcggaaagacattgattttctccattctcctcaatcagctcgtggatgatgagaaaggaaaggatattgaagacaaaatcgttcaaatattagcttcttcatga

SEQ ID NO: 2288 - DNA, 546 bp, Bacillus licheniformis
gtgttagtacttggagattttttaggaaataacatttatgaagataaggtagggatttttcattttttatatgccatcggattgtggacgtttcttatgttgggaatagagtttatgactctaaaaaataaatcgacacgttctctcttattaggcaatcctaacatcatcattcgagatggtgttatggacagaaagttacttacaaagaacaaattggatgtaaatcaagtattgagtatactccgtcaaaataatgtcttttcagttcgcgaagtcaaatacggtatattggaagctaatgggcaaataagtttattattaaaatccaagtatcaaaaaccagatctcaatcttccagaaagtccagtagacctcccaacatcgttaattatagatggggaaattttatgggataatttacatgaactcggatttgatcaacagtggttagataaccaattaactaccaatggatatgataatgtaaagcgtatactttacgcagattggcgagagagtgaaggcatacatgtaagtcctaaa

SEQ ID NO: 2289 - DNA, 1494 bp, Bacillus licheniformis
ttggagtggattttttatctatacctgttaaatacgttctttatcttattcatagcaatttgggaagttcgtcggcctgccaaggctttgaattggataataatcgtcctttttttacctgtcattggtttctggctatatcttagcatatcaaaccctaagtttattcatcgaaaaagattgacctgttctaaaaatgaatctaacaaattacctgagacattcggtgcttcagcatcggtaattgccaatgctttacggcatttcactgtgaatgggcttcgaatgggccaagtccaagtgtttaacaatgggatagcaaaatatgatcaactccttgtatccctgcaaaaagcccaaaaaaccattgatctggaatatttcatctatcggaacgaccaaattggtaatcgaatcacagaactgctaatcgaaaaagcattaaatggagtgcaggttcgttttatgagagatagcttggggagttataaattcccgcgtgaaaaaatccggcagatggttgaagcagggatagaatgcaggacaatatttcctctgcgatttccctggattttgtccaattggaattatcgggatcattgtaagattgtgacgattgacagaaaggaatcctttactggcggtatgaacgttgggtatgaatatacaggattaaagccagacgtaggattttggagggacactcatttgcaaattataggggaagcaacaggcgacttgcagactgtttttgatgttcattgggaaatcgctgtgccggaaaggataaaatcaaaaacaaatttgaaaacaaaatcagaggtaacgaaaatcaattcaatcggcagagcagatcattccaaatggtcagccgaattgggatcagagttgagcacccttgatgataaagaaatggacatatccggaaaaactaggacattgcataaagcgtatatccatacgttggaaggaaaccctggaattcctaccccagtcattcggcaagcttactttatatgtataacacaggcgaccaagactattgatttaacaacaccctattttgtaccagaaacggatattatcatggcattaaagacagcagtaactcgtggtgtccgtgtaagattgctggttcctcgccacaataatcaaaaaatcgtgggtcttgcaagccgtacttattacggagaacttatagaagctggagttcaaatctaccagtacgacaaaggaatgatacatgcgaaggtgttgaccatcgatgaggagattgctgccgtaggctcagcaaactatgatatgagaagttttcgcctgaattatgaggtgtgtcaagtcgtgtacagtgctgatgtggcaagggaactcacagagcagttcgagagggatcttactgattctgtaccattaagaattgaagacttggtgcaacgatccctgaccgagcgcattgttgaacagggtgctcgcgtgctttctccattattataa

SEQ ID NO: 2290 - DNA, 675 bp, Bacillus licheniformis
gtgtctatttttttagttaaagttatttttatctatattgtgtttattgtagcagtaaaaattttagggaaatcagctctagcccaacttacccctcatgattttggagcgattctttttttatcttatttagcttttggttctattaaagtaaacggagtgatggaggggattattggaatcattgtaataacatgcattcatctatttatatcaaagttaagtttattaaataagttaaacccttttattatcggaaaaccgactattctaattaaacacgggaaaattatctatcgaaatttaaaggaaagtagatatcctttacctgagctgttgtctaatttaagaacatcaggatatccggatattcacgatattgaatatgcgattttggaagcaacaggtgaaattagcatttttccaagaaaagaattagttcctattactccaaaagatttacatatgaaagtggaataccgcggattacccatagccgttgtcattgaagggaaagtgcaaaagcgtaatttaaaattaatcaacaaaaatgaaaagtggttaaaggaagaactaaaggcaaagggatatcttcaaatcaaagattttttttatgctgctgttagagataccgatcattcattaaccattaacaaaaaagatgttaacgactaa

SEQ ID NO: 2291 - DNA, 861 bp, Bacillus licheniformis
gtgcctgaatggttagaggtggtaatacggtcattattatttgtcgttgtcctgtttttaatcacaaaatggttagggaaaaagcaactttctgaactttctttttttgaatatgttgtaggtattacaattggaagtattggcgcagaagttatcacaggacttgaacggaacatgtttaacgggataatcggaatcgtggtcttcgcggcaataccctttttagcaggtttgctttccttaaaaagcaaaggctttcgcaattttatagaaggaaaagcaactgtatttatcaaagatgggaagattatggaagataatttaaaaaaggaaagatatacgacagatgagttactggaattgcttcgaaagaaagatgtctttaaggtagctgatgtggaatttgcggtattagagcccaccggggatctaagcgttatgctcaagaaagaaaaccaacctttgacaccgaaagatgtaaacttgactgttgcttccgttaaggaacctcagaccgtcattatggatggagaaatattagatgagcctctgtctacaattggtagaagtcggggttggttaaaaaccgaactagaaaaacaaggggtgacgattgagaatgtttttattgggcaggtagattcttacggacaattaacaattgacctttttgatgataaactccaagtcccgtcccctcaagaaaagcctttaatactttctaccatgaaaaagtgtcaagctgacttggaatcgtttgctcttggaacggaatcaaaagaggccaaacaaatgtataggttaaacagtgaaaaattacaagaagccattgataaagtgacccctattttaaaaggataa

SEQ ID NO: 2292 - DNA, 204 bp, Bacillus licheniformis
atgacagtaggatcagatgttaaacagtgttttgccagtctaaaaggggtagaagcaagtctctcaagtttagcattacggactcttgatgatgaatcgaagcgaactttgcatgaggctatgatggtagtacacgaagtaacaaaagatttaaaaaaaagagtaggagaactagaaggagaggaacttcagtacaaaggtttc

SEQ ID NO: 2293 - DNA, 351 bp, Bacillus licheniformis
atgatctatttttgggcttttgtcgtaggcggtttaatttgtatcattgggcaaattatgtttgatgtatttaaattgacaccaggtcataccttaagtgctcttgtagtgattggggcgcttttagatggatttggactatacgagcctttgattgattttgctggggcaggggctaccgttccgattacaaattttgggaattcgcttgttcatggtgcgatgcaggaagcagaaaaacatgggttagttggtgtactgacaggaatgtttgaagtaactagttctggtattacagcttccattgttttcggcatgataggagctttaatttttaagccaaaaggataa

SEQ ID NO: 2294 - DNA, 1020 bp, Bacillus licheniformis
atgctagcaggtcatcgtacatggatcttcgaacaaaagcctgtcattatctccactggaaccgttggtggaccatttgaagccaatggtgctatcccagatgatttcgatactcttcatgctgatttatggcttgggcaggattcctatgagaaagcacataaaatcctttttgaagaggcttgccaaaaagccatggaaaaagggggcatacaaaaggatcaagttcaatttatcctagctggggacttaatcaatcaaatcaccccaacaagtttcgctagcagaacgattggagcgccttattttggcttattcggtgcttgctctacctcgatggaaggactggctctaggtgcttatattgtaaatacaaaaggagcgaaatatttgttaacaggagcttccagtcatgatacagctgttgaaaaacaatttcggtatccaactgagtatggtggacaaaagccacctacggcacaatggacggttactggtgcaggtgcagccctattaagtgattctggggaaggacctcatgtcacatctgccacaattggtcgtgtaatcgatatgggattgacagatccatttaacatgggaggagctatggcgccagctgcggttgataccattgaagcccatttaaaggaacgaaatgttgagccatcttattacgatttaattgtaaccggtgaccttggccaaatcggacaggaagtgtccatggatctatttaaaaagcatggaactcctattagtgaagaacaataccaagattgtggccttatgatttatcgggaaggacaacccgttcttgcaggggcaagcggtgcaggctgttcagcaacggtagtttatgggcatttattaaaccgcatgaaaaatggtgaatttaaacgcatgttagttgtggctacaggtgctttgctttcaccgttgtcctttcagcaaaatgaaacaattccttgtatcgcccatgcagtgtcaattgaatacggaggtgaacaattaacatga

SEQ ID NO: 2295 - DNA, 480 bp, Bacillus licheniformis
atgtctaacaatcaaaagaaacaacttactcctgtgcaacaggaatatcaaaaattgcaaaaacaacgagagatcaaaagaccggttgttaaaaattgtattaaggcctttttaaccggtggacttatttgtttgattggtcagcttatttcagacttttacatttattatttcgattttactgagcaaacggccggaaatccgacggtgggtacgttaatttttattacaatgcttcttactggttttggcgtatatgatcgaatggcccaatttggtggggctggaacagctgtacctgtaacaggttttggcaatgcggttatatcgcctgccattgagcatcgaaccgaaggatttgtactgggcgtaggtggcaacatgtttaaattagcgggggcggttattttatttggtgttttttctgcttttgtcattgccttaattaaaaccactttaatccagtggggtggtttataa

SEQ ID NO: 2296 - DNA, 474 bp, Bacillus licheniformis
ttgaaagataaaataaccacattgaaaaacctactttttattataatggtcattggtttcgcatcaggatgtaatggtaatcaaaatgaatttattcaaggtaatagtacttttggtatttcacaagtacatacaagtaagccaattgatcaatccgttgccaatcatgcgaaagaaaagataattgccaaggaagatattacagacgtaaaagctgtgaatactgataaagagcttatggcagcgattaaagttgagaattttgatcgatttcgattaaagagtatcgagaagtcagtaaaatccgacttagaaaaaaaatatcccgactataaagtttttgtttcgactgataaaaaaatattctgggagcttgaaaaggtcgagcaaagactgaaaaaaaacgatatgaataagaagaacttaaaaaatgatttgaacaaactgaaaagtcttatgaaggaacaaacctaa

SEQ ID NO: 2297 - DNA, 204 bp, Bacillus licheniformis
atgacagtaataaatgacgttaaaacagctctagcaggattgaaaagtgctcaagcaagttttgaaacatttgctcttagtacagataatcaacaagctaagcaactttaccaagatgcagctaagcaaacccaatccgttgtagacagcattgaaccacgtgttcaacaaatcgaacaagaagaacctcaatacaaacaacag

SEQ ID NO: 2298 - DNA, 267 bp, Bacillus licheniformis
ttgattaaagggattccttgggcaggtaaaggctttattacaaagttggagataagtatcgacggtgggattacttggctaaatgcaatgttagagtcagctaaaaatgctggttatgggtggcgatcttggtcttatgagtggactgtactggacaaaggtgaatataagattatgacaaaagctactgattcttatgatagaactcaaccaaccctacctttctggaatagaaaaggttacggttataatgcaattgatgaaatt

SEQ ID NO: 2299 - DNA, 891 bp, Bacillus licheniformis
atgatgaaacgcgtgaataaaattgccattgagttaccatatccagaacatggcgatatgaatgctgctgcagctgtacaagaattaatgggtggaaaattcggtgagatgtccaccttaaacaattacatgtttcaatcctttaatttccgcggtaaaaaaaagctaaagcccttttatgatttaattgcaagtattacagcggaggaatttggccatgttgaattagtagcgaatgcaattaatctgctctcgattggcaataccattcctggcaatcctgataccgccccactgcaaaatggaaaggatgcccgttattctacacattttacaaccactgctcaaacagcttttccaggtgacgggatgggaagaccgtggaatgggtcgtatgtaaataacagtggaacgctcgttgaagatctactcgccaattatttattggaaatcggtgctagaaaccacaaaatgcgtgtgtatgaaatgacgacccatccgactgccttagagatgaccggatacttgcttgtcagaggtgggactcatattattgcctatgcaaaagcactagaagtagctacaggtgtggatgtgggtaaaatgcttccagttccaagtttggataataataagtttgattatgccaaaaagtttatggatcaaggattgtacaatgtgttgtatacatggggagaagcggattatcgtgatatcaaccaaatttggaaaggtgcaaacccagaaacaggtgaaaggctgcatgtaattgacggaatgcctgaaggtgcgcctgtacccgattttccagaacttccagagcaattcgctccagggattgatttggatgattactatcgtattttaaaacgtttaaaaagcaatatgtaa

SEQ ID NO: 2300 - DNA, 207 bp, Bacillus licheniformis
atgagtgaaaaatggaaacttagtgatccgtatgtttatcaagctttaatgggacttcacaatcaatcccttgctgttcaaacgacccacggctctgtacgaggtgtattacgagaggtcatgcctgatcatatcgtcatcatgatgggcgggacaccattctatgtacgtacagcacaaataatttggtttcatccgacgatgtga

SEQ ID NO: 2301 - DNA, 1283 bp, Bacillus licheniformis
atggaaccgacaaaagcattgtttcctttgatggggtatacaggcagagcagactttaccgtgaactgtatgctcaatgggcgtgtagcgttgattgtggatggtacaccggctgcgttgattgcgcctgccaatttatttttgcttgtgaaagcacccgaagatatccactttactgctttggcagctacatttggtcaaacgcttcgtttacttggcttgtccgtatcgctactgcttcctgcattttttgttgccattctttcctatcatcaagatcagctgccctattatctacttgccactttggggattaaccggttgggaatcccttttgatgtggcagttgaaatgtttattgcacttctcttcttagaaatcctgcgggaagctggtatccgattgccttctgcggtcggctccacggtaacggttgtaggaggacttatcctgggggatgcggccattcgtgctggattcttatccccaggtatcgttgtcatcggagcaattacacaaatctttggttcaactttatcgagcctatcattggctggaacgattagtaccttacgcttttttcttttcattctgtctgccacgcttggcatttatggcttctttcttggattatttattgtgctcagccatttagcctcattgcgttcatgcggcttgccttacttggccccaatatcacctccatttaaagacttggccaacgctttgtttcgattaccttggccatggcgaaacactcgaccggacatgttgaagacacgagattctacaaggcaaggggacaggcataaatgaggagatataaaagtatggttgcacttttccttcttctcacccttaccggttgctggagcagatatgaagtgcaaaacatgaactatgctacggctgttggaatagactatgtcgatggccaatacaccatgtatttgcaattgcttgatttctcgacagtggccaagctggagggacagcaaaaagcggagcagcccccggtttgggtgggcaaaggcgaaggttcctcgtttacggaggcggcaaatgatttgtacagtacatcacaacaacgcttaaacttgggacaaatctctgccattttgttcagcgagagattgatgaaggaaaacaaagtcggagaagtgctggaattgatcaaccgttatcgtgaaataaggtacttggcctggctgtttagcacaagagagcctcctgaagaaatcttgctggcaaccccattttttagattttcgccaaatgcataa

SEQ ID NO: 2302 - DNA, 303 bp, Bacillus licheniformis
atgtttaaattatatttagatcctggtcacgggagaatggacccaggatctattggcaatgggatgcaggaaaaagaaattaccttaaatatttcccatagcatccgaaatctcttggaaaaccattatgaaggcctgcaaattaaaatgagtagaacagcagatattacgcgcagcttgaaagaacgtacagatgatgcgaatgctttcggtacgggggccaaaggatggatttgtggaagaagtgggagtcaatgtggcgttaattcggaaacgaatcaaatcaaccagcatggtttatga

SEQ ID NO: 2303 - DNA, 450 bp, Bacillus licheniformis
ttgaaaattccaaagacagccaaagttagtatcccctttccatccgtatgggggattgatgcttctattgcggggagatccattattagaggtatacttaccattgattccattgtagacaacaaagtagtaggtacagttaattttcgtggtatacctattccgattaatgggtattgggacgaaagcgctaaacaaataagtttcgattcaccatatgcctccttttttggcaacttgacaataattgatgagaccgctataagcattcggcatttcattttaagtggacggtttataatgaaacctccctctttgctggctggtgaatacggaaattggattgctacaacctttacaacccgtttgggacctcccatatatactaatgttttaccacctgttggtgccttttcagtctcaagtatgctcttgggacagcaattgttt

SEQ ID NO: 2304 - DNA, 576 bp, Bacillus licheniformis
ttgcagaaaatcggttatgtacgcgtcagttcgactagccaaaatccttcaaggcaatttcggcaattgaacgaaattggaatggatattatttatgaagaaaaaatttcaggagccacaaaagatcgtgaacaacttcaaaaaatgttagaggatttacaggaaggtgacattatttatgttacagttttaactcggatcactcgaagtacgcaagatttatttgaattgattgatttaatacgaaataaaaaggcaagcttaaaatcacttaaggatacatggctagatttatcagaagataatccatatagccaattcttaattacggtaatggctggtgttaaccaattagagcgagaccttattcgtatgcgtcagcgtgaaggaattgagctcgcaaagaaagaagggaagtttaaaggacggttaaagaaatatcataaaaatcacgcaggaatgaattatgcagtaaagctatataaagaaggaaatatgactgtaaatcaaatttgtgaaattacaaatgtatctagagcttctttatatagaaagctatcggaaggaaaaaaataa

SEQ ID NO: 2305 - DNA, 2961 bp, Bacillus licheniformis
atgaaaattgcgagaggtagagaattgcttacactggaacagaggcaggattttatgcaaatccctgaagatgaatggatattggggacctacttcactttttccaaacgggatttagaaatagttaataagcgaaggagagaagaaaaccgtttagggtttgctgttcaattagctgttcttcggtatcccggttggccatacactcatatcaaaagcatcccggaatcagtcatacattatatatcgaaacaaatcggtgccactccatcttcgattagtctttatcctcaaagagaaaatacactttgggatcatttgaaagaacttcgaagtgaatacgactttgtaacttttactctaagagaatatcgaatagcatttaagcatcttcatcaattagcttttgaaaatggcgatgccatacatctactacatgaatgtatagattttctaaaaaaaaacaaaatcatactgcctgctattactacacttgaaagaatggtgtgggaggcaagggcaatggctgaaaagaaactgtttaatactgttagtcaatctcttacaaatgaacaaaaaggaaagcttgaagagatcattacttcgcagcatccatccgaatccaataaaacgatattgggttggttaaaggaaccgccgggtcatccttcacccgaaacatttctaaaagtaatagaacgattcgaatacatacgaggaatggaattagaaacggtacaaattagtcatttgcatcgcaatcgcctgtttcaactatctcgcttaggctcaagatatgagccatatgcattccgtgactttcaagaaaataagcgatattcgatattaaccgtctatttattacatcttactcaagagttaacggataaagcttttgaaattcatgatagacaaatacttagtctgttatcaaaaggccgtaaagctcaagaggaaattcagaaacaaaacggtaaaaagctgaatgagaaagttatacactttacgaacatcggacaagctttaatcaaagcaaaaaaggaaaaattagacgtttttgaggttttagaatccgttatcgaatggaattcttttgtctcttcggtcgaagaagctcaggagcttgcacgccctgacgactatgattatttagacttactgcaaaaacgattttattcacttagaaaatatacgccaacgctattaagggtattggaatttcattctacaaaagcaaatgagccacttttacaagctgttgagattatccgtggaatgaacgaatccggaaagcgaaaagtgcctgataactcacctgtggattttatttcaaaacgttggaaaaagcatttatacgaggatgatggtacaacaatcaatcgtcattactatgaaatggctgttttaacagaacttcgggagcatgttagggcaggagatgtttccattgttggcagcagacaatatagagactttgaagaatatttgttttcagaagatacatggaatcaaacgaaggagaatacaagattatcagttagtttatcattcgaggattatatgacggagagaaccagcagccttaacaaaaggtaaagtggttagctaccaattccaacaagttagacggggtttctcttgaaaaaggaaagctgtcaattgaacgcttagaaaaagatgttccagaagaagcaatagcgcaagcctgtatcagatgctaccaagaataaaattaaccgatttactgatggatattgcttatataacaggatttcatgagcaatttattcatgcttccaataatcgaaaaccggataaagaagaaacaattattattatggctgctcttttaggaatgggaatgaatattggtttaagcaaaatggctgaagcaacacccggacttacatataagcaattggccaatgtatcacaatggcgcatgtatgaagatgcaatgaataaagcccaagccgtattagtaaattttcatcacaaattgcaattgtcctcctattggggagacggtacaacatcctcgtccgatggtatgagaatgcagataggcgtttcatagctacatgcagatgcaaacccacattatggaactggaaaaggagccaccatctatcgttttacaagtgatcaattttcttcttattacacaaagattattcatactaattcaagggatgcgattcacgttttggatggtttgttacaccatgagacggatctaaatatagtagagcattatacagacacggctggttacacagaccaaatattcggactgacccatttattaggatttaaatttgctccaagaatacgagatttatcagactcgaaattatttacaatagataaggcaagtgagtatccaaaattagaagtcattttacgtggacaaataaatacaaaggtcattaaagagaattatgaggatgttttgcgattagctcattctataagggaaggaacagtttcagcatcccttattatggggaaattaggttcttattcaagacaaaacagcttggctacagccttacgtgagatgggccgaatagaaaaaacgatctttattttgaattatatttcggatgaatcattaagaagaaaaatacaaaaaggattgaataaaggagaagccatgaatggactgggcaagagctattttcttcggaaaaacaaggagagcttagggaacgaaccatacagcatcaattgcaaagagccagtgccttaaacatcattatcaatgccatcagtatctggaatactttacatctaacaaaggcagttgaatatcaaaaacggtcaggtagttttaatgaagaattattgcaccatatgtcacctctaggttgggaacatattaatttacttggagaataccattttaattcagagaaaatggtctcgttagattctttaagacccttgaaactttcttaa

SEQ ID NO: 2306 - DNA, 1179 bp, Bacillus licheniformis
atgtcaaaacatatcgtcattttaggcgctggttacggcggattactgtctgctctaacagttcgcaaacactacacaaaagaagaagcaaaagtcacagtggttaaccaatatccgacacatcaaatcatcacggaattgcaccgccttgctgcgggcaacgtgtcagaacaggcagttgcgatgccgcttgcaaagcttttcaaaggaaaagacatcgatcttaaaatcgccaaagtcaactctttctcagttgacaaaaaagaagtcgctctttctgacggctctaccctgacatatgacgcgcttgtcgtcggtcttggttctgtcactgcttacttcggcattccgggacttgaagaaaacagcatggtgctcaaatctgcaaacgatgcaaacaagatcttcaagcatgttgaagagcgcgtgcgcgaatacgcgaaaacgaaaaacgaagctgatgctacgatcttaatcggcggcggcggactaacaggcgtcgagcttgtcggtgaactcgccgatatcatgccgagccttgcgagaagctacggtgtcgatccgacagaaatcaagctgaagcttgttgaagccggtccgaaaatcctgccggttcttccggatgagctgatcgaacgtgcgacaaagagccttgaaaaacgcggcgttgaattcttgacaggactgcctgtcacaaatgtagaaggaaacgttgttgatttgaaagacgggcaaaaaattgttacaaatacatttgtctggaccggcggtgttcaaggcaatccgctgatcggcgaatcaggtcttgaagtcaaccgcggacgcgcaactgtaaacgacttccttcaatctacatcacatgaagacgtgtttgttgcaggggacagcgccgttgtcttcggtccggatggccgtccgtaccctccgacagctcaaatcgcatggcaaatgggcgagctgatcggctacaacctgtatgcatacttagaaaacaaatcaatggcgacgttcagccctgtcaactcaggtacgcttgcaagcctgggccgcaaagacgcagttgccgttatcggcgcgaacagcacatctcttaaaggcctgcctgcttcattgatgaaagaagcgagcaacgtccgctacctgagccacataaaaggtctgttcagcctggcttattaa

SEQ ID NO: 2307 - DNA, 435 bp, Bacillus licheniformis
atgccggaaacaatcgatcaaacagctgatcaaacaaacgaatctgtaagccaaagccaacgcgatcttatcgatcaactgctaaaacctgaagtacaggagtctttgactgttttagtcgaccagcttccaaagctgacagaactggtcaacattttgacaaagtcttacgacttcgcacaatccgttgcaactgatgaagtattaaaaaatgatacggtcggtgccattacagaaattcttgagcctgtcaaagatacggcaaaagaaatcgcggctaccgccattgaagcaaaagaccgcgctgacgaaagcaatgaagtcatcggacttttcggtttgctgaaaatgcttaaagatccgcaggcccaaaagctgttccgctttgttcaaagctacctgcaaatcatgtcagaacgcgaaaaacaaaaataa

SEQ ID NO: 2308 - DNA, 324 bp, Bacillus licheniformis
atgaaagaagccctatatataaagttttctatgattttatttcatttccgaaacaatcacgttcattttttgttcaaaaagtgttatcatttagtagtaaaaaatacagcgtgttttgagattgcgggttttcgggagttccagaccgaaaacagcaaaacaaacacaaaaggggagagcctttttgcggacttgtttgtgcataaattcacaaactataaaaaggggcttccttcaaaaaacagcacatcgcttattgaaaaggagaattggttatgccggaaacaatcgatcaaacagctgatcaaacaaacgaatctgtaa

SEQ ID NO: 2309 - DNA, 231 bp, Bacillus licheniformis
atgtacttgacgataaaggaaaccgcagaatatttaacgctttcagaagcatatgttgaacagcttgtgagagaaaagaaaatccgcaccgtcttcgacggacagcagcatttaatcaacaaagagcaattcaatacccatatggaacagatggaaaagtataaagagtgggcggaatcctttctgaacgaacccatccccgaagatccggatgttaaagatgaagattaa

SEQ ID NO: 2310 - DNA, 225 bp, Bacillus licheniformis
atgtattcaaaatggaattctgaaacgtcttatccgccttcagccccgcaaatgcataccggtcaatcttcgcagcagatgaaccaaaggctgaaaaatctcgaagatcaaatggaattgctgatcaagctcatggaaagcaacaatcagctgctgcgttcgattgaagagcagcagaatcgcgtctgcacggccggcggcggttcggttatcgtcaggatgtga

SEQ ID NO: 2311 - DNA, 1953 bp, Bacillus licheniformis
atggccgaaaaagcggtttggcagcctgatccggaatttgtaaaaacaacccggctgtttcaatggatgacagccctcggtttttccgactatgatgattttttgaaagcaagtacaaacgatatcgcctggttctgggaagaggccgaaaaagcgctcgggatcagctggtacaagcggtacagccaaacattgaatctcgacaaaggcataaaatggccgcaatggtttaccggcggccgcttaaatgccgtttacaacgccgtggaaaaatgggcccgccggcctgatacggccggcaggacggcactcatctgggaaagtgaagacggaaaaacagaacagatcacctattcttctttacaccaacaagtcgcccgtgcggcggcaggctttaaaaagcaaggcatctcaaaaggggatgtcattgcgatttacatgccgatgatccccgaaacggtcatcgccatgctggccgccgctaaaatcggagcggtattctcaccggttttttcaggctacggcgcccatgcagcagcggcgagacttaccgctgccggagcgaaaatccttgtcacagcagatgcctttttgcgaaggggaaagaaggtctgcatgaagaaagaagctgacaaagccgcggaccgttcccccactgttcaaaaagtcgtcgtctgcaagcttcacggcggcgatcaaggttggaattataagagggatatcgactggaatgaattgatgaaaaacgagcccatgcaaaacaccgaagaaatggacagttcagatccgctcatgctgctatacacatcagggacgacaggacagccgaagggagcggttcatacccatgccggttttccgctgaaagctgcatttgatgcgggattcgggatggatgtcaaacaaggggacacatttttctggtttacagacatgggctggatgatggggccgtttttaatattcgggggcctcataaacggagcggctgttttgctgtttgacggagcaccggactacccggccccggatcggctgtgggagcttgtcagcagacaccgggtgacgcatctcggcgtctctccgacgctcattcgctcgctgatgcagcacggcgaagattttctctatcaatacaatctgaacagtctgaaggcaatcggctcaacgggcgaaccatggaattatgagccgtggatgtggctgttcctccatgttggaaaagaacggattcctatatttaattattcaggaggaacagagatctcaggcggaattttaggcaatgtgctcctgcggccgatcacgccgatgacgtttaattcgcctcttcccggcatggcggccaatgtcttcaatgaaaaaggagaggaagtcgtcaatgaagtcggagagcttgtcctgacaaagccctgggtcggcatgacgaacggtttttggaaggagccgtcaagatacgaagaagcatattggagccgctggaccgacgtatgggtgcacggcgattgggcaaaacgggatgaaaacggctactggacgatcagcggacgctctgatgatgtgatcaatgctgccgggaaaaggatcggccccgccgaaatagagtccgttctggtcggccatccagcggtggcagaagcaggcgtcatcggcgttccggataagctcaaaggccaggctgccgtctgcttcgtcgtcctcagacagtcggaaaagccgtcggaagaattaaaagatgatttgctgaaccttgcatctgatgcgatcggtaaagcggtcaagcccaaagcggtttattttgtcagcggtttgccgaagacgagaaatgcaaaagtgatgagacggctgatcagagctgcctatatgaacgagcccgcaggcgatttgtcaactttggaaaaccgcgaaacatatgatgaaattgccggtctttcagtgcgaaaaaatctgtag

SEQ ID NO: 2312 - DNA, 1530 bp, Bacillus licheniformis
atgccggccgaaaaggaattgtatgaacgcatccgccggattcaggagggcggcgcggagaaataccatgaagctaataagaaaaaagggaaattatttgtcagagaccgattaaagctgctgcttgacgaaggactcgacctagaggacgcgttttttgccaattgcatggctgacgggctaccggcagatggagtcgtcactggaatcggaaaaatcggcgggcgaaccgtttgcgtcatggccaatgattcaactgtcaaagcaggatcatggggagcgagaaccgttgaaaaaatcatccgcatccaggaaacagccgaaaaactgaattgcccgcttctttatttggtcgattcggcaggcgcaaggattacggatcaagttgacatgtttccggggcgaagaggagcggggcggattttttatcagcaagtcaaattatccgggcgcatcccgcaaatctgtctcttgttcgggccttcagcggcaggaggcgcctacataccggctttttgcgacatcgtcatcatggtcgaaggtaacgcctcgatgtatttaggctcgccgcgcatggcggaaatggtgatcggcgaaaaagtatcgcttgaagaaatgggcggcgcgagaatgcactgttctgtttcaggctgcggagacattcttgccgacacggaagaagatgcgatcaagtcggcgcgccggtatctttcctactttccgtcgaactacaccgaaaaagcgcctgtcattgaagcaaaatccgcccgtccgtttgaccggtcattggaggacatcattccgaaaaaccaaaacgctccgtttcagatgatggatttaatcgatcggatcattgatgaagcgtctttttatgagatcaaaaaattgttcgcgccagagctgattaccggtttggcaaggattcacgggcagcctgtcggcatcattgccaatcagccgcgggtcaaaggcggtgttttgttccacgattcggcagacaaggccgcaaagtttatcaatttgtgtgatgcctatcatatcccgctgctgtttctggctgacatccccggttttatgatcggaacgaaagtcgagagggcgggtatcatcagacacggtgcgaaaatgatttcagcgatggccgaagcaaccgtaccgaaaatatccgtcatcgtcaggaaagcttatggtgcaggcttgtatgcgatggccggtccggcctttgaacctgactgctttctggcgctgccgacggcgcaaattgccgtcatgggcccggaagcagcggtaaatgccgtttacgctaaaaaaatcgcagaattgcctgaagaagaacggtccgcattcatcgccgaaaaacggaaagagtaccaaaaagacatagacatttaccggcttgcttcagaaatgattgtcgacgggatcattccggccgactcgctgcgaacggaactcatcaaacggctgaatgcatatatgaccaaatacatgacatttacggatcggaagcatcctgtttatcccgtctaa

SEQ ID NO: 2313 - DNA, 783 bp, Bacillus licheniformis
atggagcccaatgttctttattccataaacgagcagtcggtcgccgtgttgacgctgaacaggccgcaggctgcaaatgccctctcgcttgggcttctcgacgactttcagcgcatccttcgagatattcgttcaaacccggccgtccgctgtgtcatcataacgggaaaaggggacaggacgttttgtgcaggcgccgatttaaaggaaagagcccgcatgagccaaacagaagcgaagcaggctgtttccctgattcaacgcgtggtcagcgaaacggaaaaactgccgcagcccgtcatcgcttcattaaacggaagcgctttaggaggggggctggagcttgcattggcgtgcgacatcaggatcgcagccgaacatattgaactcggcctccccgaaacaacgctcgcaatcattccaggggcaggagggacacagcggctgccccgcttgatcggcaggggaaaggcgaaagaaatgatctttaccggctgccgcatcagcgccgaagaagcgcaaaagatcagcctggttgaacatgtcgttccgctttcgaagttaaaggaagcgagtgaaagcatcgcggcgaacatcgcggcgaacggaccggtagccgtcagacaagcgaagtttgccatcaatcaaggccttgagacagctatcgaaacagggcttgccattgaacaaaaagcctatgaactgacgattccgacgaaagacaggacagaagggctgaaagcttttgcagaaaagcggaagccggattatacgggagaataa

SEQ ID NO: 2314 - DNA, 912 bp, Bacillus licheniformis
atggacgtaccgaagaacattttcattaaagaagtcgggccgcgcgacggtctgcaaaatgaacaaaccgcactttcgacagctgataaaattacctggatcgacatgctttctgccacagggctttcgtatatcgaaatcacttcattcgtccatcctaagtggattcctgcactgtctgatgcccttgatgtcgccaaagggatcaaccggaagccgggcgtcacctacgcagccctgattccgaaccgaaaagggctggaacgggctctcgaaggagggatcgatgaagcttctgttttcatgtcagcaagcgagacacacaaccggaaaaatattaacaaatcgatcggggaaacgcttcccgtcctgaaggaagtcatcggagcggcaaaacaagcgagcctcaccgccagagcatacctgtccacagtatttggctgtccttatgaacatcacgtgccattggaacaaattatacggacatctgaaacgctgttcgacatggggatcaacgaactttccctcggagatacgatcggcgcagcaaatcccgtacaggttcaaagggtgcttgaagtcctcttaaagcgctttccaaaagagaatatcgcccttcattttcatgatacgagagggatggcgctcgccaacatgatcgcagcgatggacatgggaatcaccgtatttgactcatcatgcggcgggctgggcggctgtccttacgcagcgggagccacggggaatttggcaactgatgatttgatctacatgtgcgcccagatgggcatcgaaaccggagttgatctcagcaagctgctttcagctgctaaatggatcgaagacaaaaccggaagagagctgccaagccgaaatttgcaggcggctaaatcaaagaactgttttcattga

SEQ ID NO: 2315 - DNA, 213 bp, Bacillus licheniformis
atgaatactgttgtcaccaatatggcaggaaacgtgtggaaaatattagtgaaagcgggggacaaaatcgaaaaggggcaggaagtcgccattttagaatcgatgaagatggagattccgattgtcgccgaaacggccggaacagtcaaaaccgtcagaaagaacgaaggtgattttgccgatgaaggggatgtcttattggagcttcaataa

SEQ ID NO: 2316 - DNA, 1341 bp, Bacillus licheniformis
ttgtttaagaaagtactgattgccaaccggggagaaatcgccctccggatcatccgaacttgtcaacggctcggtattcagacggctgctgtctactctgaagcggatgcggagtccctgcatgtcaaagctgcggatgaagcctggctgatcggcaaaccgcgggtcagtgaaagctatttaaatattgaaaaaatcatcgaaaccgctaaaaaagcgggagtctgtgccattcatccgggatacggcctgctttccgagaacagccgttttgccgaaaggtgcctcaaggagaatattacgtttatcggtccgccgcctgacgttatcgccaaaatgggaagcaaaattgaagcaagacaagcgatggaacaagccgggattcccgtcgttcccggcgtgacaaaaagcttggccggtctgaatgaagccaaggctcttgccgaatccatcggctatcccgtgatgctcaaggcttcttttggaggcggaggcatcggaatgcagctgattcgcaatgaaggcgaattagaaaaagcatatgaaggcagccaaaaacgagccgccgattttttcggagacggggctatgtacatcgagaaatatatcgaagatgcaagacatatcgagattcagattttaacagacgaatacggaaatgccgtctatctttgggaacgggactgttcgattcagagacgccagcaaaaaatcatcgaagaagcacctgctccgttattcgatgaaaacatgcgcgcgaagctcggtgaagcggccgtgaaagccgcgctgtcgatcggctatgccaacgccgggacaatcgagtttttagtagacaaggagaatcatttttattttcttgagatgaatacccgcctgcaagtcgaacacccggtgacagaggaaattacagggcttgaccttgtcgaagaacagctcaatatcgcagcgggaaaaccgctttcccataagcagaaagacattcggcgggacggacatgcgatcgaagtcagaatctgtgccgaagatccgaaaacatttttcccttcgccggggcggattaccgaccttaagctgcctgagcaaccgaatgtccgtcatgaatgcgcagcagccccgggtatgactatcaccccgtattacgacccgatgattgccaagatgatcgtcaaaggaagcagcagagaagaagccatctgcacattggccgaagcgctttcacaatatcaagtgaaaggcattaaaacgaacattccgctccttgaagacattgtaagttctgacgaattccgaaaaggcggggtccaaaccgattttatcagtcgctatcagtcaaaatga

SEQ ID NO: 2317 - DNA, 1638 bp, Bacillus licheniformis
ttggcagagctgctccatttgacaattggaaagttattggagaaaaccgcggcagacgcccctgatcacgaggctgtcgtctatccggaccgcggcctgcgttatacgtaccgggaatttgaccagttgtgcagaaaagtcgcaaaaggactgatggcgctcggtattgataaaggtgaacatgtcgcaatttgggcttccaatactccggaatggctcaccgcccagtttgcttcggcaaaagcgggtgctgtactagtcacagccaacacgaactatcaattatcagagcttgaatatgtgctgaaacagtcagatgccacaacactcattttaatggaatcataccggggcacttcctacattgatatcctttgcaaactgattcctgaattaaaggagggcgaaccgggcaggcttgcatctgaaagactgcctttcttaaaaaatattattttgctgggggatcaaaggcatcccggcatgtacctatgggatgatttattaaagctctcagggtcagtaagcgaaaaagcgcttgatcgcaggatggaacggctcaaagagcatgatgtcattaatatgcaatatacatcaggtacgacaggctttccgaaaggcgtgatgctcacccattccaatttggcaaacaatgcggcaaatattgcggaatgcatgaatttatcgaaaaaagacagaatgtgcatccccgttccgtttttccactgcttcggctgtgtactgggtactctcgcttgcgtcaccgccggcgcgacgatggtgccggtacaagaattcagtccgaaagaagtgctttcagccgtcgaaacggaaaaatgcacggcgcttcacggtgtaccgaccatgttcatcgccgaactgaatgatccagatttcgcatcatatgacctgtcttctttaagaacgggcatcatggccggttcaaactgtccgatcgaagtcatgaaaaaagtgatcgataacatggggatgtctgaaataacgattgcatacggacagacggaagcctcaccggtcattacccagactagggtcaacgattcgctcaaaagaagggtcgaaaccgtagggcgcgctttgccgaatgtagaagtcaaaataactgaaccgggtacgaaccgggaggttgaaagaggcgttcaaggcgagctgtgcacacgcggctaccatgttatgaaaggctactacaaaaatcctgaggccacggcagcggtcatcgatgaggatggatttttgcatacgggagatttagccgtaatggatgaagaaggctactgccggattaccgggagattaaaagacatgatcatcagaggcggtgaaaacatatatccgcgggaaatagaagagtttttatacaagcatcccgacattctcgacgtccaaattgtcggagtgcctgacgaaacattcggcgaagaggtatcggcctggatcaaactgaaaagtggagcatcgatgacggctgacgaattaaaagaatactgcaaaggcaaaatcgcccgctataagattccgcgctatatcgcatttgtagaagagttcccgatgacggcatcagggaaagtgcaaaaattcaagttaagggagcaggcgcttgagcattttcaattgtaa

SEQ ID NO: 2318 - DNA, 1161 bp, Bacillus licheniformis
atgaattttgaactaaccagagaacagcaaatgattcgtgaactcgcaagagattttgcgaaacaggaaattgcaccgcacgccgaacatgttgacaggacgggagaatttccgattgagacatttaaaaaaatgggggagctcggcctcttggggattccgtttcctgaaagctacggcggttcaggcggagatacgatttcctatgcacttagcgtcgaagaaatcggcaaagcgtgcggaagcaccggtcttagctatgctgcggctgtatcgctcggggctgcaccgatttattatttcggcactgaagaacaaaaacaagaatatctcgtcccgcttgcgacgggccgggcgctcggagcatttgggctgaccgaaccgaatgcaggttccgatgcgggcggcacccggacaaaagcccgctcggaaggggacagctatgtgatcagcggtgagaaatgctggatcacaaatgcaggatttgccaggaccgtcatcgtcaccgccgtcaccggaatagatgacaacggaaaaaacatcatttccgccatcatcgttccgacagattcggagggcttcaccattaaaagcgaatatgacaaaatgggtgtccgcggctccaatacatcacagctcatattggacaatgtccgcgtaccaaaacaaaatctattgggaagcccggaaaaagggtttaaacaatttctcaatacacttgacggcggcagaatttcgatcgcagcgctggctgtcggtattgcccaaggcgcatttgaggcggcgctcacatacgcgcgcgaacgaaaacaattcggccgaccgatctcttatttccaggcgattcagttcaagcttgccgacatggccatggaaattgagctcgcccgcaatatggtgctgaaggccgcctggctgaaagatcaaggacgtccgtttacaaaagaagcggcttttgccaagctttatgcctcagaaatggcgttcaggacatgcaatcagtccattcaaatacacggaggatacgggtatatgaaagagtatggagtggagcgcatgctgcgggacgcaaaattaatggaaatcggtgaaggcacttcagaaattcaacggctcgtcattgcaaggcagctcggcatcggcaaacaagcgctgaaatga

SEQ ID NO: 2319 - DNA, 561 bp, Bacillus licheniformis
ttgaaaacgctagttatcgttgcacacccaaatttagaaacatcagtggttcataagcgctgggtagaggaactcaaaaaatatccggaaaagtatacggttcacgaattgtccgacgtttacccggatggaaacatagacgcggaaaaagaacaaaaattggtggaatcgcacggcaatcttgttttgcaattccctatctattggtttaactgtccgcctcttcttaaaaaatggcttgatgatgtattagcttacggctgggcttatggttcaaatggaggagatcgattaaacaatcgtaaagtggcattaggtgtatccgccggaattaaagaggaagattatcgtgaaaacggaaggtaccggtatacgcttgaacaaatattagttccatttgaaacgacattccggtattgccgcgcagattatcgttcattttttgcattttacggcaaggaaaaagagcctggcggaaacgaggaagaagaaaatgagccgggagcaggagaattggagaaaagcgcacgagattatttgcattttattgatcatatgtag

SEQ ID NO: 2320 - DNA, 350 bp, Bacillus licheniformis
atgcaaatcccatccggaaaaacctgcgttccgaccggtgtggaactaaagacaccggctttggctatacgttgtcattgataagcggcaaatataaaatagtcattctatattggctgtctgaacgcgaagtgatgcggcataatgaattgaagcgaagcatcggcaccatttccttcaaaacgctaagcatcatgttaaaagagctggaagcagacggccttatcattcgcagagaatttccccaaatccccccaaaggttgagtattcattatctgaacgcggacgctccatcgtgcctttgttaaatatgatgtgtgagtggggggagaaaaacaggctgggctga

SEQ ID NO: 2321 - DNA, 1272 bp, Bacillus licheniformis
atgactgcgacgagcgagagcatcagtgcacaaatcgaagaaaaagcgataaaggcaaaaacggccgcaaaatctttgcggctggcaactgaaaaagaaaagaacgaggcgcttgctgcattggccgaccacctgaaacaaaacatgagctatattctcactgaaaatgccaaagatatcgaagcgggacgaaaaaaaggctatgatgcagcctacatcgaccgcctgtcgctcaatgaagacagggttctggattttgccgatgggctgctggaagtcgcggaacttgatgatccggtcggagaaacgctatcaagctggacgctcgacaacgggttaaaagcggaaaaagtcagcgttcctctcggcgtcatcggcatgatctatgaagcgcgtccgaacgtaactgtcgatgcgaccgggcttgctctaaaatcaggcaatgcgatcgttttgaaaggcggctcttccgccattcattcgaatacagcgatcgtatcggtcatgcatcaagcgcttgattcgacaaacatcccccgcgatgccgttcaattcatcgaaagcacagaccgaagcgcaacgaagcagctctttaagatgaaagaacatatcgatgtactcatcccccggggaggcggggccctcattcaggaagtcgtcgagaacgcaaccgttccggtccttgaaacgggagtcggcaactgccacatctatattgaccgggaagcggaccctgaaaaagcgatcgatgtcatgatcaatgcgaaaacagaccgccccgccgtctgcaatgcacttgaaacgctgatcgtccacgaaaaatggcttgaggaaaacagcgccgcgcttatcaatgctttaaacgaacacgggattcaagttcacggggacgaaaaggctgttcaaatgattccaggcgcaagaccagcaggggaagccgattggcagaacgaatatttaagccttgatctcgcggttaaagtcgcaggaagtcttgaagaagcctgcgatcatatcgaaacatacggaacaaagcattcagaagcgattatcaccgaaaatccggaaacagccaaagcttttctgaataccgttgatgctgcagcattgtaccacaatgcctcaaccaggttcaccgacggcggcgcactcggattcggcgctgaaatcgggatttctacacagaagcttcacgcccgcggacctatgggtctgaaagaattgaccacatgcaaatatatcatgagaggcgacggccatatcagaagataa

SEQ ID NO: 2322 - DNA, 1122 bp, Bacillus licheniformis
atgacctctaatcaacagagggtagttgtcaaagtgggaagcagttctttaacaagtcttcacggcgaaatcagcagcaaaaagctcgaaaagctcgttgagcagattgtccgcctcaaagatgaaggacacgaagtcctccttgtttcatctggcgctgtagcagccggttaccggaagctcggctttatcaacaggccggatacattgcctgaaaaacaagcatccgcttctgtcggccaaggcttattaatcgaagcgtattccaagctttttttatcccacggctatatcgcttcacaaattttaatcacaaaaagcgatttttcagatgaaaaacggtacaacaatgtgagaaatacgatgaacgtgctgctgaaacgcggcattattccgatcatcaacgaaaatgatacggttaccgtcaatcggctcaaattcggagacaatgacacgctttctgctaaagtggcgggtctgatcgacgccgacctgctgaccatcctctctgatatagacggcctttatgacgcgaatccgcgaaaaacgccggacgccgcactcgtccaggaagtaactgaaatcacgccggaaatagaagcttcagcaggggatgcaggaagcgaagtcggaaccggcggcatgaagtccaaactggacgcttttaaaattacaatggcttcaggcatcaaagggtttttagggcgcgcggacacccccggcattttgcacgaagcgatctgcgggactgcgaggggaacgtattttataccgaatgcggattcacacgccctcaaccataaaaagcaatggatagcatttaactctggacctgaaggagacatcgtcgtccacaacgaaagcaaagagtttattatcgaccgtaaaaaaagcctgtatccttctagtatttacgacatcaacggccgtttcagcaacggatccgtcgttcgaatccttgatcaggaaggagaggaaatcggcctcggcgtcgtcaacttttcctcatcccagcttcgtaaatggaagaaggatacgaatcaggaaacagccgcttcctcacaggctgtcgttgacagagaagcgtttgtctgtcatttagagctatccgttccgctttaa

SEQ ID NO: 2323 - DNA, 852 bp, Bacillus licheniformis
atgttaaagatctttaatcaaaaaaacgtagcttttataggggcgggatcaatggcagagggaatgatctcaggcatcgttcaatccaaaaaactgcctgcttcgcaaatctatgttacaaaccacacgaaccaccggcgtttagaagaactccagcagaaatatggaatacaaggcgtcaaaaaagaacaacttgactatcagaacatcgattgcttcatcctggcgatgaagccgaaagatgcagagggcgctcttaattccatgaaaccgcatatcaaaccccatcagcttatcgtgtcagttttagctggcatatcaatatcatttattgaaaacgcgctgaacgacatgcagccggtcatcagaatcatgcctaatacctcaagtgcaatcggcgcatctgcaaccgccatggccgaaggaagccatgtaacggccgatctgtcaaaaaccgcgaaacaactgcttcaatgcatgggagaagtctattccatcgaagaaagcaaaatggacattttcactggcattgccggcagcgggcctgcttacttttattatttaatggagcacatcgaaaaagcgggagccgaggctggattaagccaaaaattaacaagggaaatcggcgcgcagacattgttaggcgccgccaaaatgctgttggaaagccctgaggatacagctgttctcaaagacaacatcacttcccctaacggtacgactgccgccggtttaaaggccttggaagaaagcggcggaggcgaagcgatcgaacaggcggtcaaacaagccgcaaaacgatccaaaacgatcagtctcgaactggaacaattagtcgcagcaaagtaa

SEQ ID NO: 2324 - DNA, 102 bp, Bacillus licheniformis
ttgaagaaaaaaaggaaaaagaaaaaggaggctgaaggcagattcttcatcttcatgtgcaccttttgtcgtttgtcatccggccatttgaaggccgtttga

SEQ ID NO: 2325 - DNA, 189 bp, Bacillus licheniformis
gtgatgaggggcagctttacatcacaacatattgatgttggcaggcgcgggttcgacaagcttcgaacccgcgctttttcaattgcattcacaaggctcgaggaacatacttttttaccggtccgaaaggctgttgatctccaaaaaattccgttaaatcattcaaacggccttcaaatggccggatga

SEQ ID NO: 2326 - DNA, 678 bp, Bacillus licheniformis
atggaatatgtacacttggtagtcgaactgacgatagggtttgcagcattgtttctgatgacgaaaattctgggaaaaacccaatttgcccaaattacgccgtttgattttatttcggctttaatattaggcgagatggttggaaacgcgattttcgatgaggatgtcaccatctggaaaatccttttcgccatcctcatttgggccgttctaatctattcaataaaagttttatcgcaaaaagtgcaaaacatcagaggttttctcgaaggcaggccgagcattgtcatcaataaaggaaaaatcgattacaacgcccttaaaaagaacaaattggacctgaaccagctgcagacattggcacgtgaaaaaggctgtttttccttacacgagatccaatacgccatcttggaaacagacggttcgatcagcgtcctcccaaaacacaaatacgggatgccgacaaaagatgacttaaacattccttacaaaccggttcagctcccggtgcctgtaatcctcgacggccagctcgaaaagaacaatctgcacaaagccggatttgatgagctttggctgcaaaatcaattatcaagtcagggtatcactcagtatcaagaggtgctgtatgcggaatggcgcggtgatgaggggcagctttacatcacaacatattga

SEQ ID NO: 2327 - DNA, 195 bp, Bacillus licheniformis
atggagctaaagcgctgccgaactgcccggaatcaaatacaagtctgtcaatgcagtgcaccttttcaacagtgcatcacatcgggaaaaggcgcccgtgcagctgtatctgtttcattgccggaagtgatcgtgcagaagccgagagcggttacggcacttaacagccgtttgaccgaagaagagctcggctga

SEQ ID NO: 2328 - DNA, 1137 bp, Bacillus licheniformis
atgacgattacaattttggcattcattatcgctttgttttttgccatgaacataggagcgagcggagcagcagcgtcgatgggaatagcatatggcgcaggcgccgtcaggaaaaggcaggcggccttgtggatcagcggaattggcgtatttctgggcgccatgataggcggaggagaggttgtgaaaacaatcggttcaggcatcattcccgcgtctattctcaatgtgcatattgtcgtgattatccttggatcatccgcgatttcgctgtttatcgcgaacatcgccgggattcctctttcaaccagcgaggtgacggtcggctcgattgtcggggtcggcgtcgcgtttcaggcggtatttaccgataagcttttggtgatcgtcatgtattggctgaccattccgattgccgcattttttctcgcttttttaattggacaattgctgaaaaagactgaggcgaagctgcggtggctcaaacagcaaaaatgggcgcggctgcttactgcgctggtgattttaaccgggtttttagaagcattttcggcgggaatgaacaatgtcgccaattccgttggacctctcgttggagcaggcctcttgtcagtcggcagcggaacgtttcttggagggctgttcgtggctatcggggccatttgccttggaagccgagtcattgagacgaacggaaaaaaaatcaccgagttttcgcttttgcaagggtcctgtgtttcagggctcggtgcgtccttggtcatcggcgcttcgctattcggcattcccgtgccgcaaactcagattacgacttgcagcatcatcgggatcggcctttctgaaaagggaagggcaatttttcgtaaaagcgtcattttgaagttaatgaaagtatgggttgtgtcaccggttttttcacttgtcatttcctacagtctcgtgaaaatctttctcgattttgatttatattcagtggcagttgttttatgtgtttttcttgccactttaggatctataagccttatgaaatatgccaggcagaaacaatcagatgtccgaagaaatagggatcatttgaaatcaatcgttggagggaggggacgtaaaagagaacctgccgtatggagggacttttag

SEQ ID NO: 2329 - DNA, 711 bp, Bacillus licheniformis
atgaacgatgttttaacgtatagcacatgggatgaaaaagcttctgaagaggtgatggatactttcagcggcgagatggacgttttgaaatgggcgtacagcacgtatcaaaaaatcgtttacgcctgcagcttcggcgcggaaggaatcgttttgatcgacttgatttcaaaggttgtgaaagaagcggacatcgtgtttttagatacaggactgcattttccggaaacatatgagctgatcaatgaagtgaaagatcgctatcccggtctgtcgatccactttttaaaacccggcctctcagttgaagagcaggaaaaacgctatggcagcgaactttggaagcgccagccggaccagtgctgccaccttcgcaaaatcgagccgctcagggagcatctgtcaggcatggaagcctggattaccgggctgaggcgggagcagtcggaaacacggaaacatgtccgatatatcaacaaggacgacaattttaaactgattaaaatctgcccccttattcactggacatgggaggatgtctggacttacattaagctgaatcagctgacgtatcacaagcttcatgatcaagattatccgagcatcggctgtgaggtgtgtacgcttcccgtgacagactgcggcaatttaagagcgggaaggtgggcccaccaggaaaaaacagaatgcgggctgcatcaattccggtag

SEQ ID NO: 2330 - DNA, 765 bp, Bacillus licheniformis
atgatttcttctgaactgatactgcccgacaggcagcttaaaccaagaaagaaagggatcaccatcctgatcgataacggggttcccttgagcttttttaaagatacgattcacggagcggcagattatatagattttgtgaaatttggatggggaacgtctttgattacgaaatatttggaggaaaaaatcgatagtcttaggcagaatgacgttcaattcttttttgggggaactttgtttgagaagtttttaagccaggataaaattgaagattactaccgctactgcaaattatatggatgccgttatgtcgaaatatcaaacggaacggtccgtctctctaataaagataaagcaagctttatttccgacttttcgaaagaatttcacgtgttcagcgaagtcggcagcaaagacagcaccctcagcagcgagctggagtcagccgaatggatcgattatatcctcgaagatcttgaagccggagccgagaaagtaatcacggaaacgagggaaagcggcacgagcgggctgtgcaaaagcgatggagaaatgcggtcccagcttattgaggagatccttcattccggtatcgcttcaggggatttaatttttgaagcgccgacaaaacagctgcagacgtgtttcattgaaaaaatcggtcctgacgccaatttggctaatattccgtttcaagatgccattccgcttgaaacgctgagactgggacttcgatcagatacattttatttatttgattag

SEQ ID NO: 2331 - DNA, 624 bp, Bacillus licheniformis
atgggaagaaaactcaaaatcgtacatgctattgtattgggtagcgtgttgcagggtctcggtatggcgctgtttttgtttccgaaccatattccttcagggggcgcagccggcatcgctgttttgctcaatttctggtttcaggttccgcacggattaaccgtctgggctgtcaacttctcgctccttttgacggccgttaaatggcttgaacccgtgacagtcttcgggacgatgggggcgattaccatgacgtccgtttcggtgcagatcttcgaatcctgtatgccggttatgacgacgaacaatatctggctggatttattttacggctccgtccttttgggagcgggggttggactgctatataaatataatatttctaacggcggttttggcgccttggctttaatgatatcgatttaccgcggcggaaaaccgggaactgcgctgtttatcatgaatgcattcatttttcttttgaccgcgtctgtcatcgcctggggaatcgttatccaggccttaatctgccaatggatttctacgaggatcatcgatgcgatttatcagattcgcttccggccgttattgatgcctatcgccggtttccgcaacaaaaaatag

SEQ ID NO: 2332 - DNA, 1107 bp, Bacillus licheniformis
atgcgcatagaaaaggttgacacatttccgctgttccacaagctttcctccccttacggcgatgcgaacggattgaaaagctacagaacatgctatctgattcggattacgacagcttcaggtctgacaggatggggagaatgcgcggattggctgcctgctttggatgcaggctttaaaaaacggatcattccttatttaattggaaaagaagcgagcaatcgaacggagctgatcactgtcatcaaaaaatggcatcagcgggccgcctctgctgtaagcatggctttaacggacatcacggcgaaaaaagcaggcctttcggtatgcgaattatggggaggaaaactgcgggagcagatcccggtatatgcgtcattccaatcgtattcagacaggccggattggagccgccattccctccggcttatcgaaaaggcagttcgggccggatttaaggcagtcaagctgaaagcgggaggcaagatgttttcagaagacttggcacatattcaggccttccaggagatgacagggcaaagcaccggactgatcctcgatgcaaaccagagttatgatcaggccgccgcgcgcaagtgggaaacgtggttttccggctggcaaaacgtgctttggtttgaagagcccatgccgtttgacgacctagctgaataccggatgctgcgctcagcgctttctgttccggttgccggaggagaaaacgtaaaaggcgcaaagccgtttttgccgatttttctggagaacgcagtcgatattgcccagcccgatgttatgcactgtgagggcacggacgaatttcaaaccgttctgaagctcgccaggcatttcggaaaaagggtctctccccacagctatgacggcggactttcaagaatatacgccgctttcggacaagcctgtttaccgcattggaccaaaatggacggagaagatatcgaaccgcttgaatgggatgcgatggagaatccgttcgcacaaatcgtgcccgtcagcataaaagacggctgcattcaagtccccgacaaaatcgaaattgatacagagctcgtagaagcgtatgtgtgggatggctcgtcttacatctga

SEQ ID NO: 2333 - DNA, 1245 bp, Bacillus licheniformis
atggcagaaaaacaaaactctggcatgacggttgttgctatcgggtcgatcccgttgattatgacgttgggaaattcgatgctgattccgattttgccgaaaatgaaatccgaactcaatttatcgcaatttcaagtcagccttgtcattacagtgttttcgatcactgcagcgctctttattccgctgctcggttatttggccgaccgcttctcacggaaagtggtgattattccgtgcctgttcctttatggggcaggggggattcttgcagggtttgcatcgacgacctttgcgaatgccttcccatgggtgctgttcgggagaggactgcaagggctcggggcagccggtacagcgccgatcgcaatggcgctgacaggagacctttttaaaggggccgacgaaagccgggtgctcggtcttgttgaagcctcgaacggcttcggaaaagtgctgtctcctattttaggatcattgattgcattaatcgcttggttttgggtgttctttgcatttccggctttttgtattgcgccgatcattatgacttggatttttattaaagaaaaagacaagaaaaaagatccgccgcctcttggaaaatatgtaaaagggctgacaagcgtttttaaacatgagggcagatggcttttcaccgcatatctcgcaggagccgtctgtttgtttactctgtttggcatcctcttttacttatccgatgttttggaaaaagaatatcatacagacggcgtaaaaaaagggctgattttggcgatccctctgcttgtgatgtgtacaacatcatatattacgggcagcaaaatcggacaaaatcagcggctgatgaaaaaaatgatggtcatcggactcgctctgattacggtttcctacggcacactgtcttttttctccgcgctcattccttttatttcgatccttgtcatcagcagcatcggcacaggctttgttctgccatgtgtcaacagcttcataaccggggctgtcggaaaagagaggcgcggctttgtgacatctctgtacggttcggtcagatttttaggagtcgccatcggaccgccgattttcgggagactgatggaatggtcgaaactcggcatgtttatgtccatagcgggcctgacgttgattgtcggtgtacttgtgctgaccatgattcacgtcaaaaaggaagacacgacaaaaaaaggggacaaggggctgcagccggctgacgcaagatag

SEQ ID NO: 2334 - DNA, 1008 bp, Bacillus licheniformis
ttgaatcttcaacagcctttgctgacgatcgtcgtaccctgttataacgaagaggacgtgtttgccgaaaccgcaaaacagctgactgcggtattggatgatctcacagcagataaactgatttcttcagagagcaagcttttatttgtcgatgatggatcgacagaccgcacatggccgctgattgccatggaaagcacaaaaaaccgctatgtgacaggcttgaagctggcccgtaattcgggacatcaaaaagctctgttagccggactcgataaagcaaagcaaaaatccgattgcgttatttcaatcgacgccgatcttcaggatgacatttcggcgattcgccggtttatcgaaaaatatcatgaaggctatgaaatcgtctacggcgtacgccgaagccgccaaacggatacatggtttaaacgaacgacagccggatggtactacaagatcatgaataagcttggcatccagctggtcgataaccatgccgactttcggcttttaaataaacgggcgcttgaggagctcagccgctatgcagaagcaaatgttttcctgcgcggtctggtgcccctgatcggccttcggtcggcaaaagtgtactatgaccgaaaagagcggatggctggagaaacgaaatatccgctgaaaaaaatgctgtctttcgcttttcacgggattacgtctttcagtgtcgctccgatccgattttttaccctgattggcttcttcttatttttcctaagctgcatcgcgggtatttatgcaatgattcaaaaactgctcgggtatacgaatgcaggctgggcttcgctgatcatttcgatatggtttttgggcggtctgcaattgatggggatcggcattatcggcgaatatatcggaacgattttcaccgaagtgaaaagaaggccgagatatgcggtggatatcgatttgtatactgaacggctcggccggcgcgaacctgaaaaacggccggaaacgaagctcagctga

SEQ ID NO: 2335 - DNA, 1701 bp, Bacillus licheniformis
gtgtcgttattcgtcaaaaagttgagcagagaaaagcgatatttgattttcgcattcagtgtcattcttctctatgtccttccgctttacatattaaatgaagacgctcatatccgtgagcatgacaacctggattccaatatcgcctggtataaggtgctggccgaaagcgggcagctgctcggcggcgttaaagccgtcattccgcaaatcatcaacgggttgccgcgggacgcttacggaacggaatggagcggcattgtctggcttcacgccttgtttccttcgatgaccgcatatgctttaagccagacgatcacgagggtgtttgcctttgtcgggatgtacctgctgctgaaaagccatgtgattcgcgatgaaaaggcgtatttcatcagaatcgccgtatcgctggcatttgccctgacacccttttggccttcaggaatgcttagcacgcttggtcaccctttggccttatgggcttttttaaacatcagggcagggaacgactcatggaaagagtggtcaacccttgcgcttttaccgctttactcaagctttgtgctcggtttcttctttttccttgccgccgtttcgctgatttggctttatgatttggtcacaaagcgcagctttaaccttggctttctcggaagtatcgctcttatgacaggcatattcctggcgatagaataccggcttgtttattcggttttcgcttcaggcgaaacgatgcatcgcgttgaatttatttcgtccaggcatgacatccttcattcgtttcggttgtcctttaaaaatttcgtgctcggccacaatcatgtcatgaccgtccatacggcagtgatactgcctttgattgtgctcactttcgggctcgtcgttgctagacaacgcaaaaagcggccaagcgaagaaaagctgttcatctttttattcattttaaattatgcgctttctttatggtatgccctctggttcaacaagctgtgggcgcttccaaaggaaaagatcagtctgctttctgcattcaatttcgcccgtttccactttttgcgccctcttgtgatatacgcaagctttgccgttgcatgctacatattgtggaaaatggggaagagatggcggcgttttgtttatgccgcactaatcgcccagctgcttgtgcttattccgtttcatgaagagctgacttacggcgcataccaccacgccccaagctttcgggaattttatgcatcagatcagtttaaacagatcaaacgattcatcggccgtcctaccgattcctacagggtggcgagcatcggcctgcatccggcgattgcgcagtataacggcttctacacacttgatacgtatgccaatatttatccgctgaaatacaagtatcaattccggaaaatcatcgccaaagagcttgataaaaatccggccctgaagcgctatttcgatgagtgggggagccgctgctacctgtttgttgacgagcttggaaaacattacgcgttcaaaaagagcacaaagaaaaaaatcacgaacctggagttaaacactgaagcattcaaaaaaatggggggacaatatattttttcttcagttccgattatgaatgcagaacaaaacaagcttgcgtttttaaagcggttcagccacccgcagtccgcttggaacatctatgtatatgaagcgaaataa

SEQ ID NO: 2336 - DNA, 165 bp, Bacillus licheniformis
atgacactgaatgcgaaaatcaaatatcgcttttctctgctcaactttttgacgaataacgacacgaataccacatccattttgttctcttttggaaatatagagagcttttatcatatcgctgttattattcgtggaagcgttttgaaaaattcatcaaaatga

SEQ ID NO: 2337 - DNA, 114 bp, Bacillus licheniformis
ttgggcggcagtccgaagatcagccagaaggcgaaagcactgaatcaaaaaaacaaaacagcctgccccgtcaacctaaaaataaggtcgcgggacaggctttcatttatatga

SEQ ID NO: 2338 - DNA, 1482 bp, Bacillus licheniformis
atgggcaaagtaacaggatttatggaattcaagcgggaaaagcctgctgaacgcgatcctctcacacggataaacgactggaacgaatattcgtctccattttctgaggaagcatcaaaaagacagggagcgcgctgcatggactgcggcacccccttttgccaaatcggcatggatatacgcggttatacgtcaggatgtccgattcacaatttaatccctgaatggaacgacctcgtttacaagggaaggtggaaagaagcgcttgaccgccttctaaagacaaacaatttccctgaattcactgggcgggtctgtccggcgccttgtgagggctcttgtacggtggcgatttccgatccggccgtatccatcaaagggatcgaacggacgattattgacaaaggatttgaaaacggatggattcagccgcgaattccgaaaaaacggagcggcaagaaaatcgcgatagtcggctcagggcctgccggtcttgcaagcgccgatcaattgaaccaggcggggcattcggtcactgtttatgagcgcagcgaccgcccgggaggcctgttaatgtacggcatcccgagcatgaagctcgaaaaaagcgttgtcgaacgccgcatcaaactgttgacacaggaaggcgtcgactttgtcaccaatacggaaatcggcaaggatattacagccgacgaactaaaagaacagtacgatgcgattatcctttgcacaggggcccaaaaacagcgcgatctcttgattgaaggccgtgaagcaaaaggtgtccactttgccatggactatttaacaggcaccattaaaagcatgctcgattcgaattttaaagataagcagtttatcaatacgaaaaataaagacgtcatcgtcatcggcggcggtgacacgggggcagactgcgttgcaacggccctgcgccaaaaagcgcgaagcgtcgtccaattcggcaagcatccgaagctgcccgatacaaggaccgccgaaaatatgtggccggaacagccgcatgtccatacgctggactatgcctatgaagaggcgcaagcagtattcggaaacgatccgagacaatattcgatccaaacaaaaaagcttgtcgcagataaaaacggccatttgaaagaactgcatacgattcaaatgaaaaaagtaaagaatgatcaagggaaatttgagttccacgaaattccgggaacggaaaaagtatggcctgctcaatacgtctttatcgccatcggctttgaaggaacggaacagccgctgcttgagcagttcggggtaaatacggtgagaaataaagttgacgcagcatacggggaatttaaaacaaatgtcgatggagtcttcgcagcaggggatgcgagaagaggacaaagcctgatcgtttgggcgattcacgagggacgcgaagtcgcccgtgaagttgacaaatatttaatggggagctctgtactgccttaa

SEQ ID NO: 2339 - DNA, 4566 bp, Bacillus licheniformis
atgacttataatcaactaccaaaggcacaaggtctctaccgtcctgaatttgaacatgatgcatgcggaatcggcctttatgctcatttgaagggccttcctactcatgatattgtcaaaaaaggattgcaaatgctttgccaattggaccaccggggcggtcagggcagtgacccgcataccggagacggggcaggcatcatgatgcagattccggatgctttttttaaaaaagtctgcgccgatttcaacttgcctgaaaaaggacgctacggcgtcgggatgatcttcttttcgaaagacgacagcgggcgcgaaaaatccgaagcgcgcattaacgagctgatcgaacaggaagggcagacggtactcggctggcgaactgcacctgtaaatgtcggaaaaatcggaacagtcgcacaagaaagcgcgccagtcgtccgccaggtattcatcggagcaaatgaagcgctgaaagacaatctggcattcgaacggaagttgtacatcattcgcaaacaggccgaaaattgggcgaaagaacacgagaaaacgttctattttgtcagcctctcgagcaataccatcgtatataaaggacttttaacgcccgagcaggttgatgctttctatgaagatttacaggacgaggacttcgtctcagcttttgcattggttcactcccgtttcagcacaaacacgtttccgagctgggaaagggcacatccaaaccgctatctgatccacaacggggaaatcaatacgctgcgcggcaatatgaactggatgaaagcgagggagcagcagtttgtttccgaagcgttcggcgaagacttgccaaaggttttgccaatcctcgatgaaaacggaagcgactcctcgatcctggataacgcttttgaattctttgttctggctggaaggaagccggcccatgctgcaatgatgctgattccggagccgtggaacgagaacccgtacatgtcaaaagaaaagaaggcattttacgaatatcacagctctttaatggagccttgggacggcccgactgcgatttcttttacaaacggaaaacagatcggagccattttagaccggaacggactcagacccgctcgctattatgtcactaaagacgactaccttattttttcttccgaagtcggcgtaattgatgtcgaacaggaaaacattttatataaagaccggctggatcccggaaaaatgctgcttgttgatcttgaagaaggacgtattatctccgatgaagaagtcaaatccgaaatcgccggagagtttccgtaccaggaatggctcagtaaagaactggttcatgtctcaaacgacattgaggaaaccgaagaaaaatctgtgcctgatctgctgacccgccagaaagcattcggttttacgtacgaagatattcacaagtatttaattcctgtcattacagaaggcaaagacccgctcggttcaatgggtcacgatgtcccgctggcggtgttgtcagaccgtccgcaatcgctgttcaactattttaaacagctgtttgcacaggttaccaatccgccgattgatgcaatccgcgagcagatcgtcacatcgacattgacatggctcggagcggaaggcgatattctccatccgaacgaaagcagctgccgccggattaaattgtatacaccggtcttgacgaacgcgcagttcaattctttaaaggggcttgtacacaaagatttcaaaagcaagacgattcacacgctctttacagacgacttgaagagcggactcgaagatatgtttaaagaagcggacagagcgatcgccgaaggcgttacactccttatcttatccgaccgcaaaatggacggtcaaaaagcgccgattcctgcgctgctagccgtcagtgccttgcatcaatatttggtccgtgcaggaaagcgcacgaaagtcagcattatcgcccaatctggtgaagcgcgcgaagttcatcattttgccgccttgatcggctacggagcggatgccattcatccgtacctcacatatgcgacatacaagcaggcgattgaagacggagcgctcaccatcagttatgaagaagctgtaacaaaatacagcaaaagcgtgacagaaggcgtcgtaaaagtgatgtcaaaaatgggtatttccacagtccaaagctacaggggcgcacagatttttgaagcggtcggaatcagcaaggacgtcatagacagctatttcacaggaacggcttcacagctcggcggaatcggtttggacacgattgccgaagaagcgaagcgccgccacagggaagcttatgaagatacattcagtgaaacgcttgattctggtagcgattttcaatggagaaaaggcggggagcaccacgcttttaatccgaaaacgattcacacgctgcaatgggcctgccgcaaaggtgattacagcctgtttaaacaatattcgaaagcggctgatgaagaaagaatcggttttctccgcaacctcttctcgtttgatgaaaaccggaagccgctgccgcttgaagaagtcgaatccgctgaatcaattgtacgccgctttaaaacaggggcgatgtcattcggctctttaagcaaggaagcccatgaagcgctggcgattgcaatgaaccgtctcggaggaaaaagcaacagcggggaaggcggagaagatccggcgcgctttacgcctgacgccaatggtgataaccgccgcagcgcgatcaagcaaatcgcttcaggccgtttcggtgtgaaaagccactatctcgtcaatgccgacgagctgcaaattaagatggcgcagggtgcaaaaccgggggaaggcggacagctccctggcaacaaagtgtatccatgggttgccaatgtgcgcggatctacgcctggggtcggcttgatttcaccgccgccgcaccacgatatctactcgattgaagatttggcgcagctgattcatgatttgaaaaacgccaaccgcgatgcacggatcagcgtaaagcttgtcgctaaagccggagtaggcacgattgcagccggagtcgccaaagcgacggccgatgtcatcgtcatcagcggctatgacgggggcactggagcatcaccgaaaacaagtattaagcataccggcctcccatgggagcttggacttgcagaagctcatcaaacactgatgatgaacggtttgcgcgaacgcgtcgtattggaaacagacggcaaattaatgacgggcagagatgttgtcatggctgcgcttttaggagccgaagaattcggttttgcaacggcaccgctcgttgttctcggctgcgtcatgatgagagcctgccatttggatacgtgccctgtcggggtagcgacgcaaaaccctgagcttcgcaaaaagttcatgggcgatccagatcacatcgtgaattacatgctctttgtcgcagaagaagttcgcgaattgatggcccagctcggtttcagaacggttgatgaaatggtgggccgcacggatgtcctgcgtgtcagcgaacgggccaaagcgcattggaaagcgggtcagctcgatttatcaagcctgctttaccagccggaaggcacacgtacattccgtacgccgcaaaaccataaaatcgatgaatcgctcgatgttacgcaaatcttaccggccgtgcagtcagctgttgaaaacggcacgcctgtagaagcgtcttttgaaatccgcaacatcaaccgtgtaacaggagccataaccggaagcgaaatttctaagcgctacggcgaagaaggtctccctgaagatacgattacgctccgattcacaggttcagcggggcaaagctttggagcgttcgtaccaaaaggaatgacgatgtatttgacaggagatgccaatgattacatcggcaaaggtctttcaggcggaaaaatcgccgtcaaagcgcctgacgaattcaaccctgcattccgtgaaaatgttattgtcggaaacgtcgcgttttacggcgctacaagcggagaagcttatattaacggactcgcgggcgaacggtttgccgtcagaaacagcggagtcagcgttgtcgttgaaggcatcggcgaccatggatgcgaatacatgaccggcgggcgcgtcgccattctcggagacgtcggcaaaaactttgccgcaggcatgtcaggcggaatcgcctacgtatacgccgaagacaaaaaagcctttaaacggaaatgcaatcctgaaatgatcgagtttgaaacacttgaagcacctgaggaaatcgctgaactgaaaacgatgatcgaaaaccattacaaatataccgaaagctcaaaagcagcttcgatactggatcattgggaagaggccgtcggtcggtttgtgaaagtgattccgaaagacttcaagcaaatgatagagcggattaaagagcagaaagaagccggcttgtctgatgaagaagcgttgatgtacgcgtttgaagccggtacgaaacaaaagattgaaccatctgcggctgcttcatcaaaagaagcggtggcacagtaa

SEQ ID NO: 2340 - DNA, 903 bp, Bacillus licheniformis
atggaattacgccaattgcattactttatggaagttgcggaaagagagcatgtatcggaagcggccatgcaccttcatgtcgctcagtcggcgatcagcaggcagatcgccaatctagaggaagagctcggcgttgatttgtttgagcgcgaaggccggaatgtgaagctgactccgattgggaggcagtttttagatcacattaaaacagcgatgaaagcgatcgattttgcgaaggaacaaatcgacgagtatttggacccgaatcgcgggaccgttaaaatcggtttcccgacaagccttgcgggccagttcctcccgaccgtcatttccgcttttaaagaggagcatcctaatgtcgcttttcttttaaggcagggatcttataaatttttaatcgaagcggtgaaaaacagggatatcgatttggcttttctcggtcccgtcccgtcaaacattgccgagattaaaggagacattttgttttcggagagccttctggcgctcgtgccggtcaatcatccgttgtcaggccagaaaagtcttcatctcggcgatctcagaaatgatcagtatgtgctgtttcctgacgggtacattctccgaaaaatggctgttgacgcatgcaagcaagtcggatatacgcctaaaatttcctcggagggcgaagatttggatgcgatcaaagggcttgtttctgctgatatgggggtgacgcttttgccggaaagcgcctttaatgaaacggcaccccgttttacaaagaagattccgattgattatccgcaggtaaagcgcacggtcgggatcatcacccctaaaaacagggagctttccccttctgcaaaagtcttttatcagttcgtaaagaagtttttttctcgccttcagcaatatcaataa

SEQ ID NO: 2341 - DNA, 213 bp, Bacillus licheniformis
atgtatgttcatccctgttttatcaaatggtttgcccttctttacattgcgcttaacgcagctcatgaaggtctcctctcttggaacggacatgccgcaccggccgcagccgttgccggccttgggcttgtcaaaacagctgaagcaaaaggcgggttgcatccgcgctgctccgttacaaggacagaaaaggcgatcatcttccgggtttaa

SEQ ID NO: 2342 - DNA, 1926 bp, Bacillus licheniformis
atgaataaacataagtggttagccgcaattgctatcatcgcaattttagccgttattggctatttcacggtcagacaccttgaaccggaatatgcctatatgcctcctaaagaaaaagtcatctcaaaagaaaaacgattgcacggatacgatttatggggggcatttacaccggataagcccgcgtctgcaggggagggagctgtaaaggttgatgaccgccttctcgacttgggacgtgagacattttataaggaaacattcggaaacgaggtgtttttgacggatatcgtcggactgcttgacggtcccattacagctgccaacatgacgaaagccattgctggattgaaagggaaagggacgacaaacttgcgcatcgaattggcggaaacggttaaggtcggcgggaaaacctttaaaaaaggcgagaagatcgacaccggcattgatgttgcaaaaggggcatacgcgccccttggcatgccttttaaatacgctgacggaaaaatcaaagccggcatcagctgcgcggcctgccacgccacagttgattcgaaaacgatgaaggtgatggaaggcgtgacaaactcagatttaaatacagggctgatgctggcgctggcgacgaactcagctgcatattttacacatgccgaaattcataatattaaacaatttatgaatgataaaagccctgtgatcaccgcaagaaacggcaaaaaagaacgcctccccgatccggaccgcctcgaagatgcagtcgatcgtattttcctgaagtggccgagaggttttttcgattcaacgatcgatatgaaaagcaatcccacgcagattccagatgcctatacattgggcgaccatccgtacagctggagcggtgtggcaatggccgggccgtttaaaggcttgactgtgttcagcaataatgttcatgcgcaaaattcggacagcctctcacaatctccggcaagccgggcgcttttcggaatgagcgaagatgtttatatcgggacgatcctgcaaagggctcccgcctcaacatacaggtatcagccgaaaaaaggggaaagtccgaccgcgtttttcaaaaaagcagaccccactcccggagtaccgggcgtcaaccaaatggtcaagccgccgagctttcctaaaatcactctggcggcgcccgacggcgtgcatgtgagctcgcccggacgaaatgtaaatgaagaaaacaacgctgtgtctgcctggcaaaatacacttagaccgcctgaaccgcggcaaaaaaccgacggccaaaccatcaggcgcggcaggcgcgtttttgaacaagcaggctgcatatcctgtcatgccggccggtatttgacgaacaacaaggtcatctcggctgaaacgatcgggaccgagccgacaagggcgcagtcttttaagaaagcagaaagcatattcgggaaaagccttgtccattcgcctgacacaccggtgcctctgccgcgcaagccggaggttctgaaagtcccgacagccggatttgaccccgaacagatcaagctttcgtgggcgcagggtgattccaaaggcgggtataaagtgccgagtctgattggcgtttactggcgtgctccttatttgcacgacggaggggttgcagttgggatctcattgaaagaaacaggcataccaaagacgattatcaaaggtaagccggcgaacccttataacagtttattggcgatgatcgacagagacttaagacagaaggtcatcaaaagcaattcggaatcgcccgacttaaaagcagtcagagtaaccggcaaagggcatgaattttggatcgacgccaaaagcggcttttccaaacaggagcaaaaagcgttgatccattatttaatccatgccgatatgcctgaaaagcaagaaataaaatga

SEQ ID NO: 2343 - DNA, 1575 bp, Bacillus licheniformis
ttgaaaaagctaagcattgtacttgtcattttcatatgtgcgctggtttcattcatcatatggctgaatgccggggatgaaaaattggggctctcagatgaagaagcagaggccgtcaaaccctctaaaaaaccggtcattgtcctgatcatcgactctttgatggatcagcctttgaaaaaagcgattcaagaaggccgcgctccggcattaaaattctttcttgaaaacggtcattatgaacctgaagtggcgagcgcgtatccgaccatgtcggtcgcgattgacagcacgctgctcaccggaacttatccgaatatccaccgcgttcccgggcttgtctggtataatcaggatgaacagagaattgtgaattacgggagcgataaaaaagaaatcgccgcgctcggcctcaaacaaacgatcgaagacgggatatattctctcaatcaccgccatttaaaccgaaaggtgacaacggtacatgaagatttgcaaaagcaaggaaaacagtcggcatccatcaacgggctcatatacaggggacctgaccgccgcgaattaaacataccgcccccgctcaagaagcttagactgatgcctgaacatatgacggtaaacgggccggctcttttttcgtacggccgctttgcccagcttgatcccgacaactcctaccaccatatttggcagggttatggcgttaacgacaagttcacggcgcaggaaatggcttatttgattaaaaagaggaagcttcctgcgctgactgtcgcctacttgcccgatttcgaccacgatgcacacaaaaaaggcccgaaggatatggaaggcctcgaaaaaatggaccgtcagctgcagcgtatattgaatgcatatgattcttggcgcgatgctgccgaaaaagcggtgtgggtcgtcatgggagacggcggacagacatcgatcggacgcgataaagataaggcagccatccggctccattcgctttttaaaggatatcggatcgctaaaataaacgaaggcccagatcgaaaagaccagcttctttttgcggtaaacgacagaatggcatacatttacgtaacgtatcaaaacacgtcgctgcaagatgccgtcaatgaattgaaaaaagacggacggatcgctttcacagcgtggaaaaaagacggctggatatacgtcgattcgaagcgttccttaaaaccgctgcggtttcgtccgcaaggcggttatcaagatccttacgggcagtcatggacgatcagcggagatttttccttattggacattaaaacggacggtgcatcgatcatgtatggcgattacccggatgctcttgcccgcctgtacagcgccatgcattcgcatcgcggacggtttgtaattgccgatgcgaaacccggattccaatttgccggagaaaagtctcccctccattttggcggaggcggccatggctcactttataaaacggatagcttggctccgatgatcatcgtcggttccgaagaagttccggctcaccttcgccaccttgaactgaaggattttttaatgaagctcgtacaatga

SEQ ID NO: 2344 - DNA, 474 bp, Bacillus licheniformis
atgaaacaagataaagtcggccgcgagaccgttgagcagttgatcgaagctttcaacaggctgcgttatgcggaaatgaaacagtcatttccttcagttgaatggaaaaagactgaggcgaaagcgctgatgtttttaaatgaagcaaacggtgaaggaaaaatggcatccgaaatcagccgcgctttgcatgtcacctcccccttcgtcacgcagctgttgaacagaatggaaaaaaaaggactcgttttacggcgcatagatgaggatgacaggcggatcgtccggatttttctaaccgatgaaggaaaaaaagcggctgacgatgcgcttaaaggcctgaaccgatggttcttgcagctctcgcggtttctgggcgaggctgaaagcaggcacttcgccgatctgattcataagctgtccgagtttatcgaacaaggagaaaaaacaagtgaaaagaaggttgaaaaatga

SEQ ID NO: 2345 - DNA, 1728 bp, Bacillus licheniformis
atgatctcactcttaaaatatttaaagccctataagctgcaagtgattctcgtcgctgtttttactttgctgagcagtgtgcttgagctttatttgccgacgttgatggctgatgtcgttgatgtcggaatcgtaaacagtgatatgccatttattttgaaaaccggcggctggatgatcgcctgctcccttctggccatcatgatgactgtcggaaaagcgtttttcgcttcgaaaacagccctcggctttggaagagatatcaggcgcaagctgtttgtcaaagttgaacaccattcaatggatgaattcggaaaaatcggttctgcttctctcattacccgtaccaccaatgatgtcaagcaggtccaagatgtgctcaacatgatgctttcattgatgacgagagcgccgttaatgctggtcggcggtattgtgcttgcggtttccagagatgccaagctgtcgattatatttctggccgctctcccgatacttgcagggctgatttttctcattacaagaaaagctgtccccttattcggcgtcctgcaaaaaaagacggatcgtctcaaccttgttctcagggaaggtttgacgggcgttcgtgtcattcgcgcgtttaaccgcgttgatcaagaaaaagtccggtttcaaaaagcgaacgaagaatttcgcgatacaggcatcgccgtcaacagaatcatggcttttctattccctgtcatgatgattatgatgaatttcacgaacatcgcgattatctggttcggaggcatccgcatcgatcaaggcagcatgcaggtcgggaacttaatggctttccttcaatatgcatcgatgattctaattgcgctgatcatgcttgcgatgacattcgtgatgatcccaagggctcaggcatctgccggccgcattaatgaagtgctgttaacagagccttcgattaccgatccgaaagagccgcagaaagacagcggcttgcgcggttatgttgagtttcagaatgtgacttttcgttatgccggggccgaaaagcccgttctcgaagatatctcgttcaaggcaaagccgggtgagacgactgcgatcatcggcagcacaggagcgggaaaaacgacgattcttcaattgatcccgagatttttcgatattgaaaaaggaactgtgctagtcaacggaacagatgtcagaaagatggcgcaaaaggagcttcgcgcgaaaatcggctatgtcccgcaaaaagcttcaatattcagcgggacgattaaagacaatatccgctttggcaaagaagatgcaacagatgaagaaattttggaagcacttgaaacggcacaggctgccgagtttgtagaaggcaaggaaaacggaattgaatctgaaatcgagcaggccggagccaatctttcaggcggccagaaacagcggctttccatcgccagggcattagtcagaaaaccggaaatttatttatttgacgacagcttttcggcgcttgattacaaaacggatcaaaagctgagaaaagcgctgaagaaaacaaccgctgatgacgccgtcatcatcgttgcccaaagggtaagcacgattacggatgcggatcaaatcatcgttttaaatgaaggaaaaatagccggcatcggcactcatcaacaattgcttgctgaaaacggcatttaccaggaaatcgtcgcatcacagcaggctgaggaggaaagcgcatga

SEQ ID NO: 2346 - DNA, 1824 bp, Bacillus licheniformis
atgagccaacaaccaaagcatcacggctctatacccaaaggaatgcacaagacaaaaccgaaagaatttaaaaagacccttttgagattggcccgctatttaaaaccgcggaccttccagctggtgctcgttgtcttcgctgcaatattggcgacattattcaatgtcatcagtccaaaacttctcggggacgcgacctcttcccttttcgcaagctttacagaaggcaccggtgttcaattcggctttctcggccggatcacgctgatcctggcaggattgtatctgctttctgctttgtttacgttcttgcagcattacctgatggccggggtagcccagaaaacgatatacgaaatgcgccaggaagtgaatgaaaagctgacgcggctccctttaaagtactatgacaagcattcgcacggcgacacgctcagccgcgccgtcaatgatatcgacaatatcaatacgtcattgcagcaggcgctgacgcaaatgattacgtctgtcattacaatagtcggaatcatcgtcatgatgcttttgatcagccctgtgctgacgctcgtcgtcttcatcacggtcccgctcagcatgctggccgtccgattcattgcctcattttcgcagaaacacttcgccgcgcagcaaaaagaactcggcgacatcaacggacacgttgaagaaatgtttacggggcatcaggaagtaaaggcattcgggcatgaagaaaaagcgattcagcaattcgatgaagtaaatgagcgtctttaccagtcaggctggaaagcgcagtttatttccggtctgatgatgccgatgatgacattcatcggcaacctcggctatgtgtttgtcagcataaccggcggtattttcgttcttaacggcacccttttgatcggaggcgtgcaggcttttatccaatatacgcagcaattttcccagccgctcgttcaagctgccggaatcgcgaatacaatccaatcggcaatcgcatccgccgaaagggtgttcagtcttttggacgaagaagaagaaaccggggagacgccggcttccatcgataccggcaaattaaaaggcgatgtatcgtttgaacatgtcgccttcggttatgataaaaacgttccggtcatccgcgacttaagccttcacgccaaagaaggccagacgattgcgatcgtcggaccgaccggcgctggaaaaacgacgatcatcaatttgctgatgcgtttttatgaactaaacaaaggcagcatcaaggtcggcggcacagatatcagcgagctgtcgcgcgaacaggcgagaagcatgtttgcgatggtgttacaggacacatggctgttcaacggcaccatccgggaaaacatcgcttacgggcgtgaaggcgcgaccgaagaagacatcatcagagcggcaaaaggcgcctatgccgacgattttatccgcaccttgccggacggctatgatacggtacttggcgaagatgcccaaaacatctcgcaagggcaacggcagctcttaacgatcgcgagagccattttagctgatccgaagattttaatattagatgaagcgacaagcagtgtcgacacccggacggaaatgaatattcaaaaagcgatgaacaaactgatggccaaccgtacgagctttgttatcgcccaccgtctttctaccattaaagatgccgacatgattcttgtgatgaaaaacggagatattattgaaaaaggcagccacgaagagctgctccgcaagaacggattttatgccgatttgtataacagccagttctcccgggaagaagccgtcagctaa

SEQ ID NO: 2347 - DNA, 87 bp, Bacillus licheniformis
atgcttaaaaaagcgggtatatcagctaaagagatggatgaaaaaaagaggccgcacctgatcaggtgcggcctcaatgttagctga

SEQ ID NO: 2348 - DNA, 1215 bp, Bacillus licheniformis
gtggcaaattcaaattcacttcaatcaagcaagcactatgccaattggattccgatgaaagaaatcagctcgagtaatgaccggctgtttccgtttccgatttataaccggatcagaaagacgtctcctgtgcgttacgatgatgagcgaaaatgctttgatatcttttcttatgaagacgttcaattcgtgttaaaaaacccgaagctcttctcttcaaaacgcggcggtaatatggaaggaaaaagtatattaacaatggacccgccgagacacacaaaaatgagagccatcgttaataaagcttttacgccgaaagcggtgaaagagcttgaaccgcatatcgaagaagtgacggcttttttatttaacgaagcgaaacagaaagaattgtttgatgtggtggacgacttggctgctcctcttcccgtcattatcatcgctgaacttttaggcgttccggctgaagaccgcctcatgtttaaacattattcagacatccttgtcgcaggtgcggaagaccgctcggctgaagccgccgaacggatgtacaaacgacgtgaagaaggcaatcggtttttggcggattattttaaaaacattatcaagcagcgcaaaaaagagccaaaagacgacctgatttcgcttttactgcgggcggaagttgacggcaaatcgctgacagaagaagaactgcttcatttttgcatcattcttttggtcgcaggcaatgagacgacaaccaacttgatcgcaaacagcgtccgctatctcacagaagataaaatcacacaggaagccgtaagacaagatccgtccctcgtccctgtctttgttgaagaaatgctgcgttattatccgcccgtgcaagcgatcggccgcacggcggcagaagacgttgatatcggaggcgtgaggattgcaaagggttctacagtgatcagctgggtcgcttcagcgaatcgtgacgaacttaagtttgacgatcctgacagcttcaagcttgatcgcaaatcaaaccctcatatgagcttcggcttcggcatccatttttgcctcggcgctcccctcgcccggcttgaagcgaaagtcgcgctcgattacttgctgcggcgcgcatacatggaaagggacagctctaaggagcttgaagcgattcaaagtccgtttgttttcggcgtccgccatctccccgtacaactttcacaaaaatag

SEQ ID NO: 2349 - DNA, 717 bp, Bacillus licheniformis
atgcaatccttacaaaacaaaaccgctctgattacaggagggggaagaggaatcggccgcgccacagcgattgccctcgcaaaagaaggcgtacatatcggccttatcggccgtacagctgcgaatcttgaaaaagcggcagaggaattgaaggcgttcggtgtaaaagtatctgtagccgcagctgacgtaaaggatttaacagctgtagaacgtgcagtccaatccgtcaaagaagagcttggacaaatcgatattctcattaacaatgccgggatcggcgggtttgcaggatttcttgagcaatctcccgaagaatgggaaaatattatccaggttaatctgatgggggtttacaatgtaacacgcgccgttctgcctgaaatgattgaaagaaaagccggcgatatcattaatatttcttctacagccggccaaaggggagcagccggcacaagcgcctacagtgcgtctaagttcgctgtgctcgggctgaccgaatcgctgatgcaggaagtcagaaagcacaatatccgcgtgagcgcccttacaccaagcacggttgcgacggatttggcaatcgactcaaaattgacagacggcaatccggaacgcgtcatgcagcctgaagatctggcggaatacatggttgcccagctcaaactgcatccgcgcattttcattaaatcagccggcatgtggtctacaaatccttaa

SEQ ID NO: 2350 - DNA, 2595 bp, Bacillus licheniformis
atgagtcatttggttctcggttttcacgaaatggaaaaaacacagcttccactcgttgggggaaaaggattgcatttaggggaattatcaaaaattcaagggatacaagtgccagacggattttgtgtcacaacagcaggatttcaaaaagccatcaaacaaaacaaatcgttccaagccttgttggatcaactgacaatgcttaaagttgaggatcgagatcaaatcggtgaaatcagcaggaagattcgacataccattatggaaatcgaaattccttccaatgttgtgaaagaagtggctcgctatctctccctgcttggcgatgaacatgcttatgctgtgcgttccagcgcgacagctgaagatttgccgcacgcctcttttgccggtcaacaagacacttatttaaatatcatcggaaaagatgcgatcttgcagcatatcagcaaatgttgggcttctctatttacggatcgagcggtcatctaccgcatgcaaaatggatttgaccatcgtcaagtttattcatccgttatcattcaaagaatggttttcccgcaggcttcagggatattatttaccgctgatcccattacttcaaaccgaaaactgctatccatcgatgccggttttggtcttggggaagcactggtctccggcttggtctctgccgattgttataaagtgcaaaacgggcaaatcgtcgataagagaatagcagccaagaaattggcgatttatgggcgaaaacaaggcggaacagagacaaagcggattacgcctgatcagcaaaagacgcaagcccttactgacgggcaaattttacaactggcacacatcggaagacagatcgaagcacatttcggccagccgcaagatatcgaatggtgtttggaccgcgatacattttatattgtccagagccggccgatcactactttatacccgatccctgaagcgaatgatcaagaaaatcacgtctatctatctgtcggtcatcagcaaataatgacggatcccataaaaccactgggattgtctttttacctgttcattactccagcacctatgcgcaaggccggcgggaggttgtttgttgatgttgcgcctaggcttactacacgtatcggccgggaaactttattaaataccgtaggatccgatccgctcataaaaggcgcactcatgaccgtaatagagcgagattatataaaattgtcaccaaatgatcaaacagcaccgattcctgacagagggaatacggatatgctggcgcaattcgagaacgatccgacaatcgtttctgatttgattaagcgcagtgaaacatcgatagaagagttaaaacaaaatatccaagcgaaatcgggatcggatttgtttgattttattctggaagatatccggcaattaaagaagatattatttgacccgcaaagtacggcagtgtttatggctgctataaatgctacatcatggatcaatgaaaacatgaacgagtggttaggcgaaaaaaacgcagcagatactctttctctatctgtaccgggtaatattacttcggaaatgggtctggcgctaatggatgtcgcggatgtgattcgcccttatccagaagtgattgattatttgcagcatgcaaaagatgataactttttggatgagctggtgaaggttgatggcggacaggaagctaggggcgccatctatgcttatcttgacaaatacggaatgcgctgtgccggagaaatcgatattacaagagctcgttggagtgaaaaaccaatgacacttgttcccatgattctgaataacatgaagaactttgagcctaatgccggcaatcgaaagtttgagcaagggcggcgtgttgctttggaaaaagaacaagagttaatagagcgattgaagccattacgggatggtgaacaaaaagccaaagaaacaaaacgaatgatcgacctcatccggaatttcatcggctaccgggaatatccaaaatacggtatggtcagccgcttcttcatttataagcaggccttactgaaagaagccgatcaactcgtacaagcgggtgttattcatgaaaaggaagatatatactatctcacttttgaagaatttcacgaagccgttcgcacaaaaaaaatagatgacaagatcatcagcatacgaaaagacgagtacaaattatatgaaaaactaaccccgccacgtgtgatcacgtctgatggtgaaatcattacaggtgagtacaaacgagaaagtttgccggctaatgcgattgtgggtctacctgtttcttccggagtgatagaaggaagagcgcgtgtcattttaaacatggaaaatgccgatcttgaagatggagatatattagtcacctcctttacggatcctggctggacaccattatttgtatccataaaaggcctggtcactgaagttggcggactgatgacccatggagcagttatcgcacgcgaatatggcctgcctgcagtggtcggagtggagaatgctacccaactgataaaagatgggcagcgaattcgcgtgcatggcacagaagggtatatcgaattattgtaa

SEQ ID NO: 2351 - DNA, 111 bp, Bacillus licheniformis
atgcatgaaaagaactcttcggatttggagagttcttccctttttatccatcaggagaaggattcaggcatgattcttttcagtcagaacatccgccggcgaaacaggtga

SEQ ID NO: 2352 - DNA, 1425 bp, Bacillus licheniformis
atggagaaaaaatttaattccaaagcaatattagtcaccttcatgattggtgcattttttgcaatattaaacgaaacgctgttgaacatagcattaacagagctgatggacgtctttcacgttgatgccccgactgttcaatggctggcaaccggatttatgcttgtcatgggtgtgttaatgcctatatccgctttattgattcaatggttcacgacaagacagatgtttatcggtgttatgtcgatctttttattgggaaccgtcatcgccgcttgtgcagtgaattttccgatgctcttgacggggcgcatgattcaggcagtcggtacggggctcttgatccccatcattatgaacgccctcttgctgatttaccggcctgaagtccgagggaaaatcatggggacgttcgggctggtcatcatgtttgctccggcgatcggccccactctttcgggcgtcattgttgacatcctcggctggcgctggctgtttatcatcgtcattccttttgcagtattttcaatcctgtttgcggtgaagtatctgcaaaatgtcggagaagcgacgcgcccgcgggctgactttttgtcgatcatcctgtcaaccatcgggatcggtggaatcgtatacggattcagcagtgccggagaagctcaggaaggatttcagtcccctctgatcatcggtgtgatcatcgtcagcctgatcagcatcgtgttgttcgtgcttcggcagttgaaacttgaacaaccgttgcttgatgtgcgtgtgttcgcctataaaaattacacgcgcggggtttgcctttttgtgattgtcattatggcgatgttcgcttccgaaattgtgatgccgatgtatttgcaagggccgctcggtttttcagcaaaagcagcaggtcttttgcttttgcccggggccttgctaaacggtctcatgtcgccggctatgggcgctttgttcgataagttcggcccgagaaaactcatcattccaggtacgatcgttctcgtcggcgtgatgtttttcttcagcaggatcaatccttcggtgccgatttgggcgttcattattgtatacatcatcttgatgctgtccatctcggccatcatgatgcccgcacagacgaatgcattaaacgaattgccgaagcatttatatcctcatggaacggcaatttccaatactcttcagcctgttgcaggcgcactcggtgtttcggtgttcgtcagcatcatgagccagggacagaaaagctatcttgccggccaagaagcagccggcaaacaaatcgtgcatgaagcgatgactcatggtgttcaccatgcctactggtttgcgctcgctttaagctctatcgctttctttaccgctttatttattaaaaaagcggtcgcgcctgattttgataaagaataa

SEQ ID NO: 2353 - DNA, 2016 bp, Bacillus licheniformis
atggagtcatatgttgatcaaaaagacgggattttcaaatccgtatgttcgctcgactgcccggatcaatgcgggctgctcgttcataaaaaagacggaaaaaaccatccggtcacacagggcaatatttgcaataaagtccgcaatatgacggagcgtatttatgaccccaaacggctgaaaaccccgctgaaacggacgggtccaaaaggagccgggatgtttgaaccgatcagctgggatgaagcgattgaaacgattcgcacccgctggcagtcgctcattgaacaggaaggctccgaaagcattctgccctacagcttttacggaaatatgggaaacttgacggctgaaggaatggacaggcgctttttccaccgcctcggttccagccagcttgaccgggcgatttgcacccctgccggttctgtcggctataaatacacgatgggcggaagcatcggcaccgatcctgaagatacaacggagacaaaactgtttattttttggggaatcaacgcggtctcaaccaacatgcatcaaatcaccattgctcaaaaagcccggaaaaacggcgcaaaaatcgtcgtaatcgatgttcataaaaatcagaccggccggatggccgactggtttattccgattcgccccggcacagacagcgcgcttgcgcttggcatcatgcatgttttattcaaggaacatttggctgatgaatcatttttgaaagaatttacagtcggccacgaagagctgcgccgccacgtgcggcaatacgaccccgccgcagtagaggcggtcaccggcgtatcccggaatgatattatcgagcttgcccgcctgtacggccgcacctccccttcattgattcggatcggcaacggtcttcagcatcatgataatggaggaatgatcgttcgcaccatctcgtgcctgcccgcgatcacgggccaatggacgaaaaaaggaggcggagcgatcaaaggcaacacggcatttttggcctataatacaaaagcattgcagcgccccgatttattaaaaggcagaacgccgagagtcatcaacatgaatcagctcggcaaagctctcttagaaaccgaaccaccgatccgttcgctgtttgtgtacagcagcaatccggccgttgtcgcgcctgaggcgaacaaagtcagaaaaggacttgagcgcgaagatttattcacggttgttcacgatctatttctgacggaaacggcacggtacgccgatatcgtcctgccggcttcttccgctttcgaaaatacggatttctatacatcatattggcaccattatgcgcagattcagaagcctgtgattgagaaatacggcgagagcaagtcaaatacagaagtattcaggcttttggctgaggcgatgggctttgatgatgagccgctgaaagattccgacgaagagatgatcagacaggcgcttgactaccctgataatccgtggctcgatggcattgactatgacagcctgactgaaaagcattttgtcaaagcaaatcgaaaaacgttttttcctgataaactgccgacgcctagcggaaaaattgaattgtattcaaaaatgatggagcagcacggctatccgggcctgccgactcataccccgctcattgaaacggacaagtatccatttttatttgtgcccggcccgaatcacaattttttaaattcgaccttttcaaacaatgaaaaacatatcaaattagaaaaggagccgaaacttcacttaaatataaaagatgccgaagaaaagggcatcgaaaatggagatttggtgaaagtttggaatgaccgcggctcatgcatcctgcccgctgccgtcggagaaaacgtccttccgggcgtggccgtcagccagggattgtgggcggatgcagaagggaagcattatctcgtcaatgcgctgacgcccgaccgtttagctgatatgggcggtggtgcaactttcttttcaggaagagttcaaattgaaaaaatatga

SEQ ID NO: 2354 - DNA, 84 bp, Bacillus licheniformis
ttgaaaaaatatgaacatcaaaaaagaccggttgcagcaaaaccggtcttttatcacttcgtcttttttaaggttttggcataa

SEQ ID NO: 2355 - DNA, 477 bp, Bacillus licheniformis
atgtcaagaacaaatcatattgaaggaaaagggctggtcaacgagctgatacagcagttgaggtttcacagcacagcaaccgtttttctgcaccaggcgatcggcgagaaaatcggactgaacggaacggatcataaatgccttgagatcatctcgcgggaaggtcaagtaacagcgggggagctcgccgcaaaaagcggactgacaacgggagcgatcacaggagtgatcgaccgtcttgagaaagcgggctatgtcagacgcatcagggattcgtccgacagaaggcgtcttttagtcgaactgatcccggaaaatctggagacgatatcacatatatttcatgacttggcgcaagagtctgccgaatttctaagccgatattcagaggaagaactgcaaaccattatcaagtttttgaaaagcagcacggcgtttgccgccgattatgccaaaaccttaaaaaagacgaagtga

SEQ ID NO: 2356 - DNA, 1520 bp, Bacillus licheniformis
ttgtcacaaactcaaaatcaaaaattaggatttgttgtagcaggacttttgcttgccattctgatggcttcgatggacaataccatcgttgttacggcaatgggaacaattgtcggcgatcttggcggactagacagctttgtctgggttgtatctgcctttatggtcgctgaaatggccggtatgccgatattcggcaagctgtcggatatgtatggcagaaaacgtttttttctttttggcagcatcgttttcatggcgggatcagcattgtgcggaacggctacaaccattgagcagctcagcatttaccgcgcgatccagggaattggcggaggcgcgctcattccgattgcttttacgattatctttgacatttttccgctggaaaagcgcggcaagatcactggacttttcggtgctgtttttggcctttcgagcattttcggaccgctcatcggcgcctatgtcactgactacatcagctggcactggattttttatatgaatctgccgctcggtatggtttcttttattttcattcttctattttacaaagagacgaaacagcatgaaaagcatcgcattgattggctcggggcgattacgctcgtaggggcggtcgtatgcctcatgtttgcgctggagctcggcggcgggaaatacgcctgggattcgaatgtcatccttacccttttcggaagtgcagccgtcttgttggtttgcttcctcatgatcgagcgcaaagccagtgaaccgatcatttcgtttcatatgtttaaaaaccggctgtttgccggcagtacgcttgtcgccttattttatggagggacatttatttcagcgaccatccagattccaatctttgttcagggcgtttacggagattcggcgacaaactcgggacttgtgcttttgccgatgatgctcggctctgtcgtatcagcccagcttggcggattcttaacaacaaaaatgagctatcggaacattatgctcatctctggattggttctcgtcagcggattttctttattaagcacgcttaacattgacactccgcgtttattattaaccatgtatatgatcgtcgtcggcttgggagtcggtttttctttctctgtattaagcatggcagcgatcctcatttcggcccggagcagcgcggctcagcgacatctacgagcaactttatgcgctctctcggcatgacgatcggcgccagtatgttcgggatgattcaaaaaaaccaattttcagaacagctggaagatatgtttaaaagcagcggcgcttcaaatttcgcctcaacgaatgacgccgaccagattttatcaagtgcacgggcatcactgcctccggatgttttacataacatcaccgaagcgctatcaaattcgattgttcacacgttcatttgggcgatttccccagcagcggccgcctttttactggtgttcttcatgccgaatgacagggtgaaagtgaacgcaaaaaaggaagtgaacaaagccggctga

SEQ ID NO: 2357 - DNA, 1098 bp, Bacillus licheniformis
atgatctgttccgaagataaaatcacgacttctcaggcaatcgttgtcttggtcagttatattatggcggccgggattctcaccctgccaagaaccgccgtagaagaagccggtacgccggatgtatggatttccgtcctattaggcggacttgtcacaacggcagccggagtggttatgacaaagttaagccaggattatcccgggctaacattttttcaatatggggaagacattgtcggaaagtggctcagcattgtgatcagcctgcttttcattgagcattttgtagcgattgctgcttttgaagcaagaattctggcggaggtgatcaccttttttttgctgcagcaaacgccgatttgggcgatcgtcatgtcgatgatgtgggtcggattttattcaataaaagacggaatggggtcgcttgcccgtttgtttgaaatcatctttccgattacaattcttttctttttaaccgtggtatttatgagctttggcatatttgaactggataacctgcggactgtcctagggaaaggcatcatgccggcattaaaggggacaaaagcaacaacgctttcgtttatcagcgcagaagtgatggtgttccttttggcgtttatgaaaaagccgaaagatggtatcaaagtcgttgtcatgggaatcggcatcgcaatgctcttttacttaacaacgatcgtattcgtgatcggagggctgtcagttgacggggtgacagcgatgacatggccggcgcttgaccttatccgcagttttgaaatgcccggcttaatatttgaacgttttgaatcgctgcttcttgtcatctggattatgcagctgtttgcgactttctccgtctcattttacgctgcatccctggggctctcgcaaattttcaagaaaaagagcagaccgatcatgttcgggctgctaccggtgatgtatttgcttgcgatgacgccaaaaaacattgatgatgtattttctctcggcgacatgatcggctatattgcggccgttttattcggcattgtgccgattccgcttttattggtttcgaaaatgagaaaaaagaaggcagtgcaaagctag

SEQ ID NO: 2358 - DNA, 1197 bp, Bacillus licheniformis
ttgaaaaaaactaacaccatccgttatttaacgatttttttactaatgtttctattaaccgggtgctggagcagccacgaaattgaagagctcggcttaacatttgcaatggggattgacaaaggcgaggaaaccgaacttgaaaaaaagtttgacaaagcggggggcgattatccgaaaaaagaccggatcacgatgatctatcaatacgtgaacgaacaagcggccggttcaaaatcgactggaggaagcactgatcaaaagacgtatatcaacgtttatgaaactggagactcgcttcagcaaattaatgctgaagtagcattaagacaggacaggcctgtattcagtcctcatttaaaggtgattgtcatcgccgctgacctcctccgcacctattcgctggcggaactgctagatcagcctctccgcgataatgaaatcaggccgagcagtatggttcttgtcacaagagggcgtgcaagagacacgcttgagctgaaggaaaccggcgaaatgccggcgtttcgtctgcgtaaaatcgttgaaaatgagtataaagcgaaaaagatccttccccctgtgacacttgccaaactgacaggcaaaatgagatcaggaacaagctatcttcttcaaaatgtcatcggtaccgacggagaagtcaaatatgcgggagcagctgcgatcaatggaaaaaccaataagctgatcggctatttggatgaacaggatgtagagggcgtaatgtggattaccggaaaggggaccggaggtacggtcaaaagctatgatccgacagaaaagaaggtgaccgcatttggcgttgaatcgattaaaagcaacataaagcccatcgtcaaaggtaaccgcctgtcttttgaagtgaacgtaaagtcagaggggtatcttgcggaaaactggaacacgaaagaaaaagcttttgatgacaaatttttagaaaaagtcgaaaaaacaaccgcgaaaacagtgaaaaaatcgatggaggacattacaaaaaaaatgaaaaccgaatacaaagcagatctggccggattcggaaacgagttgaggatcaagcatccgaggatttgggaaaaactaaagaaaaattgggatgagacctttaccgatataccgattacatttcatgttcaaatcgcgattaaagaatacggaaccgttggggatcagtaa

SEQ ID NO: 2359 - DNA, 1099 bp, Bacillus licheniformis
atgatggtgagtcagcaggataaaattaccgtttcacaaaccggcatcgtcattacgaattttctgttgggaacgggcatcttgacgctgccgcggacatctgcggaagcggttaaagccccggatgtctggctttctgttgcattcggagggctggttgccatattagccggtttcatcatggtgaaattaagcatggagtcccccgacaaaacgctatatcaatatagccgggatctcattggcaagtggccgggaggacttttcaccctgcttttgatttgttattttctcgcaacatcaggtttccaagtccggtctgtcacagaggttatgggattttacttactggaagaaacgccgctttgggcgacagcgatggtttttttatggagcggaatctatttattaaccggcggtattaacccgatcgcccgactttatgaaatcgtctttccgattactgttctcatttttctgatcgtcatttttatgagcgcaagcatatttgatcgacaatttgcgcccggttctcgggaaagggatcatgccggtgcttgaaggagtcaagacaacgtcttttgcttatacaggcatagaaatcatactgatcatcgttccttttatgagaaagcccgagcaagcgttaaaagctactttgatgggaatttcttttccggttgtcttttatatgatcaccgtcattatggtcatcggtgcactgtcaatcgatggagtgtcgtcacggacatggccgacgattgatttgatgcgtagttttgagataccgggtctgatttttgaacgctttgagtccttgctgctagtgatatggatcatgcaaatgttctccagttttacgatcagctattttgctgctgctttaggtctgtcgcaactcttgaagaaaaggatggaaccgatattattcagcttgcttccggttatttatctcattgcgatgatgcctaaaaatattaatcaactttttcaactgggagatctaatcggcaacagcgccatctatttagtcggcttcatcccgctaatgcttctggtcatatcgaaagtgaggaggggaaagtttgaaaaaaactaa

SEQ ID NO: 2360 - DNA, 1101 bp, Bacillus licheniformis
atgatggtcaggcacgaagagcgcatcaccactttacaaacagcagttctcatcaccaatttcctgcttgggacagggatcctgacgctcccgcgaacgtctgttgacgcagtggggacgcctgatgtttggattacgcttgtattaggcggcttggtcgctctgacggccgcagtcatcatggtaaagctcaaccaccaatatcctgataaaagcttttatgaatacagtcaggacatcattggcaaatggaccggcagcttgatcagcctgtttttcgtttgttacctattggcccattccggttttcaggtccgctcaacgcttgaaatcatccgcttttttttactggaaggaaccccccgctgggcaattgcgatggtttttttgtgggtgggcttatacttgatcgtcggcggcttaagcgcgatcgcccgcttgtttcaaattgtttttcctatcacagtcattctttttttactggtcgctttaatgagtatcggaatttttgatgtggacaacttgcgtcctgtactgggagagggaatagggcctgttttaaaaggaataaaggtgaccgcattgtctttttcaggtattgaaatcattttgatcctgatgcctttcatgaatcagccacgcaaggccattcatacgattatgatcggaatcgccatccctctgcttttctatatgatcaccgtcgttatggtgatcggcgccctgtctatagacggggtagtttcacggacctggccgacgattgatttgatgagaagctttgaaatacctggtctgatatttgaacggtttgagtctttgctgctggtcatctggatcatgcagctgttctgtacctttgttatttctttttatggtgcggcattaggcctggcccagctctttaaaacaaatattcggccgatgatgtttgctttgcttccggtcatttatctgattgcaatgattccgaaaaatattaacgcgatgtttgcatttggagactttattggaaacagcggcgtttatttaggcggcttgactccgctcgtgctgctggtgatttcaaaaataagaaggagaaaacagggaatcagctga

SEQ ID NO: 2361 - DNA, 1569 bp, Bacillus licheniformis
atgagatggtggaaagcaaaaacgcgaagaatgatacagtcgtccaacaagccggaaaaacctaaaaatgaagtgccgtctgtggagtcaactgggtattttaccggcgattttgatcacgacttgaaactggccaaaacggctatggagaataactcagacgttcatttccgcgaattcaacttaggccgcaccggcatccgcgcggcgattgtatttgtcgaaatgcttgcggatcaagacctgattgacaagcatattatgaaatcccttatggatgatttttctaaagaatataaagttgaactttcttcattaagcagcaatgtgaccgacttaattaaaaagcaaattttatcaattagcggcgtatcagaggtaaaccatgtcaacgaagtggtgcccgaagtgttatccggtacggccatgctgctgatcgacggttcagcggaagttttactgctgggaactgttaaaagaaatacaaggaacattgaagagcccgtatcagaatctttggtaagaggcgcgcgcgtcggctttacagaaacgatcggcaccaatacagcccttttgaggcagcacggcaaaaatcaaaacttgtctatggttcaatttcaagttgggaagcgagccgtcaaaaatcttgtcgtcgcttatatcaaagacattgcggaaccagggctggtggaagaagtcaaaaaaagaatcgaaaagattgatatagatgatgtgcttgaatcaggttttgtcgaacagctgatcgaagacaattatctcagtccatttccgcaggtgcaaagcactgaacgtcttgacagggtgatgagtgcgttaatggagggaagagtggccattttattggacggaacaccttttgttttaatcgttccggttacattcagcatgctcctccaatcgcccgaggattattatgaacgctggctgccgagttccctgatccgcatcatgcgaatcggcgcagccatgatctcgctgcttgggccggctctatatatttcctttatttcgtttcatcccgggctgattccgagtgaacttgcgatttccattaccggaacgagggtaggtgtgccttttccatcgctgattgaagcgctcattatggaagtggcaattgaaattttgcgcgaggccggcctgcggcttccaaaaccaatcggtccggcgatgggaatcgtcggcggtatcatcatcggggaggctgccgtgcaggcaggcatcgtcagcccgattatggtcatcgtcgttgccgtcaccgcgatttcttcatttgcgattcctcaatacagcgccggcatttcgctgcgcatgctgagatttgtagcgatgttttgcgctgctgtattcggtttgtacggggtgattatgtttttcctcatgcttgccagccacgcggtgaagctgaaaagctttggcgttccatatgcgagcccggccgttccttatcgtttgcgcgattggaaagatttcatcgttcgcatgccgatacagatcatgaaaaaacggccgaagctgttaaaaacagacgattcgtcacgccagtag

SEQ ID NO: 2362 - DNA, 141 bp, Bacillus licheniformis
atgaaaaagggtgatcaacatgtggaaaaccattgtttcctattttccggactggctggtcctgatgcaggctttttttgtcttttttgtcccgtttgccatatcaaaagtatttttgtggcttcgcacggcaggggatga

SEQ ID NO: 2363 - DNA, 1728 bp, Bacillus licheniformis
atgacgattttaatgaaaataagaggcttggaaaaaagctttggagagcaaacgattttaaaaaacattgattttgacatttccaatcatgagcggattggtttggtcggatgcaatggagcggggaaaacaacgcttgcaaatatattgagcggtcatgcagaagccgacaaaggcactgttcaaacagaccggacgctcaaaatcggctatctgctccagtcgattgagtactctgttcatgatttcaacagcatattaacaggcgatgaggggggggaattatatcagttgacgagcagtcttggcttatcaaaggttcaaagctggaattccgaacggctcagccatttgagcggaggagaaaaactgaagcttgcactggcacacgtctggaagacgatgcctgatctcctcatcttagatgagccgaccaaccacttggatttaaaagggatcagttggctccttgaagaactgcagcaatatcaaggggcagtattgattatttctcacgatcgttattttctggatcaatccgtctccaaaatcctcgaactggaagatgggaatttgcacacctatcaaggaaactatagtgcataccggcgggagaaaaaacggttatatgaagcacgcctgcaccaatacgaagtccagcagaagcaaaaagaaagaatcgagtcacagattgccactcttcaaaattggtcgcagaaagcccaccgcgactcaacaaaacagggatcacagtcagaacgaaggcagcttggttttaaagaataccatcgggtaaaagccaaaaagctcgacaaccaagtcaaatcaaaactgaaacgccttgaacaggaacttgaaaaaaacaaagctgaaaagccaaaggaagcggcatctgtcaattttcagttttcatcaggagaaaaaaggggcaagcggattatcgaagctaaaggcctggcaaaagcgtttgacggacgtactttattcaaagacagccatttttacgtcaagcatggcgagagaatagcgcttatcggagacaatgggtgcggcaaaacgacccttgttaagatgatgttggatgctgaacctgcaacagccggaacgctatggaaaagccagtctgtaaaggccgcatatttaagccaggatgtcagtgatctaagggttgaccaaacagttgctgaagtgctgaatttgtctgacagagccgaaatcgcaaatgcgcggacgattttggccaatatggggatcaaagaaaaccgctttcatgatggaatcgggacgttcagtctcggggagcggacccgaatcaaactggcaggcatgattttaaaggattatgatctgctgattctggatgaaccgaccaaccacctcgatttgccaagcagggagcagcttgagcagacattgcttgagtttcagggaacgatcatcattgtgtcgcatgacctgtacttcacagacaaattgtgtgagaagctccttgtatttgaaaacggtcgtatcacccgcgtcgaaaccggattaaaagattatcggaacagacagaaacagccccatgcaaaaagcgatgaagaggagcggctgcgcatcgaaaatcggatgaccgccgttcttggagagttggccggactcacgcctcaagatccgaaatatcatgaattggatcaggagttttcagagctggccaaacgcaaacgggcgtttttagaaaaagaataa

SEQ ID NO: 2364 - DNA, 117 bp, Bacillus licheniformis
atgttttttgtcgtgcaatggaatgggatcggtttataccgctttcacgatgcatattttggcatgatatcctctccgggtttccgcgagaggttttttgttgtcagccaaaaataa

SEQ ID NO: 2365 - DNA, 1986 bp, Bacillus licheniformis
atggaaaaaatattggactggttcaagcatccatctctttcaaaaagattagcggtctcatttttattgattttaacgctccctgttttagtcctttcaggtgtttcctattatacggcaggcgggtcgattgaagatgaaatcatgagaagcgcaagaaacagcgtggatcaattaaacgaaatgatcgatcaaaacattgagaaaaaagcggatgctgttacatatttcagtgaagagatcaaagaaaaaacatacaaggaaaaaggccagacttcgttaagacaaaagtttgaacaatacgccaggcaaaacagagatgtagaagccgttttcacaggctctgaagacggtgtatacgtgcagcacccttatacgaaaatgcctgacggctataatccggcggaaaggccctggtttaaagaagtggttgagaaaaaaggcgaaattatcgttaccgatccatacacatctgccgctaccggcaacacggtcattaccatcgccaaacaaaataaagacgggtcgggcgtcgctgcgctcagcttgaatatcgacgagctgattaaagcgacaaacgatatcaaagtcggaaaagacggctttgcttttatctcaagtgcgtccaaaaaatatatcgcccacccgacgattaaagccggaactgaaggtgaaggcggctgggttgatcaagtttacggcaaaggaaaaggcgaattcaagtatacttttgaaggaaaagccaagcaaatggcttttacgacaaacaaactgacaggctggaaaatcgccgggacgatgttttccgatgagataacaaacgcaacaaagcccgtcctttatatggctctcatcgtcttttcaggggctttggtgcttggcggagttctcattttctttattgtccgcgcgattagcaaaccattgaatcagctcgttctatctgcaaagaacatcagcagcggcgatttgacacagcaaatcgaagtgcgttcaaatgacgaattcgggcagctcggcaaaagcttcaatgacatggcggaatcgctccgcacactgatcagcaccattcaggaatcggttgagaatgtcgcctcctcttctgagcagctgacagcaagcgcagaacagacgagccaagcgacagaacatattacatctgcgatcgaacagttctctaacggggctgaaagccagaatgaaaaagtcgaaacgagctcacagcagctcagccagatgaatgatcatctgagcgaaatgaccgaagtgtcggaatcaatcaccgaagcatcgatcaaatcgacagaaatcgccgaaaccggaggagaactcgttcagaaaacggtcggccagatgagctcaatcgaccaatctgtcaaacaagctgagagcgtcgtcaaaggcctcgaaggcaaatcgaaggatatcacatcaattctcagggtcattaacggaattgccgatcaaacgaatctattggcattgaacgccgcgattgaagcagcacgcgccggcgagtcaggcagaggattttccgtcgtcgccgaagaagttcgaaagcttgccgcccagtcagcggactcggcaaaagaaatcgaagcgttgattcaggaaatcgtcaaagaaatcaaacattctctcagcatgtttcaatcggtcaaccatgaagtgcagtccggacttaaaattaccgagaaaacagagtcgagctttcacgaaatcagcggcatgacgaatgagatcgcaggcaagctgcaaacgctcaatgcggcggtcgaacagttgtcgaatggctcgcaggaagtctccggtgccgttcaggaaatcgccgatgtatcaagggaaagtacagctggaatccaggacattgctgcatcagcggaagaacagctggcttcaatggaagaaatcagtacatcctctgccacgcttgagcagatggcggaagatctgcgagaattgacgaaaaaattcaaggtgaaataa

SEQ ID NO: 2366 - DNA, 333 bp, Bacillus licheniformis
atggcaacaatcgaagattttttaaagcttgacattcgggttggaacagttttaaaagcagaagagtttccggaagcgaagataccggccattaagcttgaaatcgattttggcggagagattggcgtcaagtgttcgagcgctcaaatcacaaagcgttatacgcctgaaaagcttataggccggcaggtgacggcagtcgtcaattttccgccgcggcggattgccgggtttaaatcggaagttctcgttcttggaggcgtaccggaaaaaggcgatgttatattgctgacccctgatcaagaagcgcccaatggaacgaagatcagctga

SEQ ID NO: 2367 - DNA, 1329 bp, Bacillus licheniformis
atgttcggttcctatatggttcaaatggtaaggtccaacgcccataagctggaccggccgctgagagaaagcgtgctgaaactctataaaccttttaaatggacgccttgctttttacacgggtttttcgaaaaaatattaataaaaaacaaaaaaataccggtcataattgaatttgaaaaagactgtcagcataaaggctatcaattagtcgatgaaatgatcggcagcaaaagaagaaacaaaatcaagcatcgcttctcctgcgttaactgctgcagcgctgaagtcaccccttcttctttgcaatcgcttctatctgagtgcggcgacattcgcaaaatttatttaaatcgcaaagtaaaagcgctcctcgacgtagcggttgaatcaagccatgccaaagaagtggtcagaaacaatcagacgctgacaggcaaaggagtgacagtcgctgtcattgatacgggcatataccctcacgaagatcttgaaggcaggatcagggcttttcaagactttatcaaccagagaacagaaccctatgatgacaatgggcacggcacacactgcgccggtgatgcttgcggaaacggagcggcctcatcgggtcagtaccgcggacctgctcctgaagcagaacttgtcggtgtaaaagtattggacaaaatgggatccggatcgctcgaaaccgtcattcaaggcgtagattggtgcattcaattcaataaggaaaatcctgatgatccgatcgacattatttcaatgtcattgggtgcagaagccttgcgctacgagaatgaagaagaagatccagtcgttaaagctgttcatgcagcatgggacgcaggcattgttgtatgtgcggcagccggcaactccggtcctgatgcgcaaacgattgccagcccgggtgtcagcagcaagattattacagtcggagccttggatgacagggatacagtcagccgggaggatgacgatgtcgcctcttattcaagcagagggccgacaatctatggtcaagtcaaaccggacttgctggtaccgggcacaaatattacgtcgcttcgttcacccggatcttttctcgataagctgcaaaaaacaaacagagtcggcacaaaatatatgacattgtccggaacctcgatggctacgccgatctgcgcaggaattgccgcacttatccttcagcaagccccgggcacagaacctgatgaagtcaaacagctgctaatggacggtaccgatttatggaaagatcgcgatccaaatgtttacggtgcagggtacatcaacgcagaacaatcggtgccgcaagactaa

SEQ ID NO: 2368 - DNA, 411 bp, Bacillus licheniformis
atgggtaagttgactgaaaagctgggtttggctcttgttttttcaatcgttgtctggcttggcgccaccgtattttttatgctgttcggcagtgcggttcttacagaacccggccaagatggttttatgctccgctttttgcttcttgaagccggaacttttgcccttttatatgccgtgatgctcgtttatcggcgggttgacaaaacgaggtttgcggcggttaagcttggcattgtggggtcggctgtcggtttgtttctcgacgctttttctttatggaatcattcgctgatcttcccggcgctttcagatggccagatgattgggtttgcggtttggatggtcttcgcgtatgccatgtatttgacgataccgctcatccttgaaaaaagaaggtctgcagtttaa

SEQ ID NO: 2369 - DNA, 600 bp, Bacillus licheniformis
atggcaaggccaaatgtgacatcaaaagaaacgttgattgaggcggctaagcgccgcattgccgaacatggtctggacaaactgacgttaaaagcggtcgctgaagaagcaaaggtcacacagggaactgtttactatcattttcggacaaaagagcagcttgtttttgaagtggtccgcgacctatgccgcgcgtcgtgggagcgattgaaagcaaatgaaaagcccgctgccgaaaggataaaagacggattgtcttccgcgaaatcaagaacactgaaggatgcgtattatcatcagctttttttagaattggccgttttagggtttcgaaatgaaaagataaaagaacagctcggcgaacttctcgaagaggaaaatgcggtgttggcagaacagctttccgacctgtggaagcgttctcctgttgacggggtttctttcagcacgtggggcattcttttaaacgcactaatcgacggtcttgcacttcagtcgcttatgtctccgggattttcccctgaaaaaatctacagggaattagaaactgtgctgcagatgctgacggaaaccgctgttaaacagcatggaggggagtaa

SEQ ID NO: 2370 - DNA, 492 bp, Bacillus licheniformis
ttgactatgtctgaactgacaaaacagctgatctatgatatgtatgttaaactcctgcacctgaacgaacaaaaagcggatacagatctcaaagcatttttaaagcaggcggcagaatctgatgttaaacggctcccggggaatatgactaccatccatgtcatcagctgtatcggtcatgatgaaccgatcaacaacaccggcattgcaaaaaaaatgaatttatcaaaagcaaatattacaaaaatcagttcaaagctgttaaaagaaggcctcatcaaacggtttcaattgacggacaacaaaaaagagatatacttcaggctgacgcccagcggaaaacaagtgtttgagcttcatgaaaagctccatcagcaaaaagcggatcagtttagcagatttctcgattcgttttcaacagcagaacagggagcgattttgaaattccttcaagggctgacgtttatgacagaaacggataagaagcattaa

SEQ ID NO: 2371 - DNA, 615 bp, Bacillus licheniformis
atgaatattgaaggaatagagatggaagttcgctgcacaggcgatgtatgttcagatgcccttgaatttttgagacgccataaccacgaaaaaacagccgaacattcgataagggtgaaacaagcggcagaaagattggcaaatcgttttcatgttcctgcacaaaaagctggtatagccggtatgatgcacgacatcagcggtgtcatccctaatgaaaaaagaattgcggctgctgaagcgctcggtattgatattctgcccgaagaacggatattcccgatgatcatccatcaaaagctgtcgaaagtgatggcgcgggacctgtttcaggtggcggatgaagatattttaaatgcaatagaatgccatacgacgcttaaaaaaaatccctcccagctcgaccttgtcctgttttcagcggacaaaatagaatgggatcagacggggactccgccttacatcaaggagcttcatgaagcgcttgaaatttctctggagcacggggcgtttgtttatattcagcatttgtggaaacaaaaagataaactgaaagttgtccatccctggctgaaagatgcctattaccacctaaaagcaaaaatcgaagcttga

SEQ ID NO: 2372 - DNA, 486 bp, Bacillus licheniformis
atgctaaaaaacgttttgcttgaacagtttaaagcatgctataacgaaacgacttggtttgtttgttttcaaacggctgccgctgatctcacggaaagccaggcaaggcaaaaaggggaaggttcggaaaattcgattttagaaattgccaaccatttgattttttacaacgagcgctatttaaagcggtttaaaggaattcccgttccggcttttgattatacgatcgatgatacgtttgtaaacaaaagcggacttggctggaaagaaagccggcaggaactgaatacgatctatgccgaatggatcgatgcgctttcggaatgcgaagaggagatgctgaaacaaccggctcagcacgatccgcattctacctgggcggagattttgtcctgcctcattcttcataatgcttatcatttggggcaaatcgtccatatgagaaagcagctgaaaatctgggatgcttcaaaaggcgtgaattaa

SEQ ID NO: 2373 - DNA, 1647 bp, Bacillus licheniformis
atgaaagcccgccgtttttttgtaagcgttctttgctacgcggtttttttcatcggcaaagcgccggatatcccggcggcagaggcgcttcttttattatcaatgctgttttttgttccggctgcgctcgatctcattcagcatgaaaatgggatgtttcggctgatcagcgtctgttttccttatgcggcttgttcggcatcgctatcactgctgttccattccccgcttttttcattggtttggctatgctatacggggatgatcgccttatacggggcacttcgcctctgggagagagaaggaaggagccttgaagaggcatcgattgacagcggcctgctttaccttccttttggaggggggtggctttgtgcttatacgctgaatctccaggtcatggatttcagcccgctgattgtgctgctgacagcggtacattttcattattctgcatttctcattccgatttttaatggaatgctcggaaggaagctgaaaaagaaaggcctcctttatgcggcggtgacatggctcatcatgctgtctccgctgttcattgccatcggcatatcgttttcgaaaaccattgatgtcatcgctgttgcgctgtatttgtcggccctatacggaagcggctttctcgcctcgattacggccttcaaaaacagcgcggctcgccgctttgttatcttttcgtcttttacattaatgatcaccattgctttttcactcatttactcttacggcgtttttcgcggccggacgacttttacaatccaggaaatgatttggattcacgggcttgtcaacgcctttggcgtcatcattccagcgctgaccggctggcgccttgaatcccttgggccgggctgtgaaaggaggcaaggcgaaacgatgagcaacatttacggaacttggaagatcggagccgattttttacacagacaccgattacaaaccgattcgtcttaccaaggtcttgccgatgatatgagcgcatttcagagcaaaggatttcagcctgagaaggtttctcctcttattctcgatttctatgagcatactgccgattattcgttaacagcggagatctcctggcgtccatggtttaagccgctcgcgcacatgtaccagctgatttcaagaaagacaggacaaattcatttggggactaagaccggacggcaaacgatggacggagagattatcggtgttgattcagccagagacggaaggaagaatgtgcgcgcctggatcagaacgaacgaggtaggcgagactgtgtttgtggcgctttattctgctcatacccacgatcacatcacatatatgaatatcgcgctgccattgccgttttccaatatgacaggcattttaaagccgaaagcagaggacggctgcctgattttgacgagcagtgataaacgatctgaccgtggggatgaaggcatcttcctttcgaccggaacaggaacgtttaaactgccgctcgccgaacgctttatcattaaagggcagggacgaaagaggctctgcgcccatcaccgcatgtggctgttcggcatacggtttctcgacattcaatatcatattgaaaaaaaggattctgccgtgaaaagggcgaaaatagcaaatgaaagctag

SEQ ID NO: 2374 - DNA, 596 bp, Bacillus licheniformis
ttgatttcgatgtatgaacgggtgatcgaggattttcaccttctccacccaaaactcaaggaaaacgtgttcaaaggaaaaggagtgatgacggaaatttccggcggttcatactgggtcagactgttgttcaaagcgggaacggtcttccgctgttttttcccgaaagggggaggaacgttccgttcacgattgaaaatcacattcggctgacgaaaaatgatacaccggcagccgtttggaacaggactttcttttttcaggataaacaaaggcatttcgatgctgtcatgatctatgataaaagccgtgttgaaatcatcgactatttcgggcatccgccaatcttaatctcaagcctgcggtttaaggcggaggccgacggctcattatcgattacttctgtcagacaatggctgcctttattcagaaaaaagctgccccttccaaagtgcttatacggtatttccagcgtgaatgaatcgtatgacgaagaaaaaggctgttttacaattgacgttcatgtgaaaaacccgctgttcggaacgctgtttgcctacagaggaacgtttaacagggaggaggagacggcatga

SEQ ID NO: 2375 - DNA, 900 bp, Bacillus licheniformis
atgaaaaaaactccgatttatgtagaaatatccatccagacagaaatggagcggctatggcgctatacccaagacccaaccctccatcggcaatgggacttgcgatttacggacattacctatttaaagcgcagaccgggtgaacctcagaggttcttatacgaaacgagaatcggcttcggcttaaaaatctccggcaccggggagtctgccggaaacgtatttcaagatactggagacagagtctcgtcactcaagttcgctacaaaccacccgctttctgtcattcgcgaaggaagaggatattggaaatacagcgagagcgaaaccgggatcacgtttatgacacaatacgattatgacacccgttacggtaggctgggccggcttgcagatatggcattcaggccgctcctcggctgggcgacggcctggagttttgatgcactgaagatttggcttgaaaaagggctccatccaaggctgctttttcaaaaaacattagtctattggctcgtttgtctgctgttttctttcgtctggatttaccaagggcttgttccaaagctcatcatggctcaccctggggaaatcagcatgctttcggcttttacgggcggccgtttccatcccgaaacgctcctgaggcttatcggtttagccgaggtgatggtcggcgtgttatggctttatcctgttcggaaaaggaagtggtttcttctgcatatcgtcctgcttgtgctgctttctgcctccgcgggaatggctgatatcgcatcttttgccgaaccttttaacccggtcgtgctcaatgccgcacttatcatcttgtccgttatcggctatgtgagcgcttgcggcattccaaacgcgggaaatacgatcagaaagaggcgttga

SEQ ID NO: 2376 - DNA, 573 bp, Bacillus licheniformis
ttgtctccgcgaatcggtttgaataaagacgcagtattggaagctgctgcagctctggctgatgaggaaggcattcatgaagtgacgcttgcttcactttccaaaaggctgaatgtcaaatctccgtctctgtacaatcatataaaaggattgaacgacttacggaaggaactcgcactttacggcttgacgattctttatgaaaacatggcttcggctatccagagagccgaagagaatcaggctgtcagccaaatggctcatgcctatctcgcttttgccaaaaacagaccggggctttatgaagcaacttttattgcaatgcccgatgaagatggacggcttgacgaggcgggagacagagtcctcgccttggtgctttccgttctgaaagactatcatttagatgatgaagccgcgattcatgcggtcagaggcttgagaagcatcctgcatggatttgccgcactcaggcaacacgatgcgttcggtcttccttatgatgtagaagaaagtcttgatctgacaatccgcgtcttcttaaaaggcattgctgtctatcagaccgaataa

SEQ ID NO: 2377 - DNA, 714 bp, Bacillus licheniformis
atgaggatgacccgatttgaatctgtttaccagctgactttttttccgcacatatttcctgtcaactgttatttagccgatgaagaagacggtctaacattaattgatacagggattccgatcagcaaaaccgggattttaaaggctgcggatcacctccgcaagccgattaagcggattttgctgacccatgcccacagcgaccatgtcggttcgcttgacgcgctgtaccacagccttccgggtgtgaaggtgtcaatatctgaacgggatgcatgtctgttaaaaggcgatacaaagatgctggaaggggagcgcggaataatcaaaggaggcgttccgaaaaacatcaagacaaatcctgatatctttttaaaggaaggagacagaatcggttcattgctgactgtttcatcacccgggcatacgcctggcagcatttcgttttttgatgaaagaagcggccttctcatagtcggtgatgcgtaccatacgcgaagcggcatgacggtatcggggcatttaaagctttcatttccttttccggctttggccacatgggacaaagaaatcgctttagaaagcgcacaaaagctgttagatttaaaaccaaaggcgcttgccgccggccacggcgatcttgtccatgatccggctcaagcgatgaaaaaagcggtaaacgaagcatacatcaaattaaacaggaaaggatga

SEQ ID NO: 2378 - DNA, 510 bp, Bacillus licheniformis
atgggcggcggcgcaaacggaaggcgggcagggaagatgagcttttctcatttcgaaaaacagaaggcaaagttattcagcggggtatccaccgtaacaagcaaccaaaatgaagcaaccgaaaaaggtaaaattccttccatgtggagtttataccgtgaaagatttccgcataaggaacgccaggacatgaagagagatacgattgcgctttattcagattatgagtcggaagaatatggggcgtatacattttcaatcggtacgttcgctgatcagcatgaaaaagcggccaatgtgatttcgctccctgcatccgaatatgccgtttttgtttcaaggcgggggaggatcgaagaggtcgtgtttgagacttggcaggagatttggacatgggctgagaaaaatctccgtacatataccggagattatgaagtttatggtgaacaagcagtgaatcccgaaaatgctcaagttgccatttatattgctgtcgatcgaaaaaaataa

SEQ ID NO: 2379 - DNA, 237 bp, Bacillus licheniformis
atggaacattatttttgccaaagctgcggcatgccgatgacaagcgaacttttcggcacagaaaaagacggggggaacagtcgtgactactgcatttactgctatgaaaacggagcttatactcatccagatgcgacattgaaagatatgatcgaaatctgtgtgccttatataaaagaagagggaaaaccgaggccgaagcgagagcgcttttgtcgcggacactcccttatttaa

SEQ ID NO: 2380 - DNA, 936 bp, Bacillus licheniformis
gtgaaaattgaccggcttttggccattgtgattttattgattaataaacgccaagtgcaggcaaaggagcttgccggcatgttcgaagtctctgtcagaacgatttatcgggatattgaggcgatcaaccaggcgggcattccgattgtcacctcacagggagcaggaggcgggatcagcatcatggagcggattcggctcgaaaataagctgctgtcagcagacgaactggcggccattacgacggctttggaaagcgtttcctcgacgtacgaagtgctccatcacgggtctgcacttgaaaaaatccggtttctcgtttcggaagaagaaatgccggaattccgcaagaaaacggaaaaatggtttgttgacatctcttcctggggagaaagtcctgtcatcaaagaaaagatccgcttgctggatgaagcgtcagacagcaagcgggcggtctcctttaattatgtggacagagaggggcagaccggaaaaaggaaagcggagccgcataccctcgtcctaaagggaaggcactggtatttgtatgctttctgcctgaagagacaggcgtttcgcttctttaaactgttgcggatgaaagacgtgcggatgcttgaagaaaagtttgaaagaaaggaagtcgatctgtcttcacttccttgggagacatcgtggtacaaaccggacaatatgaccgaggtgacccttctcattaagccgtcgggagagtctttggcaagagaatggttcggctcagaagctctcacttatgaaaacggacaatgcgtggcaaccatttcttatccggaagatcaatggctgtacggatttctgctccaatttggaacccatatcgaagttctcgatcctcctcgcatccgtcaaaaaataaaagacttggcaaaacaaattgtacatttatacgaaacctga

SEQ ID NO: 2381 - DNA, 114 bp, Bacillus licheniformis
atgggtgatgagatcctcttttttgtcatgatatcccagaatggtgtgtgctatggaatgaaaatagcagaaaaaaagaggctgcacaagatgaatgtgagggatctgcagtga

SEQ ID NO: 2382 - DNA, 498 bp, Bacillus licheniformis
ttgcagtttttcatcattgtgtccatcgtctatatcaagttcaaacggtcggtcggttatcagcctttaaagccggcacgcatgttgttccggatcatccttttttcgggaattttcgtttttctgctgacgatgagcgcacttcaccctttatcatacttttatgatctgattgggatcgcgctcggactcatcttgaccgtctatgcgctgaagcatgtgtcgatcgaaaatcggggcggagtcctttatttcagaacgcatttatgggttgaattgatcgtactctttttatttttataccggtttctgtaccggatcgccgagatcggccagctgcagactgcggtttcagacgggggttcggcagcttacggcgccctttttgcgcaggacccggcgacgatgatcggtttttttgtactggccgtttattatgtcggtttctctttttttgttttaaaaaaaggcagaaccgaagaaaagcgctcagcttaa

SEQ ID NO: 2383 - DNA, 333 bp, Bacillus licheniformis
atgagtgagcacaatcaagaaacaacagaaaaacaggtgcgggccgagttagatgaagaaactttatttctcgtttcacagacgtttaaagcgctctctgacccaacgagaatcaaaattcttcacctgctctcacaaggcgagcattcggttaatgaaatagcagagaagctgagtctcctgcagtcaaccgtttctcaccagctcaggtttttaaaaaaccttcgtctcgtcaaatcaagaagggcagggacttccattttttattctccggaagaccagcatgtcctcgatgtacttcagcagatgatcgatcatacacaacatgactaa

SEQ ID NO: 2384 - DNA, 825 bp, Bacillus licheniformis
ttgaaaaaccatatttgcacgacgtgcggcgttcaatataacgctgcttcgaaagagccggcagaatgcattatttgcaatgaagaaagacagtatgtcagtttatcagggcaaacctggacaacactggaagaaatgaagcaaagcgggaggtttcaaaacgagatcacctttgtagaggagcgcctatacagtttgacgacaacacccgaattcggcatcggtcaatcggcgtacctgattcaggagcccggctttaacttgctgtgggattgtattacatacctggatcagcgtacgactgagaacatcgagcagatgggcggaatccaggcgattgctttatcacatccgcattattattctgcacaggcggaatgggctgaaatgtttgatgctccgatctatattcatgaagatgacaaacaatgggtgcagcggccgagcagccggattgttttttggtccggcgaaactctcaagctatcaagcgggttgaccttgcacaggcttggcggccattttaaagggggagcggtctgccattgggcaaacgggaacgcaggcaagggaatcctcctttcaggagacattatccaagttgttcaagatcgcaggtgggtgagttttatgtacagctatccgaatttgattcctcttcccgccggcaaagtgcagcaaatggctgatcaaataaaggatgttccattcaacaggctgtacaacgcttttcgccgctcagttgaaaaaaacgccggagaatgtgtgcagaggtctgctgcaagatatgtagaagcgcttcaaggaacgctgttttcgacttga

SEQ ID NO: 2385 - DNA, 243 bp, Bacillus licheniformis
atggatatattgagaggctatgttgaagccgtcaaaagaaatatggaaacgatgaatgcatctgattatgatggaaaagaagaggatttaagaagacagcaggaagagctcgaacgctatgaacaacagttaaaagagaaaagcgcttcggccgaaagctttgatcaggtagtcaatgccgctgtagattgcgcggccggcgacatttcctattcacagcttgaacaaatgtttcaaccatag

SEQ ID NO: 2386 - DNA, 1338 bp, Bacillus licheniformis
ttgaaaaacgaaactgcgcttaaacgaagccttacactcggcccgctcgttgtgatcggccttgcttatatggacccgctcgtcgtatttgattcctacggagttgtcgcacagctgacaaagggacacgttccggcggcatacgtattcactgttgccgccctccttttgaccgctttgagctacggcagcatggtcaaagcttaccctaaagcgggatcggtttatacttatgcatatgaaagcattcatccgcatgcgggatttttagccggctggacgatcatgctggactatttgtttttgccgatggtcaactttgcgatcggcagcgcttatttaacggcggcttttccagaagtgccgcatggtttttgggtcgttctgctcgctctatccatcactgtcgtcaatgttttaggcatcagactaacggcaaatattacagggctgttcgtcgcttttcaagtgatcgtcgccctgacttttgccggatttatgatcgccgggctggcaggcggcctcgggacgggcgagctgatttctgccgatccgtttttccattctgatatcgaaccttccctgattgtgtcaggggcgacgattttgtgtttttcgtttctcggttttgatgcgatctctacaatgtctgaagaaacggtcaacccgaagaaaaacattccgttagccatctttctaacagtagcgatcggcggaacgctgttcacggcgatttcttatttgatgcagcaaatctatccgtcctatgataacttccggcatgccgattcggcatcgctggaaatagccctatatacgggaggcgcttttttaaagtccttctttctggcgggaacgatggtcgcagtcatttcatcctcgctctcttcgcatgcgagcgcttcgcggcttttgtatgcaatggggcgtgacagctctcttccgaaacgctttttcggctacgtgcatccgactttaaagacgccggtatttaatattttgttcatcgggctgatttctttgacggccatgatcggggaattagaggtcatctattcattcatcagtttcggcgcgctgatcggatttatttttgtccatttgtctgtcatcggccattactacattcggaggcaggaaaaaggctttttaaaaacgcttcgttatttggttatgccctttttaggggcctctttctgcggctggctgctgcttagcatcagcaaaaatgcgctaataattggagccggctggctgattgccggttttatatactttttgttcaggatccgttctcttccggacgtcacattcggctttgatcgcgatccgcgctag

SEQ ID NO: 2387 - DNA, 651 bp, Bacillus licheniformis
ttgaagaaaaagaaatcaggatgtttagccggagctggctgtttgtcattttttgtgtttgttccattgatcattttctttgccatctccggtctggaacaattaaaatggcttcctcttgacactgaatctaatattcttgagagattaaaagattacaagcctcttgttgaagaagaactcgataaacagggtctttcacaatacaccggtcttttattgggcatgatgtatcaagagtcaaaaggcagaggcggtgatccgatgcagtcgtcggaatctctcggcatgaagcgaaatgagattgacgatccaaaagcaagcattaagcagggtgtgcgccattttacagtaatgtatcaaaagggacagaaaaaaggcgtcgatattgaaacgattatccaaagctataatatgggggccggttatatcgactatgtctcaaaacacggcggaaagcactctgagaagctggcaaaggcattttccgaagaacaagtcaaaaagaaccccgacctgtacaattgcggcggggatacaaacaatttccgctatccttattgctacggggattactcttacacggaaaaagtaatggaacgcacaaaaaaagtcgaagaacatatcgaaggattaacacttgaacattga

SEQ ID NO: 2388 - DNA, 126 bp, Bacillus licheniformis
ttgaacattgacaaagcggctggctgggtgatttttcgcccggcttgtcctgttttggaggagcgaacgaaagcatcgcctgcagacgcatgccatgcttgtcatcagttcgcatattccccgtga

SEQ ID NO: 2389 - DNA, 987 bp, Bacillus licheniformis
atgtttgaaaataaaacgatattcattactgggggaacaggctcatggggtcaggaactcatacttcagctgctagcctcaagccctaaaaagatcattgtattttccagaaatgaagaaagacaagttcaaatgagaaggcagattgaagatccgaggctgacgtttttcatcggggatattagagatcggaaagcgctcaatacaggattaaaaggtgtcgactatgtcttccatttagcagcgctgaagcatgtcccggtttgtgaagaacagccgcttgaagcattaaaaacaaatgtcacagggaccgaaaacgtcattgaagcagcgatcgaaaacggcgttaaaaaagtcatcaacgtctcgactgacaaagcggccgaccctgccaacttctacggaatgacgaaagcgatcggcgagaagctgatcgtatacgcgaaccatctgtattcagacacgggttttatttgtgtaaggggaggaaatgtgcttggaagcagcggaagcgttcttcagctttttaaagaccagatcagggaaaagaaccaagtcgccatcacagacaaaagaatgacccgtttcttccttacgaaggaaaaaacgattcagcttttattaaaagcggctgaaagcggccaaggcggggaaattttcattatgaattcgccggcctgcaaaattttagacatggctgaggtgctgatcgaagcttatggaaacgaaataacgtccatcgcagaaacgggggcaaggccgggggaaaagcttcatgaactgctgatttcacctcatgaacggcagcatgctgtctcatttacagatgacctcgcggtggtgcttcctgcaatcaaaatgcccgagcttcataaaaagtatgcggattgccagcctttagaaacagataacttgagctcaaaagactttttaatctcaaaagaggaagtaaaagaaatgctgaaaaaaggcggttttttggattag

SEQ ID NO: 2390 - DNA, 639 bp, Bacillus licheniformis
atgaatttaaaagagatacaaggcgaatatgatgcggttttcagcctagggcatttgtgcctgacagctcttcagctgagaaaaatgaataaaagaccttatgcaggaccttttgattgggtcggcacctcgtcgctgcctgatctgtgccgcttgatacgaaaccggtttgaagggtttatgaatcctataaatttgagagtgacgggctattctacaggagttgccactaaagacccttttatctcggttacggatgattattactgcattgactcggcacacgattttaaagcggatcgaaatacactcgacaacctggctacttatcatgaagtaatagagaagtttaataggagatttaacagatttttagaaaagacctcgactgcaaagcgcgtgctgtttgtcagaacgagcggcacgatgcaggaagccaaagagcttgaagaggtgctctctgatttggttacaaacgatttcagcgttcttttgatcaatcatacaaatgtatccggtattgttgaaaatcactggccgctgaagaacgtatgcgctgttgaacttcctgatcaagaaatttggcaatcaaacgacccgtattggagagaaatgttccaaggcataacaattcgttag

SEQ ID NO: 2391 - DNA, 414 bp, Bacillus licheniformis
atgaagtctgaaattaaaaagcatttgtttgaacttctgacaaaagaggaaatcgatgtcggttggtgggataaatatttggaattgcttttcgagttccgaaaagaaagagttgaagcactggcagaaaaggcagctcagacgaattcagcagcaggctcagaagctgtatcaaatgaaaagccggctgaatccggagaggccttaaagaacgaaagctcaaccaatgtaaacagcaaaaatgaagtcttagacgaattaacagccagctttgaagaaatgaacaataaaattatagaaagcaataataaagtgcttgaagcgatcaaagagtcacttcctgaaaattacacacttccaaatgatactacattaaaattctttcaaacacaaaatgaaaccaaaacagaatag

SEQ ID NO: 2392 - DNA, 1209 bp, Bacillus licheniformis
atgaaaattcttcttgccacttattggagtattccgcacgtaggtggtgtgtggacatatatggtccagctgaaagaatcgcttgaatctatgggacatgaagtcgatctgcttggatatggagaagagaacgagattgttcatattgtaaacgaagatcgcaaggtgaaaaaagaacagcttttgcctatgattgagcaatcagtcgatcaacagtcttttccgcaattatatgacaatcaattggtccactttactgagatccagcgctatgtatacgaacttgcagctatttatttagggctggaaaaatacgacctgatccatgcccaagatgtcatctcaagcggctgcctgaaaagagtgaagccaaaagacacgccgcttgttgccacgcttcacgggagtgtagcccatgaaatcagacatcagcttacaacgatccacaggaagtctaattctgacatcgcaagggcgtactttgaccatcttgaacgggtcggcgctgtttcggctgacgctacaattgttgccaacaattggttgaagaatctgttgacaaaggaattcgatacaccggaggaacaaatcagcgttctccattatggctatgatattgacagctttctaaaacgaaaggatataaagtcagcggaaataccgcaaacagataagaaaattatccttttcacaggaaggctcgttgaaaacaaaggtgttcagcatctgcttgccgcactttcgcatttaaaagaggttcgggatgattgggtatgctggattgccggcgacggggagagaatggcgggactgagaattttatgcgggcagctcggtttggaaaacgatgtcgtgtttatgaaaaagcgcgatgatgtcccatatcttctgtcaatcgctgatgtgtatgttttgccgagtcttctcgaaaatcagccgctgtctgttattgaagcgcaattagccggacttcctattatcgtcagcgatgcagggggacttcctgaaatcgttgaacataatgtgaccggtatggtgacgcctaaaggagatgcacaggcaatatgcaactctatcaatcagttgctggaagatgagacgcttagaaaaactttaggatccaatgcacacaaatttgcaatggagtattggaatatggatgaagctgtcaacaaggttttggacatttatcaacaaactttaaaataa

SEQ ID NO: 2393 - DNA, 534 bp, Bacillus licheniformis
atgacccattcacaaaaaaataaaaactacacaggcattgttgttgctctgacgattatcataaacggcgtcattgccctcttgttttttatgccgaaaagcgacaaattcgctcatttggatttgacttttctgccgcttttgaacgcagtctgcaacagcttcacattcattttcttagtggctgcactgatcatgattaaacagaaaaacattaaagcgcacaaacggtttatttttgccgcttttacgacaacgttcatctttctcgtctcatatttgacttaccattcattgatgcctgacactcattttggcggggaagggatcataagaccgatctacttttttattttgatcacacatattgtcttgtcggcattaattgttcccttggcattgttcacgctgttcagaggcctgagcatgcaggtggaacgccaccgcaaaatcgcccgctggacgatgccgctttggctgtatgtcagcctgacaggcgttctcgtctatataatgatttccccatattattaa

SEQ ID NO: 2394 - DNA, 981 bp, Bacillus licheniformis
ttgaagaaaagaattttttctctattgatgctgatgtcagcttttgttcttgtattagctgcatgtcagcaggctgatccaaaaggatcttacgcagcggcttataaaaagctgatttctgcgaaatcatacgaattttcaagtgatatcggcttgaaagttgacgcatccaaccttggtgcggaagataagcaattcgctgacatgctgaatgatgcaacattgacgatcagcggtaaaacaaatgctgaaacgaaacagtctgaggccgttattaaagcgaagctgaaagtccaaaacatgtctcttgatttcgatattccggtttatatggatgaaaagaaacaagtcggctacatcaaaattgacagcgttcttgacagcttcggcatcttccttggaacagccggcatgaattttgacagcgtcaaaggcaaataccttgaattcccgcttgaagatgacaaatcttcatctaaagacacggatgaacttcaaaaacaattgatggaatccatcaaagaagcagcggacaatctgcctgcagataagtttgaaaaagctgatctgacggataaagaaaaagagcagggtgcttctcaaaaagtcgctttcagctttagtgacaaagaaattaaagctgcggtcgtcaagttcatcgaaatcgccggaaaagcgagcggagaagctgttccgaagagcgagctgaacaagattaaagacggactgaaagacgtcacatttaaaaaattcgatgtgacatcgacaatcgatgacaaagaaaaccttctgacagaaaatgcggatatctctttctcggttgacagcaaaaaagcgcctcaatctttcggcatcacagcatcaacgacttacaaaaatatcgatggtgacgtaaagtttgagcataaaccgaataaagaagatatcgtaactgaagaagaattcgaaaaattaatggctcaagatgctatgaatttctaa

SEQ ID NO: 2395 - DNA, 510 bp, Bacillus licheniformis
atgataacggatgaagaactgcaaaaagacagctccggcttgcagaaggaattgaacgacctgcaatttcaactgtttcggatgcgtgaaaatatgaaggatatctccaaagattcgcgagtgctcggtattgatcaatcgaaagacgatgaatggatgattgtccattcgattgatgatggccggacatgcaagatcatgttaagcgattgccagtcgccgtaccgcgggaggtgtgatttttctctcgtcgcttcctacacagaagaaaaacgcgcgatccatattggggatattaaaggaccggcaggctttggatatggttcaatctgtatgaagtatttaaaggaaaaagcccgcgagcataacatccccgtcatcaccggggacattgctaaaagggattgggaccatgtggaccggctgatccatttttacgaaaagcatcattttgaagtaacgatcgatcctgattcaaaatccggcgaaattcagtggcaggatctttaa

SEQ ID NO: 2396 - DNA, 1590 bp, Bacillus licheniformis
ttggtgtggattatcatgacatttttattgattaatgcaggaatttttattttttcttatttgaggacaaaagatattgatttaaaaacgtcagacggctattttctcggcgggcgcagtctcactgccctctatatcggaagttcgctgcttttaaccaatttgtcaatggaacaaatggttggattaaacgggcaaagctattcgggaaccatgagtgcgatggcgtgggaggttacagcaccgcttgcgctcattatgctggcatttgtctttttaccgaggtatctcagttccggagtcacgacgatacccgactttcttgaaaagcgctatgatcaaagaacgcggcaaatcgtctcgatcctgctgcttctgggatatgcgacctcgtttctgccaaccgttttgtactccggggcgctcgttctcgatcaagtattcaacatttcatccgcgcttgggatcaatacgttagtgactgtttttttaatctcgcttgtgatcggcgccgcaagctgctgctacatatttttcgggggactcaaagccgcggcctcggctgatgccatttatggcgtcggtttaattcttggcggtctgttcatctttgtgctcggaattatggcaataggagacggcagcctcttgagcggctatacagagctgacgagtgtacataaggaaaagctgaatgccattacagcggacaactctgcagaagtgccgtggccgacgatttttacaggactgcttgtgaacaacttattttattgggctgttaatcagtcgatcgttcagcgggcgctcggagccaaaaacttggctgaagggcagaaaggcgcattgctggccggtgtatttaaaacgatcggtgtgttttatctcgttctacccggcgttattgcttatcacctttacggaggccatattcaaaacgctgacaccgtttatccgaggctgatcgttgatttgctgccgactgcactgattggcgtctttgccgcgatcttattcggagcgattctcagctcgtttaacggttcgctgaacagtacgatcacgttgtttacattggatttatacaaaccgctcttcaagccagaggcaaaagaggaagagctcgtgaaaaccggaaggatctttgtggtgatcctggccgcggtatcgattatcatcgcaccttttattttgtttgcgccgtctggcctttacaattatctgcaggaaatgttcggttttttcaatgttcctgtattggctgccgtcgtcgttggatttttttcgaaaaaagtgccggcgcttgcagtgaaatgggcgatatttgcacacattgtattgtataccatctcaaaaatctatttcggccatattcattttctatatatattggctgttctgtttccgttttccgtcctcttgatgcttttcatcggaagattgaagccaaggccgtcggaattcaagcttgagaaaaatgccaaggtagatttgcagccatggaagcatgccaaacttgcttctgttcttgtgatttgcctgatagcctgcatttacctgttattttcgccttgggggcttgccaaataa

SEQ ID NO: 2397 - DNA, 807 bp, Bacillus licheniformis
atgaagaagacgtttatgtcctttgttgcagttgcagcattatcttcaactgcattcggagcgagtgcctctgcaaaagaagtaacagtccaaaaaggtgacaccctttggggaatctcgcaaaaacaaggggtaaatctgcaggacttaaaagaatggaatcagctttcctctgacttgattattccgggacaaaagctgaacgtttctgaaaaacagacagaagaaaagaaacaatataccattaaaaagggagacactctctggaaaatcgcccaaaaattcggcgtttcagtgaatgaccttaaaaattggaacaacataaaatcagatatcatttacccgaatacatccataactgttgacggacaggcgacggtccaggctgctgcggcgcaacctgcggaaacaaagcctgccgtacaaaaagaagcgaaagtcgagaaggctgcgcctgcccctgcacctaagcaggaaaaagaaccggcttcccgttcaaacgtatctcaaagcactgccaaagaactgacggttacagcaacggcatacactgccaatgacggcggtatgacaggcgtgacagccacgggtatcgatctgaaggccaataaaaacgccaaggttattgcggtggatccaaacgtaatcccgcttggatccaaggtgtatgtggaaggctacggagaagcgaccgctgccgataccggcggtgcgatcaaggggaacaaaatcgacgtatttgttccaagcaaatccgcagcaaaaaactggggcgttaaaacggttaaagttaaagttttaaaataa

SEQ ID NO: 2398 - DNA, 1782 bp, Bacillus licheniformis
atgctagagaaagccgaagcactattgcagcactattttggctatccttcactgcgcccggggcagaagaaagccattcaatctgtcgtttctgaaaagcgagatacagcatgcattatgccgacgggcggaggcaaatcaatctgctaccaaattcccgcgctccttatggaagggacaaccattgtgatctctcctttaatttccttgatgaaggaccaggtggatgctttaaatcagcttggaattcaagctgcgtacgtgaacagttctttaggccataacgaaatcgctgagcggctctccgtatttaaggaaggcggctacaagctcttttatgtaacacctgagcggctgacgtctcccgaattcattcgcgcgatttcccacattcatattccgctggtagccattgatgaagctcattgcatttcacagtggggacatgatttcaggccgagctacagacatattgaaggctttttaaatagcctcggcacccgcccggttgtattggcgttgacggctaccgcaacgcccgaggttcatgaggatatttgtacacagctcgggatcgaaaaagagaacacggtttttaccggtttttcacgggataatttgacgtttaaaattttaaaaggcgaaaacagggaccgttttatcgaatcatatgtggagaaaaaccgctcagaggcgggaattatctatacagcgacaagaaaggaagccgaaagaatatcaagccgcctctctcaaaaaggaattgcggccgggtgctatcacggcgggatggatgatgaagaaagagaccggcagcaggatctctttttaaatgatgagatcagtgtaatgacagcgacctcggcgtttggaatgggcatcgataaatccaatatccgctatgtgattcatgcccaaattccaaaaaatatggagagctactaccaggaggcgggacgagccggacgcgacggccttgacagcgagtgcatcctgctgttttcccctcaggacattcggcttcagcggtttttaatcgaacagtcgacagaagatgaagacattcgggcgcaagacgtgaaaaaactgaggcaaatggttgatttttgccatacggaaggctgtctcgaacggtttattctttcttattttggcgaagttccaaccgaagactgcggcaggtgcggcagctgtctcgacacccgaagcatcaccgatgtgacgaaggaggcacagatggtactgtcctgcatcatccgcatgggagaaaggttcggaaaaaccatggtggcgcaagttctggcaggttcgaaaaataagaaagtgaccgaaaacggcttccagcaattatcgacttacggaattttaaagaaacggtctattgccgacataagcgattttatagagtttttaatcgcagatgagtacatcaaaatgtccgacgggacatatcctgttctctttgtcgccaacaaggggcgaaacgttttgctcggccgggaagcggtgatgcgcaaagaaaaaatgcaaacaaatcaaatcgttaaagatgacgaattgtttgaacggttaagggcgctgcgcagaaagcttgctcaggaacaaggcgtgcctccttttgttgtattctctgacgaaacgctgcgggaaatgagcgggaaagtccctctgacagacgaagagcttttgtcagtcaaaggagtgggagaacaaaaaagagtaaaatacggagctgtatttctacaggagcttcaagcctataaaactgagaaagaagcataa

SEQ ID NO: 2399 - DNA, 519 bp, Bacillus licheniformis
atggattggcttgaatttgtttctgcgatggttcaatcattggcatggccagctgccttgatgatttgcgttttgctgctaaaggagcctttgtccgatcgaatgaaggaattgatcaaactgaaatataaggattttgaattggagtttgacaaaaggcttcaggagctcgtctccgtacgggaaaaaagattgtcgggactgatttctgtacggtcagcgcagcgaggggataacttgatcgaaagcgcttggtcagatgttcacaatgttctgcgggaaacagcctcaacatttgatcaagatgcgatccgcctcgaaggcgatgaattgattcaaatgctgcatgaccgcggaattttacaggacgacgcggcatctgtgctgtcagagctatccgctctgcgccgcgatgcatcagacggagcgagtattgccggagctttggcatacaaaacgctttgccgggaggaagcggagcggttgcgattattagctgaacaacagaccgggatttaa

SEQ ID NO: 2400 - DNA, 135 bp, Bacillus licheniformis
atgtggttcatcatcatactgatgatcattttgattggatttgcaggaaacatcgttgccatgttgcgaacgattgtaaagcagaatgatagaatcatcagcctctttgagaatgaaatcaacaaaaaccattag

SEQ ID NO: 2401 - DNA, 174 bp, Bacillus licheniformis
ttggatattgctgttttatcaatggccatgagtcaggcggctctttatcaaaacgtgcaaatgtcgctgacaaagacggctttggataccgccgaacaaagcgcacagcagctcgtagacatggtgcaggcgccacatcccgtttcaggacatcatattgacttgaaaggctaa

SEQ ID NO: 2402 - DNA, 354 bp, Bacillus licheniformis
atgttaacaagagaagatatctttaagcacgtcaaagaaaaattcgggacatcgccagattacccatttcaaaaatttccaaactatgccgctttaagacatgaaactaccgaaaaatggtatggtcttgtaatgaatgttcttccggaaaagttaggcttagatggaaatgacgaaatagatattctgaatttaaaatgccctccagaaataagtggcagtttaagaaatggaaagagtattttacctggttatcatatggataaggaaaattggatatcaattgttttagaacgaatagattcagaagaagtttataacttaattgagcaaagctttaatttaaccaagtaa

SEQ ID NO: 2403 - DNA, 232 bp, Bacillus licheniformis
aggttcttcatgttgaggaagacgattctgaatgatgaaatggcagctgatcaatttgatgaatttttaagagacgtctttcagaattactcaagaaatggaagataaagccgcgatttatgtgtttcatccttctgcctatcagatagcatttgaaaatgagatgaggagtgccggtttagacattcgcactcaatgtattagggtgaaaaattcgcctatgtttggatag

SEQ ID NO: 2404 - DNA, 367 bp, Bacillus licheniformis
aaaattaacccggctccatacaatccacacttgcagccgggtgcttcagaatatgaaacactgaaacagtctatgaaacgcttttgaacagttgaaccgttagtctggaatgaaaggattggcaaccttgcaggcggcaaccaacgctttaaaatcctcatggaaaaaggaccaaagactctcctggtttcagttgtaaatctggatgaggctgaggaaaaataagatctgcggcgactgggatgaggaaaagctccagctgcatcttgctgaattaaataacacttttaatgacaggattttcgggagaagaattagtggagctccttttagatttctcgggagattcagaggttcttcatgttga

SEQ ID NO: 2405 - DNA, 966 bp, Bacillus licheniformis
gtgtctacattagctattattgttcttcttggcttttctggttatatgatctggaaattaaaagagacaaaaaaaattcatcaaaacaatttagaacgtgaattaaaaaatctagagcaaacatatcaagatcacctggtgcaagctcataaagaggcttccgctgctttacaacaagctgaagtcatgaatattaatcaaaaaaatgaattcttaaatgaaaacgattttctgaagaacaagattgtaaagatggatgaatatataaacaatcttaaaaagtattcaagaaatagcggtgaagttattacccacactattttaacggaattaaaagaaaagcttatttctgaggggaaaataaatgaaaacgagatggttataatgggaaacgtatttgtaccctatgaagaaaatggggagacaaaaaccaggcaaattgatcatttagttattttgccatcagatatctatattatagaaaccaagtattggcgtggaacagttatccatgggattaatcgtaaaaatgcggaatcaattgcaaatgatttttcatttgtctttgaacaattatttccgaaagcgaatagtgatacagagaagacaatcatttttatgaaaaatagcaatatagataaggattccgagcaaaaaaattctataaatatttcttattatgataacccgagaaatcaagtcatggacacaatgtataaactcaggaattttctcataacctataataataaattcaactatgttgagcctatagtctattttggttatccggaggacaaagaaaatcgtgtaatagattattctacaaaagataagaatagatttacctcaaaagcaagtttgtgcgagtattttaagaatgaggttttaaagcctgctaaatatacagtcgatgagatacaacaaataaaaaggatcatgcaaaaagttaactatctatcataa

SEQ ID NO: 2406 - DNA, 550 bp, Bacillus licheniformis
atggctagagcgattaaacgaattcagaaaatcgagataaccgaagaggaccagagaaagcgtgatatgaaagaaatagaggatgcattagtcgaaaataaggaagccattcttgaaatgctgcatatgattggccacatgaacgagcgtggtgtattgccattgctgcgcggccttttggccaaggagataaagttcttgacatcttagtgaaaaaggcagatacagaggaaacggccaatacactgaaaaatctgcttcttctgttcggaacgcttggcatgctggatgtaaaacagcttgaacctctcattttgaaagtgaatgcgggggtggcaaacgcggtggaacagaaggacagcgaagagaaaacaggttattttgatatcatccgctcgctcaaagacccggaaatcaacaaagcagttacgctgcttttctcctttttaaaaggaatgggacaagatacaaaggagctggaacgcacgactcagcctccagagcaccaaaaacatcatcaggaaccccgagagaaaagggggatgaataa

SEQ ID NO: 2407 - DNA, 2272 bp, Bacillus licheniformis
ccgatcaatgagtcgtcgtgtgtatcatgcggccattgttctaccgtctgttccaaatgacgcgcgggcgtttccgctcccagtcaatggtcagtgtttcagtcacctgaacgtcctggcatgcttcaacacaacgcccgtctggacaaagggcagagatattctgaaagtcgagccgcaggaggaagcaccggccaacggcatttctacttgtgtaaaaggaaaattcggctgggatttcgtcaacagcgaggagcgcttgacaaagccgctgatccgcgaaggcgaccatttccgtgaagcggaatgggaggaagcgttaacgctgatcgccagcaagttcatggatttaaaagaggagtttggcccggattcacttgcctttattacatcttctaaatgtacaaacgaagaatcctacctcatgcaaaagctggcgagagggatcgtcggcacaaataatgtcgacaactgctcgcgctattgccaatctcctgcgactgccggcctgttccggtcagtgggctatggcggtgactcaggatcgattacagatatcgcgcaagcggaccttgtgttgattatcggttcgaacacgtctgagtcgcatccggtcttgtccactcgcattaaacgggctcataagctgagagggcagaaagtaatcgtagcggatatcagaaaacacgaaatggcagagcgatctgatctgtttgttcagccgcgtgccggatcagatatcgtctggctgaatgccatcgccaaatatttaattgaaaacggcaaggccgatgaacgctttttgcaggaaagagtgaacggacgagatgaatatgtgaaaagcctcacgccgtatacccttgaatatgccgaggagaaaaccgggattgatcaagaaaccctcatccaaatggcggagatgattggtcaggatgacagtgtgtgcgcattgtgggccatgggggtgacacagcatattggcggaagcgacacgagcacagcaatctctaatctgctgcttgtgacaggaaactacggaaaaccgggagcgggctcttacccattgcgcggccataacaacgtacagggagcaagtgacttcggaagcatgcctgacagactgccgggctatgaaaaagtgacggacgaacaagtccgccaaaaatacgagcaggcatggggtgtaccgctgccgaaggagccgggcatgaccaaccacgaaatgatcgaaaaaatccactctggccagctgaaagcgatgtatgtaaaaggtgaagaaatgggtctggtcgattccaatatcaatcatgtacacgccgcatatgaaaagcttgatttctttgtggtgcaggatattttcttttcacgtacagccgagtttgccgatgttgttcttcctgcgagcccgagccttgaaaaagagggaacctttacaaacacagaacgccggattcagcggctttatcaggtgtttgaaccgctgggcgaatcaaagccggattggcagattattatggaagttgccaataagcttggcgctgactggcactatgagcaccctgctgacattatggaggaagcagccaagctgtctccgatttatgcgggtgtcacctatgaacggcttgaaggctacaattccctgcaatggcctgtaagcgctgatggaaaggattcgcctttactttttactgagcgcttccctttcccagacggcaaagccattctctatcctgtgcattggacagaacctgaagagttcggagaggaatatgatatccacgtcaacaatgggcggctcttggagcatttccacgaagggaacctgacctacaaatcaaaaggcatttcaaagaaaacaccggaagtgttcttagaaatttctcctgaactcgcggcagaaagggggattcaggacggaacccttgtcagactcacatcgcctttcggaaatgtcgaagtgaagtgcttgatcactgatcgtgtcaaagggaaggaagtatatctgccaatgaacgattcaggagaagcagcgatcaacctgttaacaggcagccatgctgataaggataccgatacgcctgcgtacaaagaaacatcagccaagatggaaattttgaagcgcgacggaaacaatccgctgcctaagatcaatcaccgcaacggcaatccgcagccgcaaatcggtgtgcaggtacaaaagaaatgggcgcggaaggattatattttccctggcgacgctgtgaaaagggggattgggcataatggctag

SEQ ID NO: 2408 - DNA, 120 bp, Bacillus licheniformis
ttggcttttggcctttcaaggtttttttatattcaaacccgagaaaaatccgacaaaaagggggataaaataggggactttttcttttccactttgtcatacgatagagccgatcaatga

SEQ ID NO: 2409 - DNA, 256 bp, Bacillus licheniformis
atggacttcatttatgtggaagtactcaatgattcaaatattactaagtacatttcgttattaagaaaaacatcatctaaacctattaacgaactaaagcaggcgattgaaacaggaaaaccagttattgaatgtgattactatgacacagaagaattgaaatcactagtaatcattatagaacagttactctcattgggagctagcattaaaatttatgaaaatgatagagaaataacacttgagatgtcttgat

SEQ ID NO: 2410 - DNA, 120 bp, Bacillus licheniformis
gtgacaaaggtgaagttatatatccagcaacaacaagggaacatttacacagatggcacggagggaaattacaaaaatagccttccgggaaagccgattaaggatattaaagatttttaa

SEQ ID NO: 2411 - DNA, 261 bp, Bacillus licheniformis
ttgcagctaagcgagataaaggtgctaagactttttaaacaagaatacttaatggtgaagctccaacaagaaattggttcaaaggagcaggcgcaagatattataaacaataagagagcaaagtatgaagggaaaactatgcaaggacatcacagttatagcgcttctaaattccctcatttaagtgacaaaggtgaagttatatatccagcaacaacaagggaacatttacacagatggcacggagggaaattacaaaaa

SEQ ID NO: 2412 - DNA, 297 bp, Bacillus licheniformis
atgaaatctaaaatgaagatcggtttagggattatgataattggacttggttttctcagtcatttttcgaacaacgatgatatgaacacagcttcaagaaacatcacagcgcaccctccagtcatgattttgttgtttaacctaaaagagtttttggaatatccttttagccgttttaatagcggcttttttttatatatttcaaaccctcaacaaaggtttaatgacctgatcccaaggattcattttcacggattgtcaggatttattaaccaattcctttccgtaaagtggtaa

SEQ ID NO: 2413 - DNA, 666 bp, Bacillus licheniformis
ttgttatctttaggaaatattttaacaatagaatttgaaaacgaaattcaagagtatgtcctcgcgaaaagcaaagtgctatccattgaggacaatgttttaagagtacattatcctgttgatgaagaaacagggagaactgttattattccaacaaatacagtagcaatagttcactttataaatgagcaacaagtcccatataaatttaccagtgtaatacagggacgagagatctatcaggatatacctgtattaaatatgtatttacccgaagaagatcaaatgacaaaaattcaaagacggcaattttttagagtaaatacaacgattcctgtcactgtccgcccatatggatctggttcaatgtttaaaacatatacagcaaatatcagtgctggaggcgctgcgttaattattgaagagacgcaaatacacgaagcggaagaggatttaaatttaagcattcatctgccaaatgagggacatgatgaaaatgtgattgacgtttatgctcaagtcaaacgcacttacatagatcggagaacaaacaaacagatcatgacagttgaatttatcaagatggatgaacatgatgaacaagcacttgtacattattgcataaaattgcaattggaagaaagaagaaaactgaaatctgattag

SEQ ID NO: 2414 - DNA, 117 bp, Bacillus licheniformis
atggacatcactctttcaattctacttaatcattatatcggtactatgacacataaatttaaaaaagaaaaggagaaagcattgagaaattacgtaaacggaccgcttctcttgtga

SEQ ID NO: 2415 - DNA, 108 bp, Bacillus licheniformis
atgggagacacacctatccctgaactgaatgatgataagatcgtcagtctcacaagagaagcggtccgtttacgtaatttctcaatgctttctccttttcttttttaa

SEQ ID NO: 2416 - DNA, 180 bp, Bacillus licheniformis
atgttagtgttttttgaagtcggtgaggggacatatctgactctagatttagatcaggaagaagagaacggtatttgtccagtatactattttgacaagataattgcggcatcactcgaagagttttcaagaaaatggatgaagaagaaccagactattatattcatgcctaaattgact

SEQ ID NO: 2417 - DNA, 186 bp, Bacillus licheniformis
atgaagacattggatgttcaggcgctgcacaaagcgctggaacatttaaaacatcaatcagacgaaattgctaaagtcaaaagcaaaaaacatattatatatcgactggaatataatgttattgaggcggaagatagattagaaaaaattcccaatgaactaagagagttttatttaagagtatga

SEQ ID NO: 2418 - DNA, 279 bp, Bacillus licheniformis
atggatcaagaaataaaagtgaataccggagaagtcaaacaagcgctctctaaattaaagcattccagccattcaatgaaagcgacgattccgacagatatcaagggccagaatcaccttgatgcgacaaagaagatagaggaactgaatcagacgattaataagatcgcttcttcctatgcctctgctttctcaaaacaagtcgtccaaacggaatcagcagtcgaagcaatgatggacaccgacaaacagctggcttcatcgatgaaaacaaaatag

SEQ ID NO: 2419 - DNA, 333 bp, Bacillus licheniformis
atgaagaaagaatttttggcagagctgaaagcttgccgcaaagagctggaaaaagacaaaacagagttctctgattcgaaaaagacgatcaccgaaccacagctgtcgtctcatacgtggcaaggcagtcttgctgactcctttgaccgtattcgaggtctgatgaagactgcttacaatgacataagcggaaaacagctttctgatgttttaagcaaaatcgatgaacgaatcaaatctttacaagaagatattcactcgctcagccaggaagttcgttctttagagaaaaagattgagaacgcgaagcgggaagcacgagacaaggagtaa

SEQ ID NO: 2420 - DNA, 144 bp, Bacillus licheniformis
atggagtctaaaatgaagatcggtttaggtgttttgataattggactcggctttctcagtcattttcgattttcgaacaacaatgatatgaacacagcttcaagaaacaccacaagcgcacccagtcacgattttattgtttag

SEQ ID NO: 2421 - DNA, 108 bp, Bacillus licheniformis
ttgaactctggaaccaatcttttcatgcctgtttatgcttttttgtttctatatgatgaaattgtcgttttcaatgatgcatatgaaccaatagctgcgcaaccatag

SEQ ID NO: 2422 - DNA, 288 bp, Bacillus licheniformis
gtgcctcaaaaaaatggagcagacagaccggatgattacaaaagattttcttcactagacaaggaatatgattctcagcaatctttagacagcaatgctaagacagaaaacgtaaacactgaaactgataacaaagaaaacacaactgacactaccgatgtggccggaaaatatttcgacccttcggattatgaaggggctactcaattggaaaaaggattagctgaaactcatgaacaggtcagtgatgactattttgaaggaacgatcgatcaaaatttggattag

SEQ ID NO: 2423 - DNA, 1203 bp, Bacillus licheniformis
atgaagcttagcacttataagatctgctttttatttcctatcataattctttttttagctggatgctggagcagccatgaaattgaagaacttggcttgacttttgctatagggtttgatgaaggccgagagacagaccttgaaaaaaaatttaataaaatgggcgtggattatccaaaaaaaaatcgagtaaccttgacataccaatatgtcaatccgtacacagcaggggctcagattgccgttggaagcggcagcagccaacaaccttacattaacgtatatggaacgggtgattccttacagcaaataggcagtgaaatagcactcaggcaggacaggccggtcttcagctcccacttaaaggtgatcgtcattgctgcggatttgcttcgtacttattcactaaaggaattgcttgatcagacgcttagggacaatgaaatcagactgagtacgcttgtccttgtaacaagaggaagagcaagtgatacacttgaactgaaagacggcaccggtaaaatacccgcatttcaccttaccagaattattcacaatgactttagggcgaaaaaaattctgcccccgatcactcttgccaaactgccgggcatgatgaaggccggaaccagttatttgcttcaaaacatcatcggtgccgacggggaagtcaaatatgcaggagctgttgccattaacggaaaaacaaataagctccttggttttttagatgaaaaagatttagacgggatcatgtggatcaaaggacaaggggtagggggcactgtcaaaaactatgatcaaaaaacaaaaaaattgacggccatgtcagtcgatcaccttaagagtgagatcaagccagtcttcaaaggaaaccgcctctcatttaaagtgaatattaattcagaggcacacctggctgaaaactggaatacaaccgaaacggcaattgacaaaaaatatttgaaaagaaaggaagaaagtgcgtcacaaacagtgaaacagctggtagagcagatcacagaaaaaatgcagaaggaatataaagccgaccttgccggcttcggtgatgaagtgaggatccactatccctttctttggagaaagctgaagaaaaattgggatgaagtattcacagaaacccccattcaatatgatgtgaacatcacgattaaagaatttggatcacaaagtagacattag

SEQ ID NO: 2424 - DNA, 147 bp, Bacillus licheniformis
ttgtgcttatcctctgaaaaaatttccatctttttcaactcgtctatgctacaatggaaatggaaaaaggaggggatattaaatgaaacgctttttgctgatgatggtgttgatttgtggatttttcagttttgtgagccgcgctga

SEQ ID NO: 2425 - DNA, 222 bp, Bacillus licheniformis
atgaaacgctttttgctgatgatggtgttgatttgtggatttttcagttttgtgagccgcgctgaagcctattcgttcccgcacaagctgaatttaacgtttacggggactcatgtggaggacattcccgatagcgacttaacgtttctaactggcatattggctataagtttacgattttcaatgcagaaaactgcaaaacaacgattaagattcagatga

SEQ ID NO: 2426 - DNA, 258 bp, Bacillus licheniformis
atgagtttaagcattaaagattttgaaggggactggcctgaccgaaccgctcaggatgtcatcacgttgatgcctcgaacctacaggctttattttgaaaattccgaaggcgaatgtaaggatattcgcattaaaggaacatacggggccattccgcaaacttatgattatttctcggccttcaaaaagactccgggaaggacaacctttttgccaaatagatacgaacaacaaacggatgaggggggacgcatttga

SEQ ID NO: 2427 - DNA, 843 bp, Bacillus licheniformis
ttgaaaaacttttggacatacgaagacgaagatccatacaaattaaaaagcatatcagagagagatattcaaaaagctgaaaaaaagttaggtgtgaaacttccggaggaatacaaagcgcttattcttgaacaaaacggcgggtatatcaattttaacgccttcccttctgaacggcctacctcctgggctaaagatcatgtccagtttgactacttattaggcttagggaaaaaggcagggattctcgagagcaaatacatcattaaagaatgggaactgcccgacaacctgatccttattcacggtgacggccatacatggatagcgcttgactacagagaaacgaaagaaaatccgcccgtgcactatttcgattcagaatttgaagagaattataaattagcggattcatttggagaatttctctctaaactttatacagataatcccatggatgatgacgactgccagcttatcgaaggcgtgcatcctgacattccctatgtctatccggaagatgccattacaaaagaagaagctgaacaaattctgactaaaaattcggcagccgagctgcatcagcttaattactaccctattgaaagtattgatgatttaaaatggcttttgacaaaaatgaaaaaatccgctttaaaagcagaccgtgacactggtttggcacttgccggcgctttggaagccgtcatttcttactataaaaatttaacgtttgaggatgaacaaacaagaaggtcagtccgcgatatcttggtgatattagagaagttgaatgactctactgtagacatatacttatcccaaattgacgacttattttaa

SEQ ID NO: 2428 - DNA, 1349 bp, Bacillus licheniformis
atgcaaaaaacgctttttcaaaacgctacgattgtgacgcttgatccgcagcttcatacgctcgaaacaggggacatgctgattgaaggctccgtcattctggacgttgccgagtcgattgaagccggagacgctgagattgtggatgcctccaatatgctgatcatgcctggatttgttgatacgcaccgccacgtatgggaatctgtgatccgcggaatcggagccgactggtccctgcaaacctatttaaaccggatttattatgggaattatgggtcgatgagaagacctgaggatgattgggccgcgaactatttaggagcgcttgaggcgctcgatgcaggcgtcacgactttgctggactggacgatgattgagtcgcctgatcatacggaccagctgattgccggactgaaagacgccggcattcgcgcagtattcgcctttggaacatctggtgacgccgaatattgggacagagacagcgatctttcgaatatggacgaagcgaaacgggtaaaaaaagcatattttcaatcgaaggatcagcttctgacgatggggcttgcaattcgaggtccggagttttcttcatggaagacatctgtctttgaaatcgaaacggcccgggaactggatgccttatgcagcatgcatattgcttttggcaactggggagcgaaagatcgttcgattgaaaagctgaatcaagccgggctgcttggtcccgatttaaacatggtgcatgccaatgcgatgagtgaagaagaaatgaaaatgcttgcggctcacggaagctcgatatctgtgacaccagaaattgagatgatgatggggcacggctatcctgttacagggctctctctaaaaaacggggttcttactgcgcttggggttgatgttgtcacatcgaccgggggagaccttttcgcacagatgaaatttgctcttcaagcagaacgcgcaaagcacaatgatgaactgctgagagaaggaattatgccggggcccgaattgagcatatcggccgaacaaatcctgaaagcggctaccattgacggggcgcgcgccctaaagctcgatcataaaatcggctcgctttccccaggcaaagaagctgactttatcatggtgaaaacggacagcgtcaatttgctccctttcactgatgcggcgggggccatcgtccaatgcacgcacaccgaaatgtagattccgtatatgtcgcaggaaaagcggtgaaacgaaacggccggctggttgatgcagatcttgaaaaggtgagacaaaaagcgctggaagcaagagatcatattttatcccgatcccctgagggcgccttttaa

SEQ ID NO: 2429 - DNA, 247 bp, Bacillus licheniformis
atgtattgcaaacatcatgagccgcatgtttaccctacgaaatattgtgaggatcatcattactcaaaatctgtcgttcctcatattcatccagcatacaaaaaaaatagaccaccacaagtatgaacatgttcattactatccgcacacttactcacatcataaagatgtttcacatgaacactatcattgcggaaaaccttgcaaaagctatgaaaaaaaatcggattacggacattgctattaa

SEQ ID NO: 2430 - DNA, 210 bp, Bacillus licheniformis
atgaagtcaatccaatcaatcaccgttcattcaaagcaatatatcgtcggtgagcgatgccatccgccaggatttagagacgaagcgaccgtaatgaaaattacagaaaaaaacaagttctatggattaatcagaggctttgttgttcattttgatacaaaaacagagctgcatattcatacagagcccgtcaatgttcattggaggtga

SEQ ID NO: 2431 - DNA, 783 bp, Bacillus licheniformis
atgggatattttatcgaggcagaaccaagcgttaatctgtacgttgaagacatcaatcctcaaagcggcaaagccattgtatttttgcacggctggccattaagccatctccagtttgaatatcaatttgacgatctttcgcgaaagggataccgctgtatcggcattgactggcgtggattcgggcgttcggataagccggcgacgggctataattacaaccgtttggctgatgatatccgcgctgtcgttgaggcgcttcaattaaacaacttcacgcttgccggtcattcaaccggcggcgccatagcactccgctatatgtcccgatataggggcgctggggtctcaaagctggttttgatcgatgcggcggcgcctgtgggatttactgaagaaacggcagccaaattgcttcagcaagcgtctaacgatcgtcccaagatgatgcgcgaagtgaccgacacgtttttctttcaatatattacacaaccgttctcagactgtttttttcaattgggattgcaggcggcaggctggtcgacaaaagcggtcatcgaaatgctgagagatgagaaactgtatgatgatccggaaaaagtcgctgctccagccttaatcattcacggtattcaagacaaggtgattccgtttgcacaagcaaaggagctcagccgcaaaatcagaaattcatatcttgttccgtttcaatacagcggacacggtccattctgggaggaacgcaaaatgttcaatcggattttaacgcaatttatcggttga

SEQ ID NO: 2432 - DNA, 492 bp, Bacillus licheniformis
atgatggcacttctgagaagtctggcgatatcgtttgtcctcattctgcctgcggcagcggcctacgcacaagtaccttatccatgcagcgtcgttcttgatccagtccgagatattcccaatgcccgcggaacggctttaattgcgaaagtgaagaaaccgtataccgaagcccccgggagtcctgtcagggaaaggcagagtgtcggcatctacgctgattggcttccggaccctgcttcatttggagattatgatcaatttgaaggaattgcccggatacctgaccagatcagctggcgtttcaccatgcatcaagtccaagaagacgcgccgagctggtttggcggaagtccttgggcgggcaaatttgacgaaatatcatcagagctgactgtgaatacccaagtcgaagtgcgccctttcaattcgaagacgaaaaaggccggcgaagctgttttgcgtgggaatttgcaaggatgcaggagctaa

SEQ ID NO: 2433 - DNA, 237 bp, Bacillus licheniformis
atgtcttactgcaaaccgcgcgttctgccgccagttgtgcatcctactagatactgtgaggatcacagattctctaaaacgatcgttcctcacatccatccgcagcatattaaaaaagtggatcatcataaatacgaacatgttcactattatccgcactcttattcaagctataagccggtttatcatgaccactcttactgcggtaaaccttgcgatcgctacgaaaaatactaa

SEQ ID NO: 2434 - DNA, 624 bp, Bacillus licheniformis
atggacgcgatatcgatcgtttcttttttgggtgcggccgtactgctaacacttatgccgggccctgacaacctgttcgttttggcacagagcatatcaaagggaaaatcggcgggtatagcaaccgcatccggactatgcacagggctaatcgtccacatcacggcggctgcagcaggcatttctgctgcgatctatcaatcagctgtcgccttctcgattgtaaaatatgcaggtgcagcctatctgctgtttttagcttaccagtcttttcggcaaaaaagcgccggtttcaacgttgaagccaaagattcattgaaccgcagggctttatatcaaaaaggcgtggtgatgaacctattaaacccgaaggtctcattgttcttccttgcctttcttccgcaatttatccaccccggcaccttcaatgtgacaacgcaaatgcttgtttacggcatgttatttttgattcaagcgttcgctatctttgtgatgatcagcctgtttgcggaaaaagtcggagaccggctgcgcagaaatccgcaagccgccaaaaaagttcatttgctggaagggtctttgttcgctttgatcgggcttaaaatagcggtcagccaaaggtag

SEQ ID NO: 2435 - DNA, 129 bp, Bacillus licheniformis
gtgtcattgagaccgtttactaacgaagacgacggcggaaatggtaaacgcgtcacatttataagcaataaaatcgggaaaaggtgtgcaggctgcataccttttttcagcggttctacctttggctga

SEQ ID NO: 2436 - DNA, 186 bp, Bacillus licheniformis
atggccaagacttcaatgattgtcaagcaaaaacgggaacaaaagttcaaagtcagagagtacacccgctgtgaacgctgcggcagaccgcattccgtgattcggaagtttaaattgtgccgcatctgcttccgcgagcttgcttacaaagggcatatacccggcgttaaaaaagcaagctggtaa

SEQ ID NO: 2437 - DNA, 474 bp, Bacillus licheniformis
atgtcgcaaaatggaattgttttagtagccagtgtatctatctttagtgatgataaagtcttgatgataaaagagaataagcctacttctgttaataagtggaattttctgggcggacgtatcgaatatggagaggacattctctattcagcccgaagggaagttaaagaggaaactggattcgacgtaaatctgattgccactacaggtgtttataattttatcagtagtacgaacaatcaagttattttatttcattttatcggcgaagttactggaggttctttaaatctcgaagaagatgaaatttcagacagcaagtggataacagtaaatgaccttgtaacatttgaaaacgaaggcttacgagaaccgaatgtaataaagcaaatcactgatagcttattaaaagagaatttacactcaattagtgtgtataatgagcaactgattaaatcgttcttattgagctga

SEQ ID NO: 2438 - DNA, 2667 bp, Bacillus licheniformis
atggagaaatacgtgctgtatttcaatgaaatcgatcaatttgacttgccctctgtcggcgggaaaggggcgaaccttggggaaatgacaaaagcgggctttcccgttcctcagggattttgcatatcaactgaagcctaccgtgcgttcatacaaacaagcggcatcatcgacagtctgttcgatcagcttgaacagctcaaacatgatgatcttgaacagattcggactgtggggaaacaaattcgtgagcatcttgctcagatctccatgcctgacgagatcaaatcggcgatattggagggcatagatacgaccggcaaagataaagcctatgccgtccgctccagcgcaacggctgaagacctgccagatgcttcattcgcgggacagcaggacacctttttgaacgtctgcgggaaagatcagcttcttgaagcggtgaaacaatgctggtcctcgctgtttacagacagggcgatttcctaccgagcgaaaaacggtttcgaccaccgctctgtctttcttgcggttgtcgttcaagagatggtttttcccgaggtttccggaattatgttcacggcggatccgatcacggggcaccgcaaaacggtatccatcgatgccagcttcggcttgggtgaagcgttggtgtccggcgtcgtcagcgctgatctgtatcagattcggtctggtgaaatcgttaaaaaacaactctctaagaaagaattggccatttactccgtaccagagggaggaaccgtccagaaaaccctctctccggaaaaacaacaaacacaggctttgccggatccaagaatcattgaattagcagaactggggcgcaaaatcgaggctcactatggcaaggaacaggatatcgagtgggcttttgccggcggcaggttttacattcttcaaagccggccgatcacatccctttacccggtcgtacgcttttttgatgataggccgcacgtattgattaattttggctacatccaaatgatgaccgatccgctgaaaccattgggtgtatcggttatcagccaagtcctccgatttttaaaaaaagatccttcggcacagccgattcttcgcgaagcgggaggaagagtctttgccgatattacgggtgctctctccctcaaattcgtccgaagccggctgcttaaagtattgagcggcatggatcagttgatggcatcagctgtatcggaggtagtcaagcgcaaagaacatcagctatattccacatccagaaaaggcatttttcatattgccgggaatttggcgccgattttgattccggcagcattaaaagttgccggaatcctgctcatgagaaatccggataaagccgagaaaaaagcggaattgatcattgaagcgatcgtgacggacaccgaagagcagcttagccggacttccggtgctgagacgatccgcgtcatccaaaaaggaatgggaaacatgttgcaagacgtgctttcaaaagtcgctgtgtatgtcttgagcggaatgattgcagccggattgctcgaaaaaaagctgaaaaagaagctgggggacgagaaaagcgctattttgctggggaaattgtataaatccctgccccataatgtcacaacggaaatgggtctagagttaggagatctttccgatcaggcgagaaagtatcctgctgtcattgactatttcaagcgtgcaaacagcgaaaattttatggaagaactgctcaaaatccccggcggcgccgaaatgaaacgcagtttagacgattttctcaaaaagtacgggatgcggtgcgtgggagaaatcgatttgacaaggccgagatgggccgaggccccggttcagctcgttccgtccatactcagccatattcggacgattgccgccggggaacacagaaggaaatttaaacaaggtgaaaccgaagcggaagaggcaaaaaaggagatcatctctcaatttcgttttccagaaaaaaagagagtctcccggctcgttcatatgtaccgaagcttgatgggaatgcgggagcatcataaatttacacttgtaaaacagatgtttttatacaaaaaagcgattcttaaagaagcccgcaccctcgttggaaaagggattttgaattgtgaagaagatgtcttttactttacgcttgaggagcttatcgccctattggagaatcgcggcatcggggatattccggaattgttagcagacagaaaacggcagcatacgtccaatcaaaagctcacatctccacgcgtgatgacgagtgaaggggagatcatcacaggaaagctgcgaaatgaaaaaagtcctgaaggcgctctcacaggtacccctgtttccgcgggaatcatcgaagggaccgccagagttgcaaagagtcctgaagacgcgaagctgaatcaaggggacatattagtggcgccgtatactgatccgggctggactccgctctttacttcagcggtcggactgattacggaagtaggcggcatgatgacccatggttcagtagtggcaagggaatacggcattcctgctgtcgtcgggatcgacaaagcgacagaaatcatagaagacggcgcttacatccgagtcgacggaacaaacgggtttgttcaaatattggacggcaacggctcctga

SEQ ID NO: 2439 - DNA, 123 bp, Bacillus licheniformis
atgcctaacgcggcataccttctttatacgaataaaataaacactatgttgattaatattcatcatgtttattataattgcgcaaaaggagaacgcaatgaacaatcaatcggcaaatgttaa

SEQ ID NO: 2440 - DNA, 606 bp, Bacillus licheniformis
atgactgagcagaaaaaagaccgcagggtaaaacgcacgaaaaaaatgattagagacgcactctctgaactgatgaaaaataaagcgtttgaagagatatccgttacggacattacgaagaaagccgatattaaccgcggcacgttttacttgcactacgaagataaatacgatttgctggaccaaagcgaggaggaaatcatccaagagatcaataaaattgctaaacgctcgattcactcaatggatgtattaaatcaggatgtgattgaccatccgctgacattcgtcgtcgacatttttcaatatataaaagaaaacgaagtttttatgaaggcagttttaggccctaaaggcccgggttctttccgtttaaaattcaaatcggttttgatcagcaatttaaaacgtctgaaaacagcgatcagaacggatccgattgtaccggaagactacttgatttcctacataaccggcgctcatatcagcgttatgcagcaatggcttgagaacgggatgaaagagacgccgcatgatatgacgctgattttatcaaaaataaccggaatgggccctgcatatgcggcagggctgagaaaaaaatga

SEQ ID NO: 2441 - DNA, 126 bp, Bacillus licheniformis
atgcagaagaaaggtattcaaaacagcagccttgagcagctgaaaaacgatcacgaaacagaaagcgcattccagcaggatgacaaaaacaataaacagcaacaaaacaggaatgctttaaaataa

SEQ ID NO: 2442 - DNA, 465 bp, Bacillus licheniformis
atgaagcatgtaagagcattgtgtttaaaattcattgtgagccttgtccttttatatgtggtcctaactctgttttttggcgttccattcggtgaaatgtttgttttgacattgtttctgggtgtgatatcctatctggtcggagatcttctgctgctgccgagaacaaacaatacaaccgcgacaatgggagattttggcctttcactcgtattgatttgggtgattctcgccatgcaaaataatcccccgtatggtacgcttgctgcagcttcaatcgtgtcagcgatcggcgtcacagtgttcgaatattttttccaccgctatatggaagccaacgtcttgaacgaaacagaaaacggaaaacgggaaaacagagaaaagcctggttcattgcagtatcaaagcgaatcatcagaggagctttatccggttaccccctctaaaaaacaggacgaagaataa

SEQ ID NO: 2443 - DNA, 516 bp, Bacillus licheniformis
atgacacatagcgcattaaagcatttagattatcacaattgggcgaatcaaagggtgctcacccacctgaaaagcctgcctgaagagctgttcacccgggaaatcaaaagcgtttttcaaactgtatctgaggttgttacccatatgtgcgtggctgacgccttatggctgaagatcatatccggagccgcttacgaggaagcaaaggaaacaggcatgcgtctgaaagaaggattaaagaggaaaaagagcgatgacttcatttccatctttcatgacacggcgcttcaatatgaagcgttttttgaaaatcttgaagaccccgatggtgaaatcacgattgcccatccaatattaggcgaaatcaaaacgcctattagcgaaatccttcatcacgtagtcaaccacggcacttatcacagaggcaatatttcagcgatgctgagacaaatgggtgaagcgggtgtgccaacggactatatttattatttattaagcctgaagcaaacgacataa

SEQ ID NO: 2444 - DNA, 627 bp, Bacillus licheniformis
atgtctaaagtattgtttgttaaagctaatgaccgtacagctgaagaagctgtatctgtaaaactttatgaagcgtttcttaacagctataaagaaaatcatccaaacgatgaaattgtagagcttgacctttacagagaaaacccgccgtacctaggcagaaatgccattaacgggacatttaaagcaggaaaaggcatggaattgaacgaggatgaaaaagctgccgccgctgtagcggatcgttacttagacgaattcgtcaaagccgataaggttgtttttgctttcccattgtggaacttcgccgttccagctgtacttcacacttatgtggactacttgtcccgcgcaggagtgacgtttacatacactcctgaaggacctaaaggcctgatgggagataagaaggttgctctgttaaatgcaagaggaggcttctattctgaaggaccgatggctgcaatggaaatgtcgttgaactacatgaaaaccgtcatgggcttcttcggtgttcaagacttgcataccgttgtcatcgaaggacacaacgctgttcctgacgacgctcaaaaaattattgaaaacggcttagcagaagctaaaaagcttgcagcatcattttaa

SEQ ID NO: 2445 - DNA, 489 bp, Bacillus licheniformis
atgccattgacagaggaacaaaaacagcacctttacgataaattaatcagcttaaaaaacgaaatcacaggtacaaagtctgaggtgcagccgatgaatgaagaaacaggcgaatggtcaaacggtattgacaatcatcttgccgaccatgccggcgtgtataccgaacgaatgagggaccaggctttccggcaatcggacgatgctttgctgaaagagatcgaagacgctttaaataggatgaaagacggcacatacggcacgtgtgaaacaacgggaaaagaaatcccctatgaacgccttgaagcgattccatatgcgcgaagaaccgccgaagctcaagcggaagcagaagcaagacaagaagaccgcacagagaatgatcggcaatttacacggcaaatgaaggatttgacgaataaagaaacgatggaccaaaaacattcatacgtctatgaacggcttgaccaggaacaggactccaaataa

SEQ ID NO: 2446 - DNA, 129 bp, Bacillus licheniformis
ttgaaattcaagcgctgttatcaaaatacttatgtgcataatctcaacaggctgttcaaacgctcctttgcgaatgaacggtctttttttgcggagaaatgcacgttttcccttttggcaatcgggtaa

SEQ ID NO: 2447 - DNA, 345 bp, Bacillus licheniformis
ttgggcgttttttcagcaagcaaaacagcagacggcaaaaaatttgaaccgctgcttatagaaggagaaaaaattgaatcggtttgcagactaagaatggatcaaatatgttttacgaacaagcggattattttttttgataataaactgttttctaaaaagaaagtccgcgtcttcctgccttacagatcgattgaaggctttgcgattagagaagtcagcatgttcaatccagacagttctctttctctgatgaccagcagcaaaatctttgatctggaatttacgaaggataccgacatgcttgaaattcaagcgctgttatcaaaatacttatgtgcataa

SEQ ID NO: 2448 - DNA, 210 bp, Bacillus licheniformis
atgattcatgaaaaatggcagaacaataaaaccattaaaaaagtaaagtgcatacataccgatgccaaaaagtatatcgtcaacagagcgctgaccgtcggtaacatatacgaggtcaaaaacgaaacgggagaatttttgtttatcatcgataatacaaacaaagtcggcggctattacaaagaatactttgaagaagtaaaagcctga

SEQ ID NO: 2449 - DNA, 123 bp, Bacillus licheniformis
atgaaaccaaatcaatattcatgtttggcaaaaaccacattcgccgacagagcgcattgcatttcggcgaaaaaacgctacaatggaaactatacacgtatgaaaaaggagacatccacatga

SEQ ID NO: 2450 - DNA, 1488 bp, Bacillus licheniformis
atgagttcattaacgatgcaggtcagtaagaagctggagtcatttttgcagggaacaaagaagctctatattaacggggaatttgtagccagcgcctcaaacaaaacgtttgagaccccaaacccggcgactggtgaaacgctcgccacgttatatgaagcaggtcccgaggatgtggacaaagctgtaaaagctgcgcgggaagcctttgaccgcggtgagtggcggacgatgaaccctgccgaaagaagccggctgatgtacaaactcgccgatctgatggaggaacataaaacggaactggctcagcttgaaacgctggataacggaaagccgatcagcgaaacgaccgcaggcgatattccgctgtcaattgaacatatgcgctattatgcgggctgggcgacgaaaataaccggacagacaattcctgttaacggaccttattttaactatacacggcatgagcctgtcggagttgtcgggcaaattatcccttggaacttcccgcttctgatggctatgtggaaaatgggagccgcccttgcagccggatgtacggttgtcttaaaaccggctgaacaaacgccgctttccgctctgtatttagctgagctgatcgatgaggcaggcttcccgaaaggcgtcatcaacatcatccctggctttggggagacggccggagaagctctgaccgaccatgcccttgtcgacaaactggcattcacagggtcaactgaaatcggcaaaaagataatggagaaagcggccaaatcggtcaaacgtgttacccttgagctcggcggaaagtcgccgaatatcatcctccctgacgccgacctgaagaaagcgattccaggcgcactaaccggcgttatgttcaaccagggccaagtttgctgtgcgggatcgcgcgttttcatccataaagaccaatatgacaaagtcgttgatgaaatggccgcttattcaaaatcgctccgccaaggtgcgggccttcatgaagacacgcaaatgggaccgcttgtcagcaaagaacagcatgaacgcgtcctctcgtatattgaaaaaggacgccaggagggtgcgaaaatcgcggccggcggaacatgcccttatgaacagggatactttgtttctccgactgtattcacaaatgtcgaggatgagatgacaatagcaaaagaagaaatcttcggtcctgttttggcggcgattccttatgaaacggttgatgaagtcatcgaacgggccaatcgcagcgaatacggcctcgctgcgggcgtatggacggaaaatttgaaaaacgcccactatatcgccgaccgtctgcaagccggtaccgtttgggtcaactgctataatgcttttgacgccgcatccccattcggcggctacaaacagtctggactcggacgtgaaatgggctcatacgctctggataactatacagaggttaagagcgtctggattcatacaggcgaataa

SEQ ID NO: 2451 - DNA, 1281 bp, Bacillus licheniformis
atgacaattcaagtcgactggaatgatagaatcgtgtattcttcctctcttggcataaccgtctggaaacaaaaaaactttagatacatatgggcgtcgcaaacagcgcaggctgtcggatcaatcttgatgacgatcattgtcatggtcgatgtatttaaggaaacgaactctgtattcggatccggtctggttttggctttatcctcgttcggcagtgtattaggcggagcgatcgctgcttttgctattcagcgtctcgatctgctgcaaacagcggcctggtcaacatggttcagagcggtctgtgcattatgcatcggcttatgccaatcgcttggcttaccctcttatatcatttatctgctgctatttttgcaaagctttgtcggctcctggtatactcccgcacagttaggtttactgtaccaagccattaaaaagcgcgattacgtggctgcatcgggaagcatcgtaacggtcaaccagtttgtccaggcggcaggctggggtctcggcggctttttaaccgttttggcccagacttatacgttgacagtgtttacagcagcactctttttcatatcagggcttttaatcagattgccggatttcaaaaaagcgattatccctcgtcaaaaagcccgcgcacaatcggtctggcgcactgtttacaggaagaaaaccgttttgctgcttacgatgatggacatgtcggaaggtttagcaaatgcagtctggacttccgccgttttgctggcttttactaaagaggcgctgaataaaggagaggcttggtggggattcatcaatgccggttattttttgggagcgattttgggcggcattctcgctgtgctcttttccaaccagctcaaaaaaaggcttggcctcatgattttctttggctccgtttcaatgggcatcacaacgcttttattcgcctattcgtccaaccccctcctttcggttatcctctgtatcatgatggggccgctttatcaagtaagagacgtcagccagacggttatccttcaagatacattgactgatgaagagcgtgcaccggttaccgccgccaaaaataccattttggctgcatggtctatcataacaatcgccatcatgggggctttggcagacttgatcggggtacgaagcgtatttatcgctgccgctgtattatatgccggaacagccgctgccacatttttcgtccgggatttaagaacgtacagccaatctgcaaggcagcagacgaaagggaaaatagaaggatga

SEQ ID NO: 2452 - DNA, 537 bp, Bacillus licheniformis
atgttcaagagccgcaaggtttatctcagacctgttgaaaaaggcgatatggagagcttttacaaagccgttcaaaatgaagacatcaggtatatgacgggcacgacgcgcgaatatacgatggaagacctttatgagcactatgagagaatcacgagtgatgagacgcgctatgattttgccgtctgcttaaaggaggacgatcgtttgataggcgatctgtccattatggacattgaccggaggaatcgaaaagcggggtttagaattgctttgcacagccccgcttatttgaacaaaggctatgggattgaagcggtgcggctggccatgcagcttgctttcgaaaggctcgatcttaaccccctccagctcgaagtcttttcacacaatatccgcgcgctgaaagcatatgaaaaagcgggatttaaaatggaaggaaggatcagggaggctctttatatgaatgagcagtactcggatgaaatcattatggggatattgaagcgggaatacgaagagctgatgtcccgctga

SEQ ID NO: 2453 - DNA, 402 bp, Bacillus licheniformis
atgaatattgaacagatgctgtatgacaccgcagtcgaattgatcaaaaagaggtatccgaccggatggggcggggcagccgccatgtataccgaggacggaagaatcttaacgagcgtagccccggaagtaatcaacgcttcaacagaattatgcattgaaacgggcgccattctcgaagcccataagtatcaggcgaaaataacgcactctgtttgtgttgcaagagacgacgaacattccgaatgcaaggtattaacgccgtgcggggtatgccaggaaagacttttttattggggtcctgatcttaaagcagctgtaactgtaccggatgggcgcctggtttataaaactttaaaggaaatacagccataccattggtttgccgcgtatcaaaagtag

SEQ ID NO: 2454 - DNA, 1890 bp, Bacillus licheniformis
ttgcgatctatactagaagacgtgaaagctttcaggcaaaagacgctcgcagagcttcaaaacagacaaagatctgatggttcgtggcggttttgttttgaagggcccgtgatgacggacagttttttcattctgatgctgacatcactcggcgatcaggactcttctctcatcgcaagtcttgctgaacgaatccgttcaaggcagagcgaagacggcgcgtttcgcaatcacccggatgaaagagcaggcaatctgaccgcgacagtccagggctataccggaatgctggcttcggggctctatgaccggaaagctccgcatatgcagaaagccgaagcttttattaaggacgcaggcggattgaagggcgtccactttatgacgaagtggatgctcgccgccaacggtctgtatccatggccgagagcctatattccgctctcgtttttgctgatcccgtcctatttcccgctgcatttttaccatttcagcacatacgcaagaattcattttgtccccatggccattacgtttaatcggcgattctctttaaaaaacaaccaaatcggctcgcttcggcacctggatgaagccatgtcaaaaaaccctctcgaatggctgaacatccgcgcctttgacgaaagaaccttctattctttcaatctgcaatggaaacagctctttcaatggccggcttacgtccatcagctcggatttgaggccggcaaaaaatatatgctggacagaatcgaagaagacggaacgctatacagctatgcgagcgcgaccatgttcatgatttacagcctgcttgcgatgggaatatctaaaaacgcccccgttgtcaaaaaagcagtcagcggaatcaaaagtcttatttcatcatgcggaaaggaaggggcccatttggaaaactcaacttccaccgtctgggatacggccctcatcagctatgccatgcaggaatccggagtgcctgaacaacattcttccacctcatcggcagccgactaccttctcaaaagacagcatgtgaaaaaagcggactgggctgtctcaaatcctcaagcggtccctggcgggtggggtttttcacacatcaatacaaacaatcccgatttggacgataccgctgcggcattaaaagctattccgtttcaacggcgtccggatgcatggaaccgggggctcgcctggcttttatccatgcaaaacaaggacggagggtttgcggcatttgaaaaagatgttgaccatccgcttattcgaaatctgccgctcgaatctgccgctgaggcagcagtcgatccgtcaacggcagacttgaccggacgcgttcttcatctgctcgggcttaaagggcggttcacagataaccatcctgcggtccggcgcgccctcaggtggcttgatcatcatcagaaagcggacggctcttggtatggcagatggggcgtctgctttatttacggtacatgggccgcactcaccggtatgaaagctgtcggggtttccgccaaccagacgtctgtcaaaaaagcgatctcctggctaaaatcgatccagcgtgaagacggaagctggggagaatcttgcaaaagctgtgaagcgaagcgttttgtccctcttcactttggaacagttgttcaatcttcatgggcgctggaggcgcttttgcaatatgagcgtccggatgacccacagatcataaaagggatccgttttctcatcgatgaacacgaaagctcgcgtgagcgactcgaatacccgacgggaatcgggctgccgaaccaattctacatccgctatcacagttatccttttgtgttttcattgctcgcttcaagcgcatttattaaaaaagcggaaatgagggagacatattga

SEQ ID NO: 2455 - DNA, 846 bp, Bacillus licheniformis
ttgaacagagatgcttacaaagaaaaaatatcgtcatgggccaaagacctgaaagaccagatgaaagatgatccttctttagaaagccatttagaaaaactttttcaatcattggatgatcctcgtgcgaccgaacaggaatggtatgagcaggcagaagccgagtatcaagccatctcccgcagtgatgcgtctcaagcaggccggcagccattcagaacagtgccgatcggaggccatcgcctgccaagcctgccctactcgtattcagcccttgagccctatatttcaaaagaaattatgtttcttcatcatacaaaacatcaccaaagctatgtcgacggtttgaacagagctgaaaaagaactgcagaaagcgaggcaaaccaaacagtttgacctcgttaaccattgggaaagagagctcgccttccacggagccgggcactatttgcatacgatattttggtacgcgatgcacccaaaaggaaaaagacggccgacaggtgaattgctggagatgatcaaccgttcattcggcagctattcggcctttaaagaacatttttccgaagcggcgaaaaaagtggaaggcgtcggctgggcgatcctcgtctgggcgccgcgttcgcaccgcttggaaattctgatcgcagaaaaacatcagctgatgagccaatgggatgtgatccccctgctcccgctcgatgtatgggagcacgcatattaccttcaatataaaaatgaaaaggcaaaatacgtcgataattggtggaatgtcgttgactggagagagcctgaaaggcgatttgcgtcagcaaagcgcgttttatgggagccgttctga

SEQ ID NO: 2456 - DNA, 531 bp, Bacillus licheniformis
atgaaaaaaatgtttgctttctttacagctttaatgctcggtttgacttgtctgccatacttatcggaagcgaaagaatcaaaacatacggacagttctgttacaagcttgccttctatgtctatacctacatctctcaatcagtcattgaacgaggaaaaacagcagtttaaaacttccgctattgatctcagcatcagcctcgacctcttaggaatcggaaactcgattagagacgctatcgttcaaagcaataaccgcagcggtttcgtcaaaaactgcatggaaaccgctttttattctgcagggcaaagatacaatgtcatggtgttcaacttaagccaaggctatcacaatggtttaagaggagttaaattttatggatctgccaactatcatggcgtgatttacggcatttgggtatttgaaagcggacaatttacaaaccaaggagacggcggctggattaactgggcctttaaaggctggtttgatcgaaacggccaaacagtaacattccgtaagccttaa

SEQ ID NO: 2457 - DNA, 111 bp, Bacillus licheniformis
atgaaaggggggagaggaagggaaaaagcggttgtttttctggtcagaaatttaaaaaagcttgccggtttaccggcaagcagaagagggggatacatggactttgattaa

SEQ ID NO: 2458 - DNA, 1341 bp, Bacillus licheniformis
gtggaaaataaacaaaatatatggtcatcaaagcttggatttatcttagcttcggccggttcggcaatcgggctcggcgcgatatggaagtttccttatgttgccggaacaagcggcggcggagcatttttacttatgtttattctttttactttattgattgggcttcctttattaatggcggagttcattatcggcagaaagactcaaaaagatgcggttgaatcctataaggagcttgctcccggctcgctctggcactgggttgggcgcctcggcattatcacgtgtttcattctgctgtctttctatagtgttgtcggcggctggatcatcatttatattgtcaaagggctgaccggtgaactgtcaagaagtacggattatgccggtcttttcggggagacgattgcaaatcagtatctcgttctagggagccagtttgcatttatcatcataacgatccttgttgttgcaaaaggagtcagaagcggaatagaaaaggcgagcaagtttatgatgcctgctttgttcattatttttctgcttttgatcgttcgttcgctcacacttcccggttcaatggagggcttggagtttttcttaaaacctgatctttcacatatcaaagccgaaacggtgctgtttgcgcttggacaatcctttttctcgctaagcgtcggtgtttccgtgatggtaacgtacagctcttatttatcgaaaaaagaaaaccttgtacagtcagccgtttcagtgacattgctcaatgtatctgtagcgattcttgccgggtttgcgatttttccggccgttttttcattcggattatctcctgatgccggcccgatgctgttatttaatgtgctgccgtcagtctttcataagatgcctttaggaatcatctttttattggcgtttctgctcttatttttatttgctacactgacgtctgcattttcaatgcttgaaatccttgtttcttccttgtcaaaaggggatcctaagaaaagacaggctttcgcttgggcgggaggaattgcgattttcctattcggtattccttcagcattgtcatacggcgtgcttcaggatgtgtcgatttttaatctatccatttttgatgcggcggattatcttgtcagcaatatattaatgccgctcggcgctttgctaattgccgttttcgtgccgctcaaaattccgaaagacgagctttttgccgaattgaaagaaggctctaaaatcagcagaaaatggtttgcagcctggcttctgctgatccgctacgcagctccaatcgtcattattgtcgtctttttggatgctatcggggtattttaa

SEQ ID NO: 2459 - DNA, 981 bp, Bacillus licheniformis
atgagttatttgatcaaaatcagtcaatttgcaggaaaaacgttcgccatttgggtgattctatttgcgattctcggctttgcctttccgtcgcagttcacttggatcgtcccttatattacgattctgcttggcgtgattatgtttggcatgggattgacattgtcagcggacgattttaaagagctgctgagacgtcccctgcatgtgctgatcggtgtgctgattcaatatacggtgatgccgttgctcgcttttggactggcctatggactcgctctcccccccgaaatagcagtgggggttatattagtgggatgctgccccgggggaacagcatcaaacgtcatgacatttctggcaaaggggaatatcgccctgtctgtggcgatcacaacgctttccacactgcttgccccttttttaacgccgtttctcattttatttttcgcgaaggaatggcttccggtatctccgggctctctgttcgtgtcgattttacaggcggtgctgctcccgattatcgccgggctgatcgttcaatttttctttaaaaaacaagtgaaaaaagctgtacaggtgctcccgcttgtctccgttctcggcatcgtcgccatcgtctccgcagtcgtcggaggcaatcgggaaaacattattcaatcagggctgctgatttttgcggtagttgttcttcataatggcctcggacttttcctcggctttgttttggcaaagtgctttaaaatggattatgcgtcgcaaaaagccgtgtccattgaggtcggcatgcagaattcgggtctcggcgcggcattggcgacggcgcacttctccccgctttcagctgttccgagcgctgtgttcagcgtctggcataatctttcaggttcatggcttgcgacatactgggccaaaaaaacaaataaacagaagaatgacaatcattctcctgccccgcaaatgataaataaaaagctttga

SEQ ID NO: 2460 - DNA, 1281 bp, Bacillus licheniformis
atggcggaaattaaagtacctgaattagcggaatcaatttcagaaggaacgatagcccaatggctgaaacaaccgggagattatgtagagcaaggggaattcctgcttgagctggagactgataaagtcaacgtggaattgacggcagagcagtccggcgttcttcaggaagtgctgaaagattccggtgacacggttcaggtcggcgaaataatcggaacgatttcagaaggcgaaggagaaggaggcaaatcaacggctccgcaagctgacgctcaagaaagcgccggcgcttcggaagagaaagcagcctcgtctgaaaagacagccgaacctcgcgaaggtgcgagcgatgaggcggatacagccaaaacaagaactatcgcttctccggctgcccgaaagctcgcccgggaaaaaggcatcgatttatcggaaatccctaccggtgatccgctcggaagggtcagaaaacaggatgttgaatcttatcaaaagaacgagcagccgccaaaagctcagcctgaaccaaaacgcgcaacacaggcgccggccgctaaacaaaccgaagatgctggtaaacctgtagagcgtcaaagaatgtcccgccggagacagacgatcgccaaacgcctcgttgaagttcagcacaccgccgctatgctgacgacattcaacgaagtggacatgacggcggtcatgaacttaaggaagcgccgaaaagatcaattcctggagcagcatgacgtgaagctcggattcatgtcattctttacaaaagctgttgtcgccgcgctgaaaaaatatccgctcctcaacgcggaaattcaaggcgacgagcttgtgatcaaaaaattctatgacatcggaatcgctgttgctgcgccggatggcctcgtcgtaccggtcgtgcgcgatgcggaccgcaaaacctttgccgatattgaaagggatatcggagagcttgcgaagaaagcgagaaacaacaaattgtcgctcaacgagcttcaaggcgggtcctttacgatcacaaacggaggaacgttcggttcattgttatcgactccgattttgaacagcccgcaagttggtattttgggcatgcacaaaatccagctgcgtcctgtagcaattgatgaagagcgctttgaaaaccgcccgatgatgtacattgcattatcgtatgaccaccggatcgtcgacggaaaagaagcggtcggcttcctggttacgattaaaaatctgcttgaagatcctgaacagcttctgttggaaggttaa

SEQ ID NO: 2461 - DNA, 2835 bp, Bacillus licheniformis
atgtttcaaaatagtatgaaacaaagaatgacttgggaagaatttcacggtccgaacctcggctatgtgctggagctttacgatcagtacgtcaaggatccagaaagcttggatgctgatttaaaagagatgtttgacgaacttggagctcccccgggcgatattagggccgcctctcaaaaaaacgaagaggcagatttcacggctggatctattcaaaaaatcgcatcagcggtaaaacttgcagaagatattagaacctatggccatttaaacgcttccgtcaatccactgagaaaaacacaagagaaacaggagctttttcctcttgctgagtacgggttaactgagcaggatgtgaaaaaaatcccggcgtctgtcatatgcaaagatgcccctaaagaagtaacgaacggtttagaagccatccagtacttaagaaacacatacaaaaaatcgatttcttttgaatttgaccatgtgcacatttttgaagagcgcaactggctgatgaaaaagatcgaatccggggaattattcaccccgaaatcgaaagaaaaactggtagaagttttaagaaggcttacagaagtggaaagccttgaacagtttctccacaaaacctttgtcgggcaaaaacgcttttcaatagaaggacttgatgcgcttgtgcccatgctggatgatattatcgccaagtccgtttcggcaggtacgacaaacgtcaatatcggaatggcgcacaggggccgcctgaatgttcttgcgcatgtgctcggaaaaccttatgaaatcattttttctgaattccagcatgcgccgaacaaagatctcgttccgtcggaaggttcgaccgggatcaattacggctggacgggcgacgtaaaataccacctcggcgccaaccgccagattcaggatgagcatacgaaaacggcgcgcattgcgctcgcgaacaatccgagccaccttgagttcatcgatccgatcgttgagggatcgacaagagccgcccaggaaacgagaacggagagcggctatccggttcaagacgtcaaaaaatcgctggcgattctgattcacggcgatgcggcattcccaggggaaggcattgtcgcggaaacgctgaatttaagccagcttaaagggtatcaagtgggcggagcgattcacattatcgccaataacatgatcggctttacgacggaaagcaatgagtcaagatcgacgaaatatgcaagcgaccttgcgaaaggttttgaaattccgatcgtccacgtcaatgctgatgatcccgaagcatgtctttcagcggttcagctcgctgttgaataccgcatgactttcaacaaagactttttgatcgatctgatcggctaccgccgttttggccacaatgaaatggatgagccgtccgcaacgcagccgatgctgtatgatgcggtcagaaagcatccgaccgtcaaaaacatctttgctgaaaagctgattcataaagggatcgtcgataaagaaaccgtcggcaaaatcaaggacgctgtccagaagcgtttagaagaagcctatcgcaaagtgccggccaaaaaggaagacatgacgcatgaaatcgtacttccagagccggtctccaacggttttcctgatgttgacacatcggttgattttgaaactttgcgcaaaatcaatcaggagcttgtttcatggccggaaaacttcaacgttttcgataagctaaaacgaatccttgaaaggcgcgccaaagctttcgaagatgaccgaaaagtcgactggtcgcttgcagaggcgatggcgtttgcgtcgattttgaaagacggtacgccgctaaggctgaccgggcaggattcagaacgcggcacattcgcacaccgcaaccttgtccttcacgacagcaagacaggggacgaattcatcgcgctgcatcaccttgccgatacgaaagcgtcatttgcggttcacaacagcccgctttctgaagggtccgtcctcggcttcgaatacggctataacgtgtcttcgccggaaacgatggtgatctgggaagcgcagtttggagattttgcaaatgcggcgcaagtttactttgaccagttcatttctgcaggaagagcgaagtggggtcaaaaatcagggctggttgttctcttgccgcacggctatgaagggcaggggcctgagcattcaagcggaagaacagagcgattccttcaattggcggcggaaaacaactggactgtcgccaacctgacgagcgctgcccaatactttcatattttaagaaggcaggcgaagatgctccttcgcgaggagatccgcccgctgatcatcatgacgccgaaaagcctgctgagaaatccgaataccgtgtcagaagtgcaggagctcagtaacagcagctttaagccggtctatgaaatgtcaggactttcccatcaatatgacaaagtgacgcgcctcgtcctttcaagcggcaaagtttcgattgacatcagcgaccatttcaataaaatggaaggtgaaaaggattggctgcacattgcacgggttgaagagctgtatcctttccctgcaaagcatattaaagcgatcttcagcaaacttccgaatttggaggagatcgtctgggtacaggaagaaccgcaaaatatgggcgcatggaactatatcgagccttatttaagagaggtagctccaaaggacgtgaaggtccgctatattggcagaagaagacgttcaagtccggcagaaggggatccgacggttcataaaaaggaacaggaacgcattgtatctgatagcttgactcgcaaaaattaa

SEQ ID NO: 2462 - DNA, 1914 bp, Bacillus licheniformis
atgaagtttattaaattcaatgacagcaagattgactctttgctatttatggagctgacagatctggcgaaaacgctcgcgaaaagcgatcaggttgaagtggagtacggggttcagtcttattacaatccttttgagaaaaagatctacatgagccacttttggaaagacaggaaccaccgcgatatggtagacggcttgaagagcgatgtatacttgcggtcaatcggctcccgctacagctcgatgaaagacttttcccgcatgctggactcggctcggaaatatcagtttaagagtttggcaaaacagttgtttatgctttttgaggatatcagaattgaagagtccatcaagagggagcgccccggtacaaagcaggtattttcaaaccggaaatcgatgtaccgcaaacactttgcgacacagctgacgctgaatctggagcggagcatttttacagatgctttgttttgcgctgcatatcttaagctgaccgcggagtcgccgcttgaagagataccggctatccatgaatcggtcgatccgatgaaggggtttatagaagccgagctcgcccgcgtattcgaagcgcgttcaactgctgacatcgtttcgattgtaaacgggttaatggaaggttttgaagaagtgctcgaaaaagatatgctgaatacgtacttcttttttccggaacttgactacgaacaagttgacgaagaagcgctctttcaagatttaaaagcaaaaccgaagctgagcgaggatctgacgctggaagagaaaagcgcgggtgacgaggaagttcatgaagaagaaatgccgacttggcacagagaaacggaagctccggccaaaagctttctccagtttgatttggagcacggcgcaaaatccgatatttccggcggcgctttaagagaaggagaagacggcgaccaagcgctcgggtctgttcaaggaacggcgaagcagacgaaaaggaaagactactcaaaacttgaatcgcttgaatctgttcaagatgaaccgaacgccggaacagcccaagccggtaaagaaaaccgctatgccttttcggtgatgaagccgccggaaaaaccttcgaatgaagatatattagactaccaggctcaagccaaaacaatcgaatcatatcaaaaacggctcaaacagatgattcaaaaaacgcttgagcataaaaaaacactcccgagaaccgatttgcatgcaggcagattgaacaataaactgctccgttactttacagagcgcaatccgcgcctgttctataaaaagcaggagccgtcaacagaaatcgacgccgttttcacattgctcgtcgactgttcggcaagcatgcatgacaaaatggcggagacgaaacggggcattgtgctgtttcatgaagcgcttaaatcagttgctgtccctcatcaaatcgtcggtttttgggaagatacaaacgatgcgacagagacgagccagcccaactactttcatacggtcgtttcttttgcggattccttaaaagcaggcgccggaccgcacattatgcagcttgaaccggaggaagacaaccgggacggatatgcgatcagacagatgacgaagatgcttgttcaaagaagcgaagctcagaagttcctgatcgtcttttcagatggagagccggccgcattcgattatgagcaaaacgggatcgtcgatacacatgaagcggtgatggaagcgcggaaacgaaatatcgaagtcatcaatgtatttttatcaaacagcgaaattgaagaatcgcaaatgaagacgatacaggacatgtacggaaagtacagcctttttgtcccagacgtcgatcagcttcccgatgttctgtacccgcttttaaaaaagctgttgaacaaaagtataggatag

SEQ ID NO: 2463 - DNA, 891 bp, Bacillus licheniformis
atgaaatatgatctgcacgaactagagctgcctgaaaagataaaagagcggctgattcagtctgccgctaaacctgttgacgcggaataccaatcattgattgggacgcccggctatgaagcggaagacagcgccattctctatgacgcgatgatcgcgttgtcactcggaaaaaacgttttgttaaaaggtccgacaggttccggaaaaacaaaacttgccgaaacgctctccgcttattttcaaaaacctatgcacagtgtcaactgttctgtggaccttgatgcagaggcgcttgtcggttacaaaacgattgaaaacaccggcgggaacgcctctattgaatttgtcgaaggtcccgtgacaaaagcaatgaacaacggccatttcctatatattgacgaaatcaacatggcgaaaccggaaacgctgccgatcttaaacggggtgctggattaccggaaaatgatgaccaatccgtttacaggggaagtcgtcaaagcgaaagagggattcggcgtaattgcagcaataaacgaagggtatgtcggaacagtcccattgaacgaagcgctgaaaaaccggtttgtgatcatcgacgtgccatacattaaaggcgacctgctgaaacgggtgcttgaaacacaatccgaactaaaaaatcagaagctgctggaccggtttgtcaccctgtcatcggatttaatgacgcaagcccacaacggacaggtatctgaagaggctgcttccatcagagcgcttctcgatacttgcgatctgtcgacgtatattccgccgctgcgagcgatcgaacggggcatcgttgaaaagcttgatgatgaacgcgaaaaagcggcggtccgaaatattgcccaaactttgttcgaatga

SEQ ID NO: 2464 - DNA, 132 bp, Bacillus licheniformis
ttgcggagcgctgacgaacagcggaaaaaagtgaatcggcgcctggaagccgtttatattgagggcagcgcgtcttttctagtatacttaaatacagaagacgcttttagaaaggaattttacaacacatga

SEQ ID NO: 2465 - DNA, 594 bp, Bacillus licheniformis
ttgagaacattacattacatattgctcgcatgtatgtccgtttgtttggcagctgcatgcacacagcaaaaagaaatcgagcaaaaaaatgccgaacaggaacataaagaaacttttgaaacgatgacacagccattaaaagtaccgctgatcaaacgcgacgggacggagaccggttttatagaagtgtatgaatctgctgcagaaggccttgatattagagtgagcgcccatgatctgccgccgggcatgcttgcttttcatattcatgaaacgggcgtttgcaaaaagcctgattttgaaagtgcgggtgctcatttcaatcctgatcaaaaggagcacggctttaacaatccaaaagggccgcatgccggtgatttgccgaatattgaagtcggagcagacggcaaagtcgacgtcatcgtcaatgcgccggcagtcaccctcgatcagaaaagcaagttcagtctgctggatcatgacggaagtgcttttattattcacgagcatcaggatgacgatttgacaaatccatcaggtaactccggagcccggatggtttgcggagcgctgacgaacagcggaaaaaagtga

SEQ ID NO: 2466 - DNA, 1308 bp, Bacillus licheniformis
atgaagaagaagatagcagcaggtttggcggcctctgcggtagttggaacttcattggcggcgtcaccggtcgaagcccaaaccatcaaggtgaaaagcggagactcactgtggaagctttcagctgagtacaatacgagtgtttcggcacttcaatcagccaacaatctttcatcgacggttatttatgtcggacaaactttaaaagttccggacggcaagtcgaaaagcagctcacagacaaaatccgcaagttctagctcaagttcaagcgctgccaagtccacttacacggtgaaattgggagattccttgtggctgattgccagagactacaaaacgaccgtacaagagattaaaaacttaaacgggctgagcagcgatatgatttatccgggacaaaagctggttattaaaggaagcgcaaaaagcgccggttccagctctggatcaagctccaaatcatccggctcatcatccggctcacaaagtgcaagcagttcaagcagcacatacaaagtcaaattgggcgactctttatggaaaattgccaatagtttgaatatgacagtcgccgaaattaaaacgctgaacaacttgaagtcggacacgatctacccgaaccaggtccttaaagtgaaaggaacagtttccagcggaagcaaaccatcttctggttcgtcttcaagctcttcatcaagtaaaacgaacacaggcagcagttcaaaaacgaccacttacacggttaaaccgggcgattctctgtggaaaatcgcgaattcgatgaaggtaacggtacagagcatcagagaggctaatcaattaaaaacagatgtattgcaagtcggccagaagcttaaaatttctggtgcatcgtcttcagggtcatctggcagcccatcttccagctcgccgaactcttcagtttcaaccggcacttcgacaagcgcaaaagtcgagcggatgattgcagaggcagaaaagcatatcggcgtgccttacagatggggaggcaacaatccttccggttttgactgcagcggattcatctattacacgttgaacaaagttacatctgtctcaaggctgagcgcagcaggatactggaacatcatgtcgccagtcagccagccttcaagaggtgattttgttttcttctcaacatataaagcgggcccttcacacgtcggcatttatttaggaaacaacaagtttatcaatgccaacgattccggcgtcaccgtgagcgacatgaacaattcctactggaagcagcgctatctcggcgcaaaacggtattcattttaa

SEQ ID NO: 2467 - DNA, 69 bp, Bacillus licheniformis
atgagaaatttagtaaaaaaacaaaaaaagctattaaaaaaatataaaatagaccgatacaaatcgtga

SEQ ID NO: 2468 - DNA, 159 bp, Bacillus licheniformis
atgcggatttccgtgccgttttactgccgatttctctttctctcggatcaaacggaaacaggtaggcaagccagcgttcatgttgagggtgtgaaaactgcgtgttcatattcttttatttttccggaaatcgccgatctatcctcatctattgcctaa

SEQ ID NO: 2469 - DNA, 141 bp, Bacillus licheniformis
atggccaagaagattcacctccatatcttaaaatgcgccataaaaggaggaaacatgcatgaaagctgcggtgataaaacagaacccttttttacatgttttgatagtatattagatctattaatatatataaatgagtga

SEQ ID NO: 2470 - DNA, 1359 bp, Bacillus licheniformis
atgagggaaacaaaggatttgcgggagaaagcaagacagtttttaacgattttaattccgattttgattacgcaagcgggactgtcgctcattacggttctcgacacggtgatgtcaggcaaagtcagcgccgccgacctcgccggcgtcgcaatcggctcgagtttatggacccccgtttatactgggcttgccggcattttgacggctgtaacacctatggtcgcccagctgatgggtgccaagcggcaaaaggatgtcccttatactgttattcaatcgatctatgtggccggaatcatcagccttgccgtcatcgtttccggatattttctgattgatccggtgctggagaatctcgatcttgaacggaaggtagctgtcatcgcaaagcaatatttaatctgcatcgggctaggcatattgccgctgtttgtttacaatgtgatgcgctgctttattgattcactcgggaaaacgcgggtgacgatgctgattacgctttgttctttgcccattaattttgtcttgaactatttgtttattttcgggaacttcgggtttccaaagcttggaggagcaggagccggtttggcttccgctatcacatattggtgcatttgtctgatctctttatacatcgttcataaaaagacgccgtttcaccagtttaggatttttggaacattctattcattttcttttgctgaaagtatgaaacttctgaagatcggcatcccgatcggtttcgccatcttctttgagacgagtatattcgcagctgtcaccttgctgatgagccactttgacacggtcacgatcgcttcccatcaggcggcaatgaattttgcttcgcttctttacatgcttccattgagcgtatcgatgacgctgacgattgtcgtcggctttgaagccggggccaaacggtttaaagactcgagggcctacagctatctcggcatttcaatagcggtcggtttttcattattcaccgcactcatcatactactgttcagagagcagatcgccggtttgtacgcggctgaccgggatgtcctgcttctgaccaaggacttcttgctgtatgcgttgttttttcagctgtcagatgccattgccgcgccgattcaaggagcgctcagaggatataaagatgtcaactacacgcttgtcacagctctcgtctcatattggattatcgggcttccggtcggttttgtaatcggaacgtatacttcattcggagctttcggatactggatcgggctgatcacggggctagcggccggtgcagtcgggctgttcttcaggctcaaacgcattcaaaaccgctatattcacactcaaagcatgtaa

SEQ ID NO: 2471 - DNA, 666 bp, Bacillus licheniformis
atgaaaaaacatttactcgtgatcctgccccatcctgatgatgaatctttcggagtcgccggcttgatcgccttaaaccgaaaagaagacattcctgtaacatacgcttgcctgacgctgggcgagatgggaagaaatatgggagacccgctttttgccaacagggaaacccttccgctgctcagaaagcaagagctgatcgacgcctgcagggaaatggatgtacaggatttgcgcatgctcggataccgcgacaaaacgctcgaattcgaggatgaagaaaaactggccgatcaaattgaggctgtcatcgatgatgtaaacccgagccttgttgtgacgttttaccccggacacggcgttcatcctgaccatgatgcatgcggtgccgcggtcatcagggcattatcgcggaaaaagaaagaggaccggccgcgcgtcttatgcatggctatcactcaccacagggaagaggttcttggcaagcctgacgtcgttcttgatatcaaagaagtcgcggatattaaaatgaacgctttaaaagcgcataaatcccaaacaggcggccttttgaaagaaatagagaaaaaactcgccaatggcgagccggttgttgagacatggtttgaaaaagaagcattttggacctatcaatggaatgattaa

SEQ ID NO: 2472 - DNA, 351 bp, Bacillus licheniformis
atgaaagcaataaaaaaagaagatgtgcaggcttctttggaaacatttttaaatcagcctgtttacattcatttggaaacgacaaccggatcgtattccgcgcataaagatgagcagaacatgaccgtggtggcatatatcagaaacgcgaaggtagcctgctcccgggccaaaatcacgggcgagggaccatttcgcgccggtttgaaaaccgaagacggctggatctacgccgaaggcctgacggattatacggttgacgatgaaggaaggttgcttcttgccggctatttgccgggcggcaaactcgccatttcgcttcaaatcagcaaaaagccatttgcagtctaa

SEQ ID NO: 2473 - DNA, 276 bp, Bacillus licheniformis
atggcagatgaactggagcttttccaggcatataaaaccctttggaaaaaccggacgatggagggggaaggcagggaggcgcttcatcaggcggttgatgatgagctgaacgacctcggcacccatccaaggctcagaaagacgaagcacgaaaaatactatcaatcaatccggcgcatcgtgaattcacaattggaatcagaaatgaagctcaagctgattgaatgtcatacggaacgattggagttattaacaaacgaagaaagcagggagtaa

SEQ ID NO: 2474 - DNA, 934 bp, Bacillus licheniformis
atgaatcattcatctcaaacgaaaggaatcatttacacagcgctttcttatttgctgtgggggctccttcctttatattggaaagtgctcgatcagacggccgcgctcgatattctggcgcaccggattatctggtcatttgtttttatgtgcggggtgcttctcgttttgcggcagtggaaaaacggagtcaaagcatttcgctcgctttcgggaaaccgaaaggaatttgttccgctcattttgtcgtccgttctgatttcgatcaattggtatgtctacatatgggccgtcagcaacggctatattcttgaagcgagcctgggctactacatcaatccgctcgtatcgatcgttctcggaattgtctttttaaaggaaaagctaacgcggatgcagggagcggcagttcttctcgctgccctcggccgtgcttatttcagcttttcagtacgggtccgtgccgtacatcgccctgatgctcgcattcagcttcgggctctacggactggcgaaaaagcgcacatcgctctcaagtgccataggacttactttggaaacgatgatgatcgctccggttgcagcgatctacctgctgttcttcagccatccggagaaggctcaggcagcctcagggagcatcggcatgatggtgctgctgtttctggcgggggtgctgaccgcgattccgctgcttttatttgcggaaggtgcaaagaaactgccgctctatcaagtcggcattttgcaatatatcgctccgaccattacattatgtttaggcgttttcgtctaccatgaaccgttcaacagcagcaaggtctttacgttttcctgcatatgggcggcgctgatattgtttacactttcgcaatttcaatggaagagaccggagaaggtatttttaaaaagaaaaaaatcctttcatccgtaa

SEQ ID NO: 2475 - DNA, 453 bp, Bacillus licheniformis
gtgtttgattggcaacgcttttttccatttcagcagttttccaaggacggattaaaaaacgctgacccgaaagatgtggagcaatatatccaccacatgatgaaaagcgttttcggaccggggtatgcagttcaatttccttttcgtgaccctctctcaaaagaaacatcggcggcagatgaatctgatccgattgatatttttgaaacgacaagccatgtatttgttaaaataccgctcaccaaagaacagcttaaccttctgaaaattaaacatacttcacaaaccctgatcatagaaaactaccctgaaaaagggcggcaggaaaaagtcgttctcccctctctagtgcgcagaaagggtacgaaagcaatatttaaagacggcattttggaagtgatgttcttaaaaaatgaggactttaacctgtctgaaatcgacatcacgttttga

SEQ ID NO: 2476 - DNA, 96 bp, Bacillus licheniformis
atgatacaggaagaaaaaaaacagcctgctttttcaagcaggccgttttcaaaacgtgatgtcgatttcagacaggttaaagtcctcattttttaa

SEQ ID NO: 2477 - DNA, 699 bp, Bacillus licheniformis
atgaaaaagaaaatcagcatattgatcacagcaatgtttttgacaatcctttgtttttcgcctcaagcttccgctgcgtacaactcactgcatacgggctatgccacttatacggggtcgggctactccggcggcgcattgcttttggaccctattccgtccaatatgaagatcaccgctttaaatccgacagatatgaattaccgcggtgtgaaagctgctcttgccggcgcctatctgcgggttgaagggccgaaaggaaaaacgaccgtctatgttaccgatctgtatcctgaaggagcgccgggagcccttgacctttcaccgaacgcttttcgcgagatcggcgatatgaaagacggcaaaatcgacattaaatggcgtatagtcaaagcgccgattaccggcaatttcacttaccggatcaaagaaggcagcagccaatggtgggcggcgatccaagtcagaaaccacaaatatcccgtcatgaaaatggaatattacaaagacggaaagtggatcaacatggagaaaacggattacaaccatttcgtcagcaccaatctcgggacaagtccgcttaaagtcaggatcacagatatccgaggaaaagtcgtcaaagacacgataaaaaagcttccggaaaacgggacgtcaagcgcatataccgtaccgggaaaagtacagttccctgactga

SEQ ID NO: 2478 - DNA, 279 bp, Bacillus licheniformis
atgaaccctcatatgctttattcgagatcaggtcctgccggatacccggccagattcccgttattctggggttttggagcgccgcttgtcggcggattgctgggcggatttctcggaagcgcgatttttaactacccaagaccttacgcttacccgccgccatacccgggaccttacggcggcgcgccttattacggctacggggcagctcctggggcttttccgtacggaggtgttccgggcgcagctccatacagaggagcaggaccgggctattga

SEQ ID NO: 2479 - DNA, 747 bp, Bacillus licheniformis
ttgaacagtaaagaaactgtcgtcattacaggcggggcaaaaggcattggaagagacctcgtggccgcctatgctcaaaaaggttttatcgtcgtattcgccgacgtattgaaggaagagggtgaacagcttgaaaaagagctgaccgcttccggtgcgcgggtccaatttgcaccttgtgatgtagcttctgaagaagacgtgaaacggctgatgcaggaagcttcccgaaacggccgttcgatatcggcgctcatcaataatgcgggccgatcagtttggaagtccccttacgacttgacggctgaagaatgggacggcgtcctgaatacgaatttgaaaggcgcgtttctttgcgcaagagaagcggccaaaagaatgaaagaggcgaaaacaggcggtgccatcgtcaatatcgcttcgacaagggcatttatgtccgaaccggactcagaagcctatgccgcgtcaaaagggggcttaatagctttgactcacgcattggccgcgtctttaagcaaagattcaatcgtggtcaacagcatttccccgggctggattgaaaccggtgattatactgccctgtggcctattgaccacgcgcagcatttgtcaaacagggtcggccgcccacaggatatcgtcaaagcatgcttttatttgaccgatccggacaatcgcttcgtcaccggtacaaacataacggtggacggcggaatgacaaaaaaaatgatttatgaagaatag

SEQ ID NO: 2480 - DNA, 321 bp, Bacillus licheniformis
ttggggtttacaatgtgtcctagaatggaagccgccttttctttactcggcaaacgatggaatggactgatcatccatgtattattggatggacctaaacgatttaaagacttgactgaaatgataccgatgatcagccagaaaatgctggctgaacgtttaaaagagctcgaacactgcaaaatagtcgagcgtcaagtgctcccggaaacgccggtaaaagtgatctatcaattgacagacaagggaacggcgctggagcctgtcctcaaggagatacaaacctgggccgaaagccattgtgatccggaagggagctga

SEQ ID NO: 2481 - DNA, 621 bp, Bacillus licheniformis
atgtcttcacaagaaaacaccgctctcaacattctggaagagcgtacttcgattaaagaatatgacacaagcgtttcgatttccaaagaggagctgacaaagctgctgagcatcaccacaaaggctccgtcagcctggaatctgcagcactggcattttacagtctttcacagccaggaatcaaaagataggctccttccgatcgcgttcaaccaaaagcaagtcagtcaggcctctgcggtcgtagcggtgctcggggacttacaagcgaatctgaacggtgaagccgtatacggccctctggcagaagcaggctatatgactgaagaaatcaaaaacacgctgctcggacaaatcaacggcgcttatcaaaacagcggatttgcaagagacgccgcgtttacaaacgcatctctagcagccatgcagctgatgatcgcagccaaagcaatgggctatgacacatgcgcaatgggcggctttgacaaggaagcatttgtgaaagaattcaacatcgatgaacgctatgtaccggttatgctgatttcggtcggaaagccggtcaaacctgcgcacaaaagcaatcgtttcgatgtgtctgacgtatctacatggctgtaa

SEQ ID NO: 2482 - DNA, 606 bp, Bacillus licheniformis
atgaattatatatatgaaaaaggggactctgatctcaccctgttgttattgcatggaacagggggaaacgaacacgatcttctgccgatcggcaagatgattgatcccgatgcaaatttgctcggggtcaggggaaatgtgctggaaaacggaatgccccgttttttcaggcggctgagagaaggggtgtttgacgaaaaagatttgatcgaacggacggatgaattaaaaacgtttctagatgaagcagccaaggaacttcactttgacagaagccgggtggtcgcaatcggctattcaaacggcgccaatatcgcgggaagtctgctgttccgtcatgaacatgtactgaaaggggcgattttgcatcatccgatggttccgtttagaaatcgcaagctccctgatatgacaggtctgcccgtgtttatcggggccggcaaaacagatccgctctgtccgccgcaggaatcaagcgagcttgccggctatttcacaaacgccggcgccaaagtgctccttcactgggaaggcggaggccatcagctgacacacggcgaaattgaaaaggcgaaaatctggtatgaaaagcatataaaagcataa

SEQ ID NO: 2483 - DNA, 120 bp, Bacillus licheniformis
ttgatgaacagttggagagtctctttcggtgaattgaagctttccgaaatgattgcaggccaattgaaggcatacttccaaaatggaaaaggagtgaaaggaaatgaattatatatatga

SEQ ID NO: 2484 - DNA, 204 bp, Bacillus licheniformis
gtgaatcaacagattttcaaatgggttctgttcatcatcccttttatcggacagcttgccttgctgccgtttgtaaaccggatcgatccgatcgttttcggacttccgttttttcatttttggctggtgctgtggattgtgctgacaccgctgatcacatttgcgatttacagatttgagaaaagaaacggaggttatgagtga

SEQ ID NO: 2485 - DNA, 1482 bp, Bacillus licheniformis
atgcagggaaatctaacagcgctcctcattaccgccggcatcattttggccgtagtttgtatcggatttatcgccggcagcaataaacagtcgcggaaatcggttgaagaatggtcggtcggcggaaggcggttcggcgggctgctcgtctggtttctcgtcggcgccgacttgtatacagcctacacgtttttaggattgacaagcaccgcttttacaagcggaagcgttgcttttttcgcgatcccttattcggttttggcctattttatcgcgtacttttttctgccgaagatttggaaggtggcgaaagtacatcagctgacgacgctggccgattacgcaagggaacgtttcagcagcaagctgctgtcttcgcttgttgccattgtcggcgtcttgatgctgatcccgtatatctgcctgcagctcagcggaatccaggatacgcttcaagtcgcgggtacagggtttattaacgtcaatgccgtcgtgatcatatcattcatccttgtcgcgctctatacgtttttcagcggcatcaaaggtcctacatataccgccattattaaagatattttagtttgggtgatgatgctgtttatggtcgtttcgttgccgctcatccattttaacggctggacgccgatgattgacaagcttgcaaatgaagcgccgcatatgctgacgatcccttctgacggaccgcgcgggatcgcctggttcatcacggcatcgatcgtttccgcgtttgccctgttcatgtgggcccatgcggcgacaggcgtcttcacggcgaacagcgcggatgcgctcagaaaaaacagcatgtttctgccgctgtacaatatcgtattgatcttagtcattttcttaggctttatcgcatttctcgtacttcccgatgacattaatccgagatttgccttgctgtatttaatccaaagttcctacggcggcgtcacgcaaggattcgcctattcaacaattgccctggcaagtctgatcccgtgttcgatcatggcgatcggggcgtctaatctattcgccaacaatttataccgcgatttgatcaatccccgcgtttcggggcaaaaactgacgatcattacgcgctcaatggtatttgtcgtcatcggcctggcccttttatttggaatgctgttccccgcagcgcttgtcacgcttcagcttctcggcgtttcaggcatggtgcagatattcccggccatcgtcatcagcctgttctggaaaaaccagacgaaggaagcaacgatcatcggtcttctcatcggccttgccgttacatttaccgtttatttgacaggggccactttcggcatttacgaaggattctggggccttgcagccaaccttttgactgttgtcttgttgaatccgttttttgtgaaaaatgtaaaacacaattctgtgatcaactatttgtttcatactaagaagaatgtgcaaaaaagcgcctga

SEQ ID NO: 2486 - DNA, 1398 bp, Bacillus licheniformis
ttgaaacagcagttgaaactctttttggctgtattgattacggccgtcgccgcctccgcactgacgctttatctggtgggcaaaggcagcggcggttcagtatattccgcttcagattccgagaaattcgaaaagctgatggcggcgtacgacaaaatcaagagcgactattatcaaaatgcagacgatgaaaagctgactgacggcgcgattaaagggatgcttggagctttggatgatccatattctacatacatggataagaaagaagctaaaagctttgaagaaagcattacatcttcttttgaaggaatcggcgcccaagtagaagaaaaaaatggacaaattctaatcgtcgcgcctattaaaggatctcccgcagaaaaagccggcttaaagccgcatgatgaaattcagaaagtggacggcaaaagcgtaaaaggcaagaccgtcaacgaagcgacagcgatgatccgcggcaaaaaaggcacgaatgtcaaacttgttctcaacagggaaggcgtcggccaaatcgatgttacgattaagcgcgatacgattccgatcgaaacggtttattccaaaatgatcgacggcaatatcggtgaaatccaaattacgtctttctctgaaaataccgcaaaagaactgacaaaagccattgatgacttgtctgaaaaaggtgcggaacgattcgtgctggatctcagaggaaatccaggcgggctgatggaccaagcgattatgatgagcaacatgtttgtcgataaaggcaaaaccatcatgcaggttgaatccaaaaacggaaaaaaagaagtgtacaaagctgagaaggagcgaaaagtgaacaagccgaccgttgttctcgtcaacggaggaacggcaagcgccgctgagatcatggcagcagcacttcaccagtcttcaggcatcccgatcgtcggtgaaaatacgtttgggaaagggacggttcaaaatgcggagagcttctccgacggatcgaccgtcaagctgacgattgccaagtggctgacgccgaatggggactggattcacgaaaaaggaatcaaacctcaatataaagcggagctcccaagctatgccaaactgccgtacctggattccaaaaaagagtataaggaaggcagcaccggagacgaagtgaaagccgcccagcaaatgcttcaagcgctcggctataagctgaatgcgactggagctttcgacgcacagacggaagctgccgttaaggcttttcaaaaagaccaaaagctgaaaacgacaggcatcctaacgggcgagacgacaatcagcctgacaagcaagctgcaggataagctttccgacaatgatacgcagttggataaagcgattgagatcttaaaaaaagagaaataa

SEQ ID NO: 2487 - DNA, 711 bp, Bacillus licheniformis
ttgagcgattatttagacatgctcgccagcttcggcgtctcatccgctcatcccggcgggatgtccctgtcaaaggcagtgctcgccaaagccggcatcgaccctgagcagccgattcttgatgcaggctgcggaaccgcccagaccgccgcttatttgggtcagcttctgtttcctgtcactgcccttgatgccgacccggtcatgatcgataaagcccgacagcgttttaaaaaagaacagctttccattccggctgtccgctctccacttgaggaaatgccgtttcagtctgaaagctttgcctgtgtattaactgaatctgtgctgagcttcacaaatatccggtctgctttacaggaaatccggcggattttaaaacccggagggatgctggtcgcgatcgaagtctgccttaaggaaggaaacgcactgacagacgaagcaaaaaaagaaatcacggaattttacggattcaccgcattatatgacgaggatgagtgggtcaatgtccttcgagaagaaggattttcaaagattgacatcattcctgtcgtattggaagatgcaggagacccggatgacgccgttgaaatggatctgtcgcctgcaatttccgacaaagactatgaaacgatggaaaaacacctgcattacctggaaaaataccgggactctctcgatcatattatttttatatcacatctataa

SEQ ID NO: 2488 - DNA, 255 bp, Bacillus licheniformis
gtggaccgatattataggttttgccaccaaaatattggcagagttgcgagaatcaccgacaaaggaggccgcgtccatgtcggaagaatcgtccgtgtttcaccaagcaaagtatatattgccccgatgatcagacggggaggccgcgggttcgcctacggatattacggcggctggtggggttggggccctgtatacggacttgccctcggtctaattgccggtgtggctcttgcaggcttgtttttttggtaa

SEQ ID NO: 2489 - DNA, 822 bp, Bacillus licheniformis
atgaacggaaagtacaaatacgtgacgattgcttcattgctgagtgcagcggtcctgcttggcacaggatgtaccatgaccgaacagaagcaaaatgacacggctaaaacacagaatactgcaaatgcaagcaaggatgcaaaagaccaaaagtcagacagcagcctggaagatcaggacttcatactcgagagcaagtactttaatcaaataaaagatgtagacgggctgccgacgattcaaaatccggaaaacataatggcgcttgtaaataaagaatacgcgcttcccggcaactatgcaccgagcgacctgacagtgcctgatgtcgcgttttcttttaccgaggatatcgacaagcgttatatcagaaaagaagccgccaaagcgcttgaagagatgttcagcgccgctaagaaagaaggctatgaactcgttgcagtgtccggctacagatcctatgacagacaaaaagcgatctataacaacgaagtcagccaaaagggagaagaaaaggcgaaagaagctgtggcatatccgggccaaagcgagcatcagacaggacttgcgatggatatttccagcaaaagcaacggcttcgccttatcagaggaattcggcaatacgaaagacggacaatgggtcgagaagaacgcctacaaatacggctatatcatccgctatccgaaaaataaagaagacatcacgaaatataagtatgaaccttggcacctgcgctatgtaggaaaaaaagcggctaaagccatccaagaacacgacttgacgcttgaagagtattttaaacaggtgaaaaagatataa

SEQ ID NO: 2490 - DNA, 699 bp, Bacillus licheniformis
atgagcgtacatattggcgcagaaaaaggacaaattgcagaaacggtgctgcttccaggagacccgctgcgcgcaaaatatatcgctgatacatatttggaaaacgttgaatgttataacgaagtacggggaatgtacgggtttaccggcacttataaaggaaagcgcgtttccgttcaggggacgggcatgggtgtgccgtctatttcaatttatgtcaatgaactgatcagaagctatgatgtgaaaaacctgatccgcgtcggatcgtgcggtgcgatcagaaaagacgtcaatgtaagagatgtcattcttgcgatgacttcatcaactgattcacaaatcaacagagtggcattcggctcgatcgactttgcgccctgcgcggacttcggcctgctaaaagctgcttatgacgctgcaagtgagcggaacatcccggttacggcagggaatgtgtttacggcggatcaattctataacgacgacagccaaattgagaagcttgccaaacacggagtgcttgcggtcgagatggaaacgacggcgctttatacattggctgcgaaattcggccgaaaagccctctccattttaacggtcagcgatcacgtcattaccggcgaggaaacaacggcagaagaaagacagacgacctttaatgatatgattctgctggctctggatactgctttgtaa

SEQ ID NO: 2491 - DNA, 156 bp, Bacillus licheniformis
gtgaacgaaacatcgcttttcctccatcctgaaatagctaatcgtaatgattcttttttaaaggtatgcctgtccttttttaaacatgacaagaaaaagaatgatgccgaatcggagcagggctttattttctttttccgcgatgttggtttataa

SEQ ID NO: 2492 - DNA, 1008 bp, Bacillus licheniformis
atgtttcgttcacttaacagttatttaatcgactttaccgggcttgttgtcatcggtgttctgatatgccttgtgtcagccggcgggtcgctcgcctcaggcctccccttccagattccggcttccgttctgcagctgaatacgattttcatcagcattttaatcgaagcccttccctttgtgttaatcggagtattaatcgccggtttcatccagatctttgttactgaagagcatattcgctccctttttccgaaaaacaggttttcaggagtgattgtcagctgtttgctcggcgcttgttttccggcttgcgaatgcgggattgtcccgatcgtgagaaggctcgtgtcaaaaggcgttcccatctatgccggcgtcggctttctgttgacgggtccgctgatcaatccgattgtcatcttatccacttatatggcttttggcaatgacttgcgaatggccgttttaagggttgccgtcggttttgccgcagcggtcgtcatcgcttttgcgatcagcatgatgttccgctcgagccagctgaaaacggaaagccggcagacagctgcacactgcgcccattccggcagaccatcccctttttcggaaaagctctttgatatgctgaaacatgctgttgacgaattctttgatatggggaggtttctgattatcggcgctttagttgcagcgcttgtgcaaacatacctcccgttaaaatcgctgtttgtgttcggagggggcatgcttgactcggcattggtcatgatggggctggcttactttttatcgctgtgctctgaagcggatgcatttatcggcgcttccttcaccaatttgtttccttcctcatccatccttgcttttctcgtttacgggccgatgctcgacttaaaaaatacggtcatgatgctgcatgcgtttaagccgaagttcgtcatttgtttgtctgtcctgatcaccgttgttgtctttgtttgtatcaaagttgtgagtttgctgtag

SEQ ID NO: 2493 - DNA, 873 bp, Bacillus licheniformis
atggtttttcagcttcggcaatttttgcgcgcacttgtgctggctgccttttccgtctttattttcaagctccattacacaggggaaattgataagctgattaatcctaaatacgattacaccagcctcatcgccgcaggtgtgttcgcgtttctgttcatcattcagctgaccaggatctggacggtgaaggatgaccgcgctggggattgcggctgcgggcatgatcatggcgagtcaaagccctttctcatcaggctgatgcattatgccgtcatcgctcttcccctcatcaccggattcaccctttccccggctgtactgaattcgtctgtcgccgccaataaagggacgatgctcaccaaaacggagatcgcccctcaaactgaaggcgaaaaggaacatgtcatgacaccggagattcagcaaggactcgccgattcagcgatgacgaagtcggcgtatgacaggaagatggatcagtttaaacaggaaaagcggattgtcatgaatgacgacatgtttgcagactattatgatgaagtgacaagcaatcttgatcactatattggaaaggagatcacggtcaaaggcttcgtccataaggaagcggggctgagcgcacgccagctcgtgctgtcccgatttatgatcacgcactgcatcgcagacgccagcctgatcggatttctcgccgaatggaacggtgctgagcaattgcagcctgacacatggattgaattggaaggaacgcttggcaaagcgtcttataacggctctgtcatcccgatcatccgcacgaagcgatggaaggagatcagcgagccggagcagccgtatgtctatccggccgcgattagtatgacagattaa

SEQ ID NO: 2494 - DNA, 132 bp, Bacillus licheniformis
atgggcaaaaaacagcgaaacagagtcaccggattgaaaaaaaacaaccacatcccgacaaaggacgtcatcgcggcagaggatgcgcatgaaaaggaatacagcgccagaaaaagaaaaaatacaacataa

SEQ ID NO: 2495 - DNA, 321 bp, Bacillus licheniformis
ttgccgttaatgtttcaactgtttaaaaaaaagctgataccttatgatgtgacgatttttcaaacgccttgctttggtgaagataagggatacgagatggtttacagaacggaaataaacggcagaacccatgaagatgtgctggaacggacgttttccactttcaatgtttatgacacggtgccgaatgattataaggcgagatttcttgcaactggcgacatcgttttaatcgatgaaggaagaaagggaaaaacctattataaactgctgtctacggggtggagcaaaatcaaccgcattttgctgcagtcttcgtaa

SEQ ID NO: 2496 - DNA, 720 bp, Bacillus licheniformis
atggagaccggggcggacctgctccggtttttcctatattatttgcccggcaggggagccgggtgtaaaatgtttaaaaacaatgtcaaggaggcactgacttttctaatgtataaagcactattttcagcagctgtctttgtcatcatggccattcttatccgcatcccggcggttcaatcatttgatgtgagcgtgatacaggctctcgagtctgtcagacatccggttctcacagcggtttttaaagcgctgacagagctggggtcaagcggcttcatgctgccgctgatgcttgctttaaccctggttctcgccgtctataaaaaagcagcggcatcactgtatctttatttgctgttttttgttgaaagaacggccaatgaagccttaaaaggctggattgccagagagcggcccgcgataaacccgctcgtgcacgaacggtcatacagctttccgagcggccattcgatgaatgcggcgagcatgtatccgtttatcgcatttctccttttgctctgcattcctttttttcaaaaacacagtcgcgcggtttacgtgtggacgggccttctcgtcggactcatcggaatcagccgcatgtatctcggcgttcattacatgactgatgttatctcaggtttttcgctcggtctcgcgctgtttttcatcttcaaaaaaattggcgaaaagtacccgcttgttcgacaaaagtag

SEQ ID NO: 2497 - DNA, 171 bp, Bacillus licheniformis
atgaaagaaattgaactgatgatagatacagaagaaatcgctgattttttttatctagagctgacaagaagaggctacataccgaacgaggacgaactgttcgaaattgccgatatcacctttgattatctgattgcaaaatgtatgatagatgagcatatagaggattga

SEQ ID NO: 2498 - DNA, 135 bp, Bacillus licheniformis
atgatccaaaaaacgcttgaagcacttgacggagaagggtttgacctggtattggggaaggtcttgaaagccatgttcgctcttattgtgttcggctgttttccttatttcttatatttgttgtttatcatttga

SEQ ID NO: 2499 - DNA, 681 bp, Bacillus licheniformis
atgaagtcaaacgcgcctaaattcaaagtcggggatgtggtcgtcgtcgtgatgtacgggacggtcggaacgattacaaaagttcataaaatcgataagcattttttgtatgaagtcaatcataatgaagtgctttatttcgagacttctcttcaactttacaaagattatgacggggtcattgtcgatacggaaaagcttgacatcgaatatgaatttttaatcggagatgtcgtctatgtaaaagattacggcaaagaattgtttaaaatcaccgggcacagaacggaaatttggagatatgtggaggatggctgggaagatatcatttacgagctgacccgtttgaaagacggagaatggcttgaaactgaagaagaagatttaacgctcgtgcttagaacctacgaaatggaccagttcgtccatcagcttctgtttgttcattatgtcggcgaagccggacaagagcttgatgaaccgatatctgaaaaagtgtttttgccattttctggtgattacgaggagcaggatcatgagcgcaatatggcagttactgtcgtggatgaactgcttgatatctacaatgactataaagtattgtatgaaatgtttcaggatgcggaatataaagatatgatggagtttgtgttaagctgcctgaaagaatatttcaaatga

SEQ ID NO: 2500 - DNA, 150 bp, Bacillus licheniformis
atgagttttccgaaaagcccagtcggctcgaacgaacgcaaaaaaaccgcagttctgaacaactgcggtttttttatcgctttgtttccgaaatatatcgttcccaagcctcatcaaatgtcgtcattgacgataaataatccccattaa

SEQ ID NO: 2501 - DNA, 319 bp, Bacillus licheniformis
ttgccggtttttttgcgtgtttcaacgggttttttgtttgtattttttcagacggcctgtataatagaacatcaaaagaggacaggaggggagaccgtgaagtctttttaccattatttaatgaaataccgccatccgaaaccgaaggacgcgatcagcgaattcgcgaaccatgcttaccttgatcacggatttcccaaggcatcaactcattacgatgaaatcagctcttaccttgagcttaatggggattatttatcgtcaatgacgacatttgatgaggcttgggaacgatatatttcggaaacaaagcgataaa

SEQ ID NO: 2502 - DNA, 282 bp, Bacillus licheniformis
atgaagaagtgtgaatggtgcaatgaagaaaaagccgcggcagcccgcacggcggtatattgggagcttcccgacgggacgaaagcgattgaaatcaccgacacacctgcggtggaatgcgaagggtgcgggatggtctatcaggaggacagtgtcacctgggaaattgaaaatcagctgctcttgattgatacaaaaaaactgccatcgtccgtttcatatgatgcgctgatgaaaacagagcgcatactgaagcggaattactttgacttttcctcatga

SEQ ID NO: 2503 - DNA, 414 bp, Bacillus licheniformis
gtcccgacctttgtcgttgacgcgccgggcggaggcgggaaaatcgccatccagccgaattacttgatttcgcaaagccccgataaagtcgtgctccgcaattttgaaggcgtcattacgtcgtatcctgagcctgaaaactatgttccggggagagcggacgactattttgccgaaatcttccctgatgtgatgaaggaaaaagaggagatcggcatatcggcaatctatgcggatcaagctctttcatacacaccggacggcttaaaacggctcgagagaagagaaagctattccaagaggcctgatcatgaaacattgaaaagccgccgggcaaagcgcgatgaattgaaagaaaagaaattccttgcccagcaaaagaaagaaggcgaagctgaggggcatgcgcaatga

SEQ ID NO: 2504 - DNA, 591 bp, Bacillus licheniformis
ttggcagcaaccaatcaaggtaaagtatttgaagcgaatgttgaaaaatcagcaaaagatcagagtatattcttttacagaattaaagatgttaatccaatgtttttaaagagagggactgcagtatccaaaaataaatacgattgtttcattcattataaggggtacttgttccctgttgagatgaagtcgacaaagaataagtcattctcgttcagcgagaaaattataaagcctcagcaaatcaaatatcttgctgaagcagccaaatacccatacataatccctggttttttgtttcaattcagggaaccagaaaataaagtgtatttcgtacacattgatgaattccttacatataaacatatagctgaaaatcagttagaacatacatacgagaataaagttaataaatcaagtattccgatcaacatctgtgaagagattggaactgaagtcagatggatgaagaagaaagtcaattatacatattacttaaacaagctctgtgatgagcttataaaacagtatggtcataagacaagatttgaaccacatacccttttgaaaaggggtggtgatgcttattga

SEQ ID NO: 2505 - DNA, 177 bp, Bacillus licheniformis
atggaggaaagcaatcaacttgaatcgcttttcaacaagattcagagaaaactagataccgcgaaagaagctgtatcgggcaatgattatctaagagccaacagaaatctaattaaccttgcaaacgataatgaggaactaatgtatcaatgtaggttggccatgaaaagagtggac

SEQ ID NO: 2506 - DNA, 450 bp, Bacillus licheniformis
atggatgtaattgatgaatttaaaggtaagtattatttcttaagcaatttctattcagcactagttatgtatcaaggaatcacatatcaaaataatgaagcagcttttcaagcaatgaaagtgacagacaaatcaattcacttggagttttcagatttacctcctaatctagcaaaaaggaaagggcgtagagttaaactgaggccggattgggaagaagtcaaagaaacgtatatgtatgagatcgtgaaagctaaatttgaacaaaatgatcaactcaagaatcgacttttacaaactggggaatcaactttaatagaaggaaatacttggggagacagagtatggggagcttgtaacggaattggagaaaacaaacttggaaaaattttaatgagagtcagaaaagaactgaaggaggtttcacatggaggaaagcaatcaacttga

SEQ ID NO: 2507 - DNA, 228 bp, Bacillus licheniformis
atggcgaaagtttataaagcagaattttatattacagatatgtctaatgaattttacagtgttgatgatcttaaagaaaaaattgaagaatcgccaacattcaggtgggcacttgttcatgtttcagatgttaaagaatccgaagaatttgagtgggatgatgatttgaaaattaacaatattgcggctacaacagaagatcttgaaaagtatttcaagggaagatga

SEQ ID NO: 2508 - DNA, 357 bp, Bacillus licheniformis
atgattctcaaatggatagaaaataaggagaagaataagttgatggatgagctaagtactttcatcgacaatctgatgggtgaaagagattcatttgcagaaaagctgaggaacttcaaaaaagatgaagaaatctctaaattgttaaaagaaaacgagagtcttagaattaacagccttcatacattatctgaaaaagaaagggaggaagcggatgcttttagggaagaacattggaaaaaatgtaaaggtaacacatcttttcttttaacaggtgcaagtattggtacaagagtagaggtgatttgctcaaaatgtaaaacccaaaaagacatcacagacattagtgtgtggtaa

SEQ ID NO: 2509 - DNA, 171 bp, Bacillus licheniformis
ttgaccgttacagcttggattttgttgattatgtttggtttattcgccttatcagatttgaacttaactgaagatgaaacaaagcatatcaagttcttcataataatgaaatttgtttctgtctttatagctgctatagctgcaggcgtgatttggggagggctattttaa

SEQ ID NO: 2510 - DNA, 180 bp, Bacillus licheniformis
atgagttggggtatatcatcaaatgcggcaaataaagagaaattgaaggctgaaatggctgattacctaaatggtttaaattcaacagggataatgagttatgaagtatacagtgaggcattgagtgtctctatgaaattacttgacaaaatgtatgacttaggaaagtttgaaaaatga

SEQ ID NO: 2511 - DNA, 828 bp, Bacillus licheniformis
atgaaaattgactatgtatcagatctccatatcaatcattggattccttggagtaataaccagctcaaatgggagaagcgaacgaggaagattgttaataggctaatttcaaacggcaatggagaggtactaatcattgctggtgattttactgaatggaatcaacaagccatttgggttttagatgaagtagcaaagcagtacgagaaggtttacttcacatatggaaatcatgatctttatttactcagtaaaagtcaaaaaagaaaatactctgattcattaggcagggtgaatgatctaatcaaaaaggctgctgacatgaagaatgtgactccattagtcaagtcaacggatacatacaaaggaaaagtctttgcaggagatgttatgtggtatttaccaaaaggaattgaagggtgggatttcttcaaaggagtttctaatgattcaaactacattagcattaatggttacagtaaagaagatggagtaagagcaatgtggaaagattcgatggattggtatgaaacgctcgaaaacactcatgtcgatgtgtttgtttctcacgtcccacctattcacaatccttattctccatttgagcctaacagttgttatatggttgatgtaccattcattaacgctaaacattggatttgtgggcatgaacatttgcaaactgagtttgatcatgaggggacaggctttcacatgaactgtattgggtatccatacgactacgataagtatccgagtgtaaacgagataccaggtaatgaagtagatgcctataaaacgtttgaggtcaaaacctttgagatttga

SEQ ID NO: 2512 - DNA, 522 bp, Bacillus licheniformis
atgactaaatattataaggttgacaaaagttctgatttacatagtgatctggaatacgtttttcatatcaaaggaaattttcttaaggagatgaacgaagaaataagccaggctattggaatagaagatgcctacaataaggttgtttatagtaggagttctgaacctgttctgtttatcgagagcaaattcaaaaatgaagtcgaagaaagtgatttaaaaaagcaccctgtatgctcaagagacaaaactttttatgagttcaagaaaaggtcaaagccttataaagcattcttgaaatttgtaaaagatcatgatttgaacaatgtgattactcgtcaaaatttaaccatggtggtcagattctttcataattttagaggacgaattgaaattaattattttaatgaagaattctggattgagtctcaagaagagcagtacttagattacttacatgaaatcactgaagctgattactatgaaatgaagttaaacttagcgaagaagaaaacagcttaa

SEQ ID NO: 2513 - DNA, 200 bp, Bacillus licheniformis
atggcacgtaataacaacaacaatgaattggttgtaccaaatgctcaggcagcaattgaacaaatgaagcttgaaatagctcaagagtttggtaattaggtgctgagactacttcaagagcaaagggttcagttggtggagaaatcactaaacgccttgttcaaatggctcaacagcaaatgggtggacaatttcattaa

SEQ ID NO: 2514 - DNA, 474 bp, Bacillus licheniformis
atgagcgaaattaaaaagtatgtgcggattaagagggcgtatagcaaaggtgcctggtatgcaaaccagatcgggagcgtctttccttcactgggaacatgggagaatgcatataaagtcaatagtccagacagggcgttgtatattcgtcaagaagacgccgaacttatcgtcacagaaaagcgtccggccaaagttggcgagcgtgtgttgattatcgacgattttaacgaactaaagtacgtgcttcatgatattgttccggttataggcggtggtgataagcacggagttgcagtgcgaaagccgggagaatggccgatatatttaaacaacgagcagtacgaagtcatcgtcaataacgaaattaaaaacgaggaggctgacggaatggaaaataaactactaacgaaaatgctaaaacggtttttgaaaagaagggcgataaatacttcggctataaatctcgtctag

SEQ ID NO: 2515 - DNA, 210 bp, Bacillus licheniformis
atgacagagaagaaagattacgaaagaatgaagggcgaaattgcagacctacgctgtgccgttgccggactgattggggaaaacgagcagttgaagaacgcgttaaaattaattgaatcgaagtcagagcttcccgaaaagccagtcgatttagttccgattactgagctgttcgaaataaatttacacgcgaaggaggcgctaaaatga

SEQ ID NO: 2516 - DNA, 366 bp, Bacillus licheniformis
ttgatttctgaagcgagcgacacgcataagattgatctggcagcaaaaaaagttgaattagaaaaggaaagcgaagtccttcaaggggaaatactcgaaaaggaacgtgacatactacgactcgaaactgaacaggataaagagcagcttgatttattgtttgaaatgagtgaagttcttcagcaaattgaaaataagaaatgggttagtgcaacaatagcttttaagattattagaagtaatccagacaaatactctgatttatttgaaatgaaagatggtaaagcctacatagtaaataaaagattcaaagaattagagcacgaatttttcataataaaaggtgagctgaatgaagttaaatga

SEQ ID NO: 2517 - DNA, 852 bp, Bacillus licheniformis
gtgagtaatatagttaacactgcggatacagttttaaaatcaaatttatataaaatactgtccgaaggcaaatcagataaagggcaaaagattcgacctaagtggtctgatgatacgccagcttatacattaaaatgctttggagtgttgaatgaatatgatttacagaaagaattccctattgctactctaaggccaacggcttttaaatcagggttaaaagaaattctctggatataccaagataaatcaaacgatgttcagttgcttgaagaaaaatatggagttaaatattggcgtagctgggctaatgaagatggcaatttagggttagcttatgggagacagatgcagtatgagcacaaatacaaagaaggatactttaaccagattgacaggttgatttgggatctgaaaaacaacccatacagcagacgaatcattacaaatttgtataatcatcaagatcttcatggaatgacgttatatccatgcgctttcttgacaatgtgggattatgacggagaatttttaaacatgacccttgtccaacgctcgtcagattatcttgtagcagggaacataaatgtaactcaatatgcattattacagcatatgattgcacaagtttgtggttataagccagggaaatttcatcactatattaacaacttacatatctatgaccgacatatcgaacaagccaaagaaattattaaccgcgaatccttggcagcaccaaagttagtaatggataattcaataaagaatttttatgactataaacctgaacacttcattctagaaggatatagtccacatagccaaatcaaacttgaggttgccttataa

SEQ ID NO: 2518 - DNA, 288 bp, Bacillus licheniformis
atgaaaaaggtagatgaaataaagcaacacttagaaaaaattaataagctagaacaaacattggttgtttttgaggagtcagacgaattacaccttgacgtgctccataaaatccagggggaatttgatgagatcagtgatttagctttgaatgcttttcgtgaattaactgaaaaaatacgcaatgttggtacaaaaacaatcagcaataaaattaaagctttacccaatacagttcagaaaaatgtcaaggagaatatggatgaactaataaatgaattaaaatga

SEQ ID NO: 2519 - DNA, 441 bp, Bacillus licheniformis
atgcaaacaactcaacacccaattattcaaggatcaattaaagatgtaggctttgaaaacaaaagcaatttcaattacacatatgaagttgacaaagaaattcttcatgtttatgataccttgaatcacaacagcacttcggcaattaattgtgtagaagaaattattgctgtgttaaaagaaacgctgcaaccaaacaaaactgggataaacaaaattgttgaagcaattaagaacacaatatcttcaagttcacctttcaaaaaagtcatcatctataccgaagtaaataatttaacaaaaggatacaagaatagaggaagctttcttgatatccaagcctacgatccaaaacaaaaggattttgtcggctgggatcacgaagagctttaccagttttattacgattcacaggaactcagctttacgattaaaaaataa

SEQ ID NO: 2520 - DNA, 435 bp, Bacillus licheniformis
atgacactacatatcaaaatcaaatatgcagacgaaacacaaacgcgcatttcaaaaatcgaacagggtgattggattgatctgagagctgcggaagatgtatctattccaaaggatgagtttaaactgattcctctcggagtggcgatggaattgcctgaagggtatgaagcccatgtcgttcctcgttcaagtacatataaaaatttcggtatcattcagaccaattcaatgggcgtgattgatgaggcatacaaaggggacgatgatttctggtttttcccggcttatgcgctgcgagatactgaaattaaaaagggagatcgaatttgccaattcagaattatggagaagatgcctgcagttgaattggtcgaggtcgatcatttaggcaacaaaaaccgtggagggcacggttcaactggcactaagtaa

SEQ ID NO: 2521 - DNA, 339 bp, Bacillus licheniformis
atgtctgggcaaatcagttttgtgagcaaacaactatcattacaaaagataaaggtgtatttatggtttgccaagaagttggctgggacgatggagataaagagacaagagtattttatgcacatgaagccaaggaaatattatatcctcttagaagagaattgcataaaaaaaggaatcattgacgaatctgagtggggagaatatgaaaaagaactaaaaaagaaacaggaagctgaaagggaaagattttgtaagaaacaagaagaaagagaacgtaaaaagtatgaggagttgaaagcaaagtttgaaaatcaggcagagccaattaaggattag

SEQ ID NO: 2522 - DNA, 252 bp, Bacillus licheniformis
atgaaattaatcaaattagaacagccttcatgcaccccttgtcaattagtctctaattatctaaaagaaaaagggattgaatttgaggcgattgatgttactgtacggccagaagtagcagcagagtatggagtgatgggagtccccgtcactattctactcgatggagaaggtaaagaagtaaaacgcagcagcggttttaagccaaatgaattagatgaattaatttttaaaatcgaaaactgtaaataa

SEQ ID NO: 2523 - DNA, 996 bp, Bacillus licheniformis
atggcagaaaacaatgcaccatatacagcggccaactggtcgcagcacgaagacggattcacgcagatgttttacgaacagaacgttaagcagttttggcttccggaagagatttcgctaaacggcgaccttctaacgtggaaatatctcggagccaacgaacaagatacatatatgaaagtgttggccggtttaaccttactggacacagaacaagggaatactggtatgccaacaattgctgagcatgtggaagggcatcagcgcaaagcggtgctgaacttcatggcgatgatggaaaacgcggtccacgccaagtcctattcaaacattttcatgacgcttgccccgacagagaagataacggaactgttcgaatgggtgaagacgaatcgctacttgcagcggaaagccgcaatcattggcggactgtataacgcgattgaggcaggcgatgacatttcgttatacaaggcgatggtcgcatccgtttatttagaaagcttcctgttctacagcggattttattatccgttatatttctacggtcaaggaaagctgatgcagtgcggagaaattatcaacctcataattcgggacgaagcgattcacggtgtttatgtcggtttgcttgcccaggaaatttacaacaagaaagacgaaggcacgcagcatcgacttgaaatgtttgcgttaagccttatcgaagaactctatcgcaacgagatcgcctacactgaagaactgtatgatcaagtcggcctcacacatgacgttaaaaaattcatccggtataacggaaacaaagcgttgtccaatctcggattcgatccgtactttgaagaagaagaagagatcaatccgatcgtgttgaacgggttgaatacgaaaacgaagtcacacgacttcttctcaatgaaagggaacggctacaaaaaagcaacagttgaaccgttaaaagacgacgatttttactttgaggaggcaccacaataa

SEQ ID NO: 2524 - DNA, 984 bp, Bacillus licheniformis
ttgattaagattcttgagttatttgggggaattggggcaccgaggaaagcattagttaacctcggtgtggatcataaagcaattgattatgtagaaattgacgaaaaggcagtaagggcatataacgcactatatgaccatcgctataagccacaaagcgtagtggggtacgatttgcgaccagatgttttagtgcatggatcgccttgtcaagattttagtagagctggtcaaagattgggaggaaatgatgaagataaaacaagatcttcgctcatgtgggaaacgttaaggattattgaaaatatggggaattggaaaccaaagtatgttatttgggaaaatgttaaaggcgtacttgataaggatatgattcacaactttaacaaatatctttcgaaaatgagcgatcttggatatacgaattcatttgaagttcttaatgctatggattttggtgtccctcagcgaagagaacgagtatttacaatttctatattggggaataaggcttttaacttcagtaagctaaatcgaaaaacagcacaacacatcaaagagttcttagaagttaatgttacagctcctcagtatatgattaatattccaagtatgttaaatcgtatagaagagttcaatccaaacgcagatgagaaatatcgttatttagatgtaattgaggacagttgctggacaatcagcactcgacaagatagatgtccgaatgcgggaattattcggataggtgaattaaaatatcgctatttaactgaacgtgagtgttggaggctgatgggctttgatgattctgactttgaagaggtcttaaaagagtatcctacaaaaccaaataagcgcaatgcaactttatataaactagcaggcaatagtattgttgtacaagttttagagtctatttttgaagagttattaaaagaggaacttaaaacagaagttgctaatcagtcattagaaactatttga

SEQ ID NO: 2525 - DNA, 174 bp, Bacillus licheniformis
atgcggaaggttaaaatcgagggctacgtgatttacaacgaggacgaattaattcacggaacgtgtgtgacgcatggaatcgatcattggttattcaacgaagactttcctcgcgaatggtctttcagcgccgtatcagatgaggaagtagattatgacgaggaggacgaatag

SEQ ID NO: 2526 - DNA, 699 bp, Bacillus licheniformis
atgagcgaagcaagacggccacacaacaaattagatatcgatgaggaatttattcgcaaaaattattacataatgagcgcaagagaaattggtgaggttttgggtgtatcgcgggaagcaattaatcatcgagtaattaaaatgggattacgaaagacacaaatacctttcatgaaaagagagggagaaatattagtcccaatacaagagcttcccaactacggggtcacaaatcacagccgagtagtcaatctaaaacgcatgaccttagttaaaacgaaaattgatcgtgagggctacgttaaagtgactcttaacaaaaacggtaaagctgttgacagacgtgttcaccgtttagtagctcttcatttcatacctaacccgaataatttaccgcaagttaatcatattgacggagataagtcaaatccaagtattaataatcttgaatgggtgacagaaaaaggaaatgctcaacacgccttaaaacatggcttgattcgtgttggtgaaaagagcccaaatgctacaattactgaaaaacaggcactatcaattttaaaagattttcaaaacggtatttctgaggtaagaaaagctcacccatatgcgagtaaatcaattgtcgataaaatttgtcaaggtggaaacaccttgataaaacgtcttgaacgtgcaacgactagccggaaggcgtag

SEQ ID NO: 2527 - DNA, 393 bp, Bacillus licheniformis
gttacatatgaaagcatgacaggtaatgttagaagatttgtaagaaagcttgagcaaaaaatgcaaattaaaactatggaaatcactgaggatttaaaggttgatgagccattcatacatattacatacacaattaaattcgggcaaattcctgaaaaaactcagaagtttatacataataataaagattttttgtacggggtttgttcaagcgggaatcgaaattggggtagctattatgctgcggcggcagataaactctcacaacactatcaagtaccagtacttcttaagtttgaattaagtggatcagattcagacttggacaagttaatacaggaggttaagtttattgacagtaatcaatcaggtgccaaagtgggttcaactgaa

SEQ ID NO: 2528 - DNA, 348 bp, Bacillus licheniformis
atgggtgctgctaaaaaactgtatgtgaaaaaagatcaacttgtgagcattgaagaagctaaaagtaatatgacaatacatacaccggaaggctattctgtccctgttgcagtgggagagcttgtggccaccaatccaaaaggagagcaatacgtagtacctaaaagctacaggaacaaatatgtcgaagtcaaacaatttaaggatgcttcattatacgagtcaatggcaaaaggatatcaagaaatggctgcaattaatttagaagaggcaagcaccgggttttctgcggaaaatcaagcagaagaaatcacagagaaatttgtttcaggaagtataaacgaataa

SEQ ID NO: 2529 - DNA, 255 bp, Bacillus licheniformis
atggaaaaatgggtggttgtagttaaacctgatggagaaacagctaacggagaagtatacaacaattttgttacaggagaagatgtcacatttactgatttagaagctgcagaaaaatttgctgcgaagattgaaggggaagggagaagaatgcaagcaacagttgagccattggataatcatgtgaacaccaaaagagtgtttgatgacagctttgtagctacattagaagcaaatagagcatcccaaaattaa

SEQ ID NO: 2530 - DNA, 345 bp, Bacillus licheniformis
atggataaaaaatatggactttattgtatgggatcacttgttaacacttatgacgatgctatcgaggctcataatgacgctgtgtttgctcaagaagaaagtggagtaccacatgaagtgaaagaaattaaagaaacaacgaatttaaaccatttcaaatttaaactctctgaaaaaatacaatcaagatctgacgccgacttcagtagagttgtattcgaggcaaaaagaaggggtaacgctgacttgtatgatgtgactaacaacatgtatgacgaagcttttatttatacaaagtctaacgttgacgagtatatcaagaatggtgattggattttaatctaa

SEQ ID NO: 2531 - DNA, 267 bp, Bacillus licheniformis
atgaaattctttgaggtgtgtgacccatactacgcattaattaaagcaaatacaaaagaaagagcattgaagctttacacagaagcagttgcagatgatgatggacacttaagtgatgcgattaaagaagtgggcatgctatatgctgcagttaaacacagtcgtacagtaacagaagatcaagagctatctccaatatcggatgttctcgaagagcttcaaagtgatgaggaaagagttttgatcatggacggaagtttactttaa

SEQ ID NO: 2532 - DNA, 198 bp, Bacillus licheniformis
gtaatcggttgtcggtttaaacactataaaggtggtctatataaggttattggagaggtcattcatactgagacagaagagaagcttgttacatatgaagacatggatggcattctgtgggcaaggcctaaggacatgttctttggaaaagttgttgttgatggaaaagagataaataggttcacaaaaataaattag

SEQ ID NO: 2533 - DNA, 192 bp, Bacillus licheniformis
gtggcttatgatgagattgatggcaagttaattaacccaaaagtaagtgatgtaattaaagcattacaagatcaacttgatttttacggcgacacaccagttaacttcaggattgatggtgaagaagcaagggatgagattcaattagatccatataaaaatgttcttgtgttgcatttagaggaagtttaa

SEQ ID NO: 2534 - DNA, 321 bp, Bacillus licheniformis
atgaaaatcaaaaatgtagaactgtacagagtcattgaaaataaatatttacctaatgacagaatcggaatcatggaattcgaaaattgtgagatgtatgaggaaaatcagcatattttcttagaaacaaatgaagaagctattgattatcacactctctataattatttagataagaaactattcttaaatgtaagcaggaatgaagtggaaaggccttcggttattccagttaaatttaaaagagatgttcatttagcaaaaaaagtaaccagattggaatttgaagttcaagaaccgtgtaatataactatttcttaa

SEQ ID NO: 2535 - DNA, 432 bp, Bacillus licheniformis
atgaagagagtagaattaccaaatgaggtaggcaaagctttgaaggaattggttgagacaattggggaagaggaactttacaaatttgagaacttgctttgtcactataaacacagtaataaatatgaaaagaagacacaaaaacaaattgcaactattgttgatttcgtccgagattcagaaaaaaatcgtgttgaatattacgctgctttgacaagtggttttagtattaaaaccgaacctaaaaaagagaagaggagtgacaaggaaacagaagagaactgcaaaaatgaagggttagcaatctacataaaaggaaaaatggtttgggggattccttctgaaaatttaaatagcaatttagaggctctaattgacggccgtttattaattaactggtcaagttttaaagagcgcacattttttaaataa

SEQ ID NO: 2536 - DNA, 390 bp, Bacillus licheniformis
atgtttgattttaaggaggtgagatttttgaatttattcagtagaggtaaaacaagcacattcattagcggtaacggtaaggtcaatattaatggggttacatatgaaggaaatagcattacgataaccaataacgaagttcttattgatgggaaggctgtagagagctctgtatctggagtggttaaggttaaaatcgaaggcagcccagttaaagtttactctgatgcttctgttgaagtgagaggtgacgtcttaggtgatgttgattcaggaggaagtgtaaattgtggcaatgttaaagggaatgtagatgctgggggaagtgtccgttgtggaactgtaggcggaagtgtagacgcgggtggcagtgtaagcatgagaagataa

SEQ ID NO: 2537 - DNA, 120 bp, Bacillus licheniformis
atgaatgtgcttgttttacctctactgaataaattcaaaaatctcacctccttaaaatcaaacatccgcttctgctatgattttcttgattgctttaatgaacaagtccagtactgctaa

SEQ ID NO: 2538 - DNA, 222 bp, Bacillus licheniformis
atgaactacatatgtgatatctgcaaaggatacaccgcacaaccgttatgtgtaagggtatctgaagagaaagttaaaacagaagaagacagaattgaaatcaactgttgtaagaagtgtggtgatgaaatattttacaaggttaaaaacgaatgccgagggatgaatattgagaaaacattaaatcatataggtcgtaattatccccataaaactaattaa

SEQ ID NO: 2539 - DNA, 159 bp, Bacillus licheniformis
gttgatcacttagatttgattgaagatcggcttgataagctgtatacatatttggagaatacatttacacatgaagaaagaagagcatggaaacgagtagaggaagatttgattttttctcttatgaaaatcaaagaaattaaaaatgaaatttggtga

SEQ ID NO: 2540 - DNA, 342 bp, Bacillus licheniformis
atgaaaaagttttacaaaggattgattgtttcagcattatctatttcttcattggctcttccagcgttagcaaatcaagcatctgcccatgaaccagcacaaattaaacaagttgtaaaacctgccgatgccattgcaacagtggattttcatatgctaaggaattctaatgttttgttgttaaatggctatacaagatgggaaatagtttctggcagccatcttatcagcataagtcctggtggtgttgtgtcttcccattcttcactcggtacagcattggtttatgcttatgatatcaatgataactatgtgatttataagattactgtagaacctcga

SEQ ID NO: 2541 - DNA, 588 bp, Bacillus licheniformis
atgctgataattttagagggagctagggggactggaaagtcttcagtcgcgtataggctaaggcagcggttaaagcacagtacattgattaacccaacaggctttcacgaagatggtgatgagggacttgctaagatatcaaattattacgaaggaatattcgacctcttatacaaatggaaggcgagagtgagcgattatacaacaatattggatcgtttcttcccaacggagatggtgttttcatccctatataaggaatatgattttcatcaaaaatttaagagcctttgccaactgctgcccacactggatgatgatatttatattttcttttttacggtatctaataaggaagttttaaaagaaagactaaacagagataagattcagtttggacaagtggaagaaagtgtagaggagtcattaaagcaacaagatgcttattataaatacataaacgaattaaaagaatatattgattggtttaaaaatggaagtatgaagatcatcgagattgacacggcttatttgtctcaggatgacgttattaactttgtaattaggcgcataaaaaggagtgaataa

SEQ ID NO: 2542 - DNA, 162 bp, Bacillus licheniformis
gtgtataaagtcgacgagaaggttattgttaatctctctggtgaaaaagcaactgtaaaaacagtggatgaacgatatcatcaagtagaagttcaatatgaagatggatcttatgaagtgttgggatggcacaaagtcagagggaaggtggatgaatgctga

SEQ ID NO: 2543 - DNA, 153 bp, Bacillus licheniformis
ttgagattgaatcaaaaggcttttgtagatgaaatggggacaggcattgtttcttacatagattatgagaataaaatagtgggtattgagtttgatggtatcggttatgaagaatatgattttgaagataaagatcttatcttattgcagtaa

SEQ ID NO: 2544 - DNA, 216 bp, Bacillus licheniformis
ttgccaaagtattggacttacaatttgaacgatgaagtagagattaatagtaacgcaaagtatgggatgccttcatttgtaggacttaagggcgttattattgataaagtaaacagctggcaatatgattatgatgtacttcattacaacggtgagattgggagatacaaagaatcagaattgaatttaatacataaagtgagtgatacatattga

SEQ ID NO: 2545 - DNA, 717 bp, Bacillus licheniformis
atggaaattttcaaaaaactgatagactcaaacaaattaaaagtatataataaatacaaagagttgcagatctattctgtaatctttctattgggggtgggatcaacattaggctataagatgatagaggaacacatccagcagcaaaagaaagtttcaataaaagagccattttataaaaagccagacttcattcgtgaagtgaagtttgaaaggcaggtgctgcctcatttagagactcgccaagagattattgaaaaggcacaagataagtatttacatattaaagtagaagaagttaaaaaaaataaaccaaaaagcaaattaaaagaaaatacaaagaggaaagtttctttcaaacccaagcaaaagactcaaaagaggcctcacgaacaaaatcaagccattaaaatggaggccacggcttatgttccattttgcgatactggctgtatagggacaactaaaacaggctatgacgtgtcaaatacaatttactataaagggaaaagagtgattgcagttgatccatctgtaattcctctgcactctttagtgaaggtatcttataataacgattcgtttgaggcttatgctatagatacaggaggtgatattaaagggaatcgaatcgatcttctggttcaatcagaatcaatcgcaagagactttggtcgaagaaatgttgatgtgagtatcattacaaaagggagctga

SEQ ID NO: 2546 - DNA, 4944 bp, Bacillus licheniformis
gtgattggatgtcattgtcatacgtgtaaaagcaacatcaggctgctggattctaccaattcagtaaaagggttgcttgaaacagcgttagaaatgaattataaaggactagctataacagatcatgaagttctgtcagcgcatctggaagcaattcagactgtccgaagcatgaaaaaagagggggaaatgcctcaagattttaagcttatccttggcaatgaagcatatctggttgattctttagaagaagtaagagacaactaccagcctggtaaaacaaaatttcctcacttcttaatgctggctgttgatgaaaaaggacatgaacagctaaggattttatcatctaaagcatgggaaaattctttctacactggaactatggaaagagtacctacagtgaaaaaagacgtggaagatcttctcaagaaagatcctggtcacattattgcaaccacggcatgtctagggtcggaagtgaatatttacttacagaagatcatggaagttgaaaagaacgatggagatcctgaactaattaaagaatacaaattaaaaatacatcagtttattacttggtgtattgatgtatttgggaaagataaattttttattgagttgcaacctgctttgagtgaggagcagatttattgtaataaaaagttggttcagatagcggatggctatggcttaaaaagaatagtaaccactgatgctcactatttaagacccgaagacagagcaatacaccaagcattcttgaatgccaaagacggggaaagagaagttgactcattttatgaagcttgttttgtgcaaaatgtagatgagatccatgaaagaatgaattatatcgataaagagattgttgaagaagcaattcaaaacactcttttaattggtgaaatgattgaagattatacgattgagcatgagcccattattcctaaaatggaactgccaaacttcaaattgaggcatttgtttaaaccagcctacgataagtatgaatacataagaaaaatgtcggagtcaaaggatgaccaagacaggtatttattaaagcttattgaagacgggtttgaaaataaacttctaaaaaatgatctaacaagagatgaatttcataaaattctatccagaattaatgttgaattgggtgagttatgggagatcagtcaaaagctaaatcaatcgatggcatcttactatgtaactgtaagggaaatcattaatattatttgggatgatgaatgtggaggagacagtttagttggagccgcaagaggaagtgcagcaggattcttaatcaattacttgcttgataatacacagattaatccaatgcaatacgacttgccgcattggagacatattcataaatcgaggccggatcttccggatattgacatagacactgaaggatcaaaaagagaaaagatactcaaagcacttcgcgaaagatttggagaaaaacgtgttctgcagatagctacatttgggacagaaggatctaaatcggcacttcaaactgcgtgtaggggattgggaatagataatgacatatcacaatttctaagtgaaatgattccatttgaaaggggatcaaactggcctctcaaacactgtttttatggagacgcggaaacaggtagaaagccaattaaagaatttattagggaagttgagcgctatcccaatcttaaagaaactgctttaaaaatcgaaggactaaccaataaacgctcatcacatgctgctggggtaattatttttaatgataagtatacaaagtctaatgcaatgatgaagactcctaatggggcatatattacccaattcaatatgggtgacagtgaagcaatgggatctgtaaaatttgatcttcttacgattgaagcattagataagatccgtgtaactcttgatcaattgatcgaaaacgaagaaattcaatggcagggctctttaaaagagacgtataacaaatacattcatcctgatgtgcttgagtatgaagacgcaaggttatgggaaatggccgggaatggagaaataatggatttgtttcagttttcaacggaggtcggccatcaagcagtaataaaagttcaacctaaaaatttgcttgaagctgctgttacaaattctttaatgagactcatgtcagatggcgaagagcaacccgtagacacttatgtgaaatataaaaacaatttgtcactgtggtacgaggaaatgcgtaaatacggcctaagtgatgatgcaataaaggtagttgagaagcatttaaaagacatctatggggttgctgacacgcaagaagttgtcatgcaaatggtaatggataaagaaatagcagggttcgatattaaggaatcaaactatttaagaaaatccatagctaagaaaaaagaggacgtattaaaagaggttcagaaattattcttcaaaaaggggaaggaaattggagcgtcagataaccttttgaattatgtatggaatgttcaatttaaaagacagtttgggttaaatgatagcccgtatgtggtgaacctgtaaaagcagggtgtgtcctcttctaaggatgctaacggtggaactctaagggagaaatcctatgacaataccgtgccaagcctaggttactaggaaggtgtaacgactatcccatttgggagtagttagtaggtgaaatccctacttacgaagcgccacacatctacgcttaaggaggtgataaagatggaagaatggaaaagaatttatataaatgggacagaaacagtttatgaaatatcaaacactggcagatgcagaaacataaacaaaaaaaatcatggaaaacaaagggggttttaaggccgagagtaaacaataaaagtggatatgttcaatactgtattgttcatcaaagtaagaaatattatatgtatgcacatagattagttgcaacgtacttcctcgaagaaaataagaatttacaagttaatcataaagatggtgacaaacaaaataatcacaaaaataacttagaatgggtaacagggaaagagaatatgcgtcattgttttgacactggcttatctaatattccaaagccgatagttcaatatacactaacaggacaaaaaattgctgaatataagtcagaaagcgaagcagcacgagcacttaacattgatgtaagaacaatttgtaatggactgattaacaaagaaggaagtcaggcttgtggttatcaatggagatatacaaatgacaaacgaaaagtcagcaatatctcgaagagcgtaaagttttactccagaggggtaatacaattaacaatagaaggagactttgtaaactattttagtagtattactgatgcttataaagtattgaataaaacagacaatggtgcaatttctcaggtgtgtaaaggaaatagaaattcgtttgcgggttataaatgggtttatgagcaagactacaaaaaaagcgtagatgaagatatagtctattcccctatttaaatatcgggaaaccgagggtgtaaaagattcttttagtttacttcatactttggcatattcaatcattgctctacaggaattgaacttaaactatcgatataaccctttatactggaatacagcctgtctaactgtgaacagcggaggagtcgaaaatgaagaagaatctgatgacctagacaaaaagaagaagacacaaaaaacagattacggtaaagttgcttcagcaatagggaatatacgacgccggggaattaaagttgatttacctgatatcaacaaggccggatttggctttaaagctgatattgaaaataactcaattatttttggcatgaaggggatgaacggtatcggcgacgaggttgttcatcaaattatcagcaatagaccttatactgattttgaggactttctagagagaatgtactatagcggtatcataaagaaaggacaggtcattcaattaataaagggaggctgctttgattcatttggagagagaaaagatttaatgaaatcgtttatttctttaatctccgaacctaaaagtaagctaaccatgtccaatttgaagatgcttattgaaaatgatttagttccaggggattttgcattagaaatacggttctttcgtttcaaagattatattagcaagagagtttttaaaaaggtcgattcaccaaaagacaaattattgctgcttgatgatatagcatctactttctataatgaacactttgatgaaagtggcatagttgatgtacataacggtaatcttgtgatatctgaaaaggcatttaaaaaggaatacgacagaaaaatgctgaaattgaaaaattggattggaacccaagagcctttaaaaaagctaaatgattgtctatttagacaagaatgggaaaagtacgcaaacggctcatatggaaaatgggagatggactcacttagttattattatcacgatcatgagttaagcaatgtgaatttttcaaagtacagcatcgttgattttcataaactgcccgatgaaccagtaaaaggtcgaccatacaagtggagaggaaaagagctttatgaatatgaaactcatagaattataggtacagctcttgatcgagataaaaacaaacacacaattacattgttaacaccaacaggagttgttacagtcaaacagtgggctgggagcttcagtcattacaataaacaaatttcacgaaacataaacggaaagaaagaagttgttgaaaagtcctggtatacaagaggcacactgttaatgtttactggctttagaagaggaaacaattttatccctaagacatataagaatagtgtctatcagcatacggtgtgtaaaatcgaaggtgtagacgcggaaggaaatttaatcttaacctcagaaagaaagcaattataa

SEQ ID NO: 2547 - DNA, 705 bp, Bacillus licheniformis
atgcagaaacataaacaaaaaaaatcatggaaaacaaagggggttttaaggccgagagtaaacaataaaagtggatatgttcaatactgtattgttcatcaaagtaagaaatattatatgtatgcacatagattagttgcaacgtacttcctcgaagaaaataagaatttacaagttaatcataaagatggtgacaaacaaaataatcacaaaaataacttagaatgggtaacagggaaagagaatatgcgtcattgttttgacactggcttatctaatattccaaagccgatagttcaatatacactaacaggacaaaaaattgctgaatataagtcagaaagcgaagcagcacgagcacttaacattgatgtaagaacaatttgtaatggactgattaacaaagaaggaagtcaggcttgtggttatcaatggagatatacaaatgacaaacgaaaagtcagcaatatctcgaagagcgtaaagttttactccagaggggtaatacaattaacaatagaaggagactttgtaaactattttagtagtattactgatgcttataaagtattgaataaaacagacaatggtgcaatttctcaggtgtgtaaaggaaatagaaattcgtttgcgggttataaatgggtttatgagcaagactacaaaaaaagcgtagatgaagatatagtctattcccctatttaa

SEQ ID NO: 2548 - DNA, 1722 bp, Bacillus licheniformis
ttgaaatataaattaattggcaataatgatttttgtttttctcctttaaaaaccatacttaagaacagaggaattgaagatattgaaggttttttaagtttatctgaggacgcagtaaatcattattctaacctaattaatattgatgaagcagcagaatgtttaataaagcatctcagaaaaaaggctagaatttttattcaggtagacagtgacgttgatggagttacttcaagctctattattattaactatataaagagagtgttccctgaggccaatattgaatggagaatgcatgaaggaaagcaacacgggataattttagaaactatacctgaaggcgtggatcttgtcttaatacccgatgcaggctctaatcaatttgaagaacatctcgtccttaggcaaaaagggatcgatgtaatagtaattgatcaccacgagtgtgataaggagtccaaaaatgcaattgtggtaaataatcagctctcaccgaagtataaaaataaagctttgactggtgcgggtatggcatataagctctgccaagctttagatgaaaaactcggaaaaaatgaagcaaaacgatttatagatcttgtgtctgtcgggaacattgcggattcggcagattcaagggagccagagacgcgatactacatgaatcaaggtctcaaaaaggtaagaaatcctttgattaaagagcttttcataaaacaagcgtactcaaccaaagggaaaaagaacatacagaacacacagttctatatcaacccactaattaatgcagcaattcgtataggctcccaagatgagaaagatcagatgatgagatcgctgctcgaatctaatgaagagatatattacaaaaaacgtggaaaagatgagggtgaactggtatcgattcattgggatacagctagagtattggggaatattaaacagcgccaaaagaaaatggttgacagtgcggtattggaaatcgagaagcggattgaagaaaaaggactgttaaaaaataagattttaatagtttatattgaaggaattttaaacaagaacttaacagggcttgttgcgaatcagttagcagctgaatacaaaagaccagttttattggctagggaacttgaagatagaactctaggaggatcaggaaggggatacgacaaaggggcagttaaaaatttcaagcagctcttagaggaaacaggtaaattcgagtttgtcgaaggacatgctgaagcatttggattcagcataacaccagaaaatttaattcaggtcaatgatattcttaatcacaaattgaaagatattgtgattaatcaaaatgagtatgaggttgattttgagattgctgcggacaacctcactgaacgatttattaagctaatcaatagttaccaagactattggggatacaaagtagaggaaccgttgctcgctattactgatattgaaataaacaaagaagatatcagtcatattgggaaaaaaacaaagaatactgtaaagttcaaggttggcggaattgaatacatgaaatttaaaagtgatgaggaattctatgaatctctcatcaatagaggagatcgattggtacttactgtaatcggaagagctaaagtaaatgaatataagggtaaagaaacacctcagatcgaaatcgaagagatggaggtggtgaaagcaaagaaaaaagtgcttgttttttaa

SEQ ID NO: 2549 - DNA, 1134 bp, Bacillus licheniformis
ttgagatatgacaaagataaattaaaagaaagtttatcaattaaagacatacataagattttgcaagaacttggcagtgagacatataaaatagataacagcggaaatccaatctacagaacagtctgccacaataaaacaaaggggagttttaagctttattactaccatgaaaaacagctgtttcactgttatacagaatgtggggacacttttgatatttatgagctggtaatcagggctaaaaagcagcaagggatttctttcacatttatacaagcgattgaatttgtggttaatgtgtcaggcaaaacttttggactgggctttacttcttcaactaaaaatgaacatattgttgacgattgggattggatttccaagttcaaaaaacgaaagaaaattgaaacaaggctgccagcatacagtgaaaatgtcttggatgtttttatgaaatatccccatgaggcctggcttaatgaagggattagccatgaaactattacagatttcgaaatcgggtactattttcgaaatcgggaggaaggaattgttattcctcatagagatatcgctggaaggctaatcggcataagaagacgctcaatgattcaagaagacatagacaatggacgaaaatatatgccgttaaccgttgggaatatgatgtacaatcatcaaacagtaatgaacctgtatggactacataaaacacaaaaagcaattaaacgcttgaaaaaagcaatgatttttgaatcggaaaaatcagttttaaaatgtcaggatttctatggggatttgaattttacctgcgctgtttgttcaaacaatatttcaaacttccatagagacattcttctttcgttagatgtagacgaagtgtttattgccttagataaatttagggggattaaggaaggagaaagcaacgataagtacaaagaaaagctaaaaaactatgaagaaaaaattttgaaattagcagcaaaatttacgccatttatgcgtgtatatgttctctgggatacaaaagggttacttgattataaagacagcccagccgacaaagggaaggaagttcttgaggagttgatgagtaataaaattgaaattggaacaagagaaggtgaatag

SEQ ID NO: 2550 - DNA, 1515 bp, Bacillus licheniformis
ttgctacaagataagaaagcaattattcaagtgttaggcagtatattaaaggagccctctcttttatcagacagcaacaaatatcaaattacagcaaacgatttccctgaacgctttcattcaattcttttttttgcgatgtataacttatttcaccagggaacagaagttattaatgaaattgaaattgatggctatcttagagatttcgatatacaatacaaaattttcaatgaaaacaacggacatgattatgtcgagcaaattcaaaagttagctgtagtcgaaaactttgattattattacacaaggctgaaaaaatttagccttttgagagagatggtcggcttaggctttaatattgatgaaatatacgatgagtccataattgatcccaaagaacaagaagccatgaaagagagattcgacaaaacatctatcgaagatattctttccttttatgaaatgaaaattgttgatattaaagagaagtttagcacaaaccctgaaagcattggaattcaaggcggagagggagtagaggagctactcaaacgacttgaagattcaccggacattggagttcctatgaacagtgagatgttaacatctatttttcgcggttctaggaaaaagaaattttatttgaggtcaagcatgactggtggaggaaaaacccgtaatatggtggctgatgcttgcaggcttagcgcaactgaattatatgatttaaagcagaacaaatgggttaaaaacgattttcaagaaaagtcggtagttatttctactgaaatgatttctgaagaactgcaaagtttagctttggcatatatcagtggagttgaagaaaaaaaaatacttagaaacaccactacagaagatgaaaaaacgcgtgtaaaaaaagctgccaaggtgttgaaggagtcgcctatttggtttgagcatttaccagatttcaatattaaagagatagagagaacaattgaaaaaaacgtaatcagaaatgaagtcgaatacgtttattttgattatattcattcctcagtaacgatttttgctgaaatgagtaagaaaagcggggttaatttaagagaagatcaaatattattacttatgtcggataagcttaagggactttgcaacaagtacgacatctatatgatgagcgcaacacagttaaatggtgattggaaagatgcatggctaagagggcttcaaattgatgctacatatttaagagggagtaaagcgattgccgataaaactgatgctgcaatgattgttttgccattaagtaaaaaagaaaaagatgctattggcgccatcttagaatctggcttctatccggagcctaacttcgttactcatgtgtttaaaaacagagggaatgaacacgataaagtcaaagtcttttcacatattaatatgggtaccatgagaataaaagattgctttgtcacagatgtggacaataaattaatccaaatcgagaaattaattataaaagcagggtag

SEQ ID NO: 2551 - DNA, 471 bp, Bacillus licheniformis
atggcacgtcgagttaaatgtccatactgcgaaacttatttagacaaagatgatgcaatcccttataaaaaaagatattatcaccagcattgttttgatacttggaagatggaagcagaacatcgaaaagagttaattaaatacatatgtgaactatataagattgatgcaccaactggaatgatgttaaagcagattaaagaattccaggaagaatacaaatacaaattaaaaggtatagaattagctttaaggtactttcatgaaacgctggggaatcctgtccgtgaaggagatggattgggaatagtcccattcatttatgaagaagcaaaagcggattatcttcagaaaaaggcgattaaagaatcagttgaaaaagcaaaaaaacataaaccaaaagaaagaattgttgtgataaaaaaacaaaatagaaaaaatataaagattgttgatatatctactttgtag

SEQ ID NO: 2552 - DNA, 972 bp, Bacillus licheniformis
atgacaatagacatttttaaccctcagatttctgtagtagcaaaaggacttgaaggaaaagttattacgatatatggatctaacaacttaggaaaaacaaaacaaagtaccagaatgaaaaagccactctatcttccatttgaaaaaggattgaatgcaattgctggagtccctttcatgccgattaatagctggggagatttcaaaaaagtgaacaagcagctcacaaaaaatcccgaaaaggctaaagaagcttatcaaaccataattgttgatgaagttgatgctttctcaaaatatgctacgagatatgtatgtgaccaatatgatgttgatcgaattaaggatggaaacgatggatttggcttatggaaagagtatgaaaccgaaatctgggaggaaattaacaaactcttaaatgtaggatttactgttgtctttattgctcacgcaatcgaagataaggatggaaaaatcattcctaaaggggataagcgagtgctcgcaccagtaatcgataatagcgatatagtcttattccttagctcaaatggtgtggatgaagataatagggtaattaaatctagcgcttggttagctgaaacaaagaaattttttgctcgtagccgttttgattatattgatacatacattgaggagtttactgctgagaaccttgaaaaggctgttatcgaagcaattaaacgacaagaagaagcagaaggaattcaggccgttacatatgaagaacagaagcaaaagaactcatcagagaaattggactatgaccaattaatggagcagataatcgaaatcggcacaaagctaagtgaagaaggcagacttgaggaagtaaatgaggtaaccgaaaagcatctcggtcaaggggcgagggtaacagaatgtacgaaaaaacagacagatgtaatgtcagttattttagacgatcttaaagaccttcttgaaaattaa

SEQ ID NO: 2553 - DNA, 915 bp, Bacillus licheniformis
atgtcagaaaatcaaacagtattgcgtgaagcagaaaacaaagtagttttagagggattgcttctagaagttcgtcacaacgaatggaaaagtggagaagggctaaatattgaactagatatcgaaacagctccaaacgaagtacatactgtcactggaatgtcaaagtataaaaaagaagacggctcagaaaatgggattgctaagggttataaaacaataattaatgactataagtctgtagctactcatggcaaagaagaagctgacaaagtaagaataacacaagggaaaattggactgaatgaatattatgtccaagacaatttaaagtcatacccgcaattatccactaactttgttaaccgcttaaaatcagatgaagaatacaatccgagagcaaagtttgaagttgaattatttgtaaaaggggttaaagaagaaaaggtgaaaggggaggaaacgggaagagttctattggaaggatacattcctttatatggaggaaaaattatcccctttacatttgcggtaacaaaagagggctctgattacgtagaaaagaattacgaaaaggggaacaccgttaaagtattcggggatatcattaattttaaagaagtgaaagtgaccgttcaagaatcagcatttggaatagacaaagaaaacattacatataacacaaagcgtgaattcttaattacaggtggctttgaaccatatgacgaagacgataaagcagcttttgacgaagcagcagttaaagcagcattgactgagagagagcttaaactagaggaaatgaagaatgacactcagaaaagcaataaaaatgagaagaaaactggattcggagggaaagcagtcacaggttcttctcaatcgatctttgaagatggtggtttgccattttaa

SEQ ID NO: 2554 - DNA, 330 bp, Bacillus licheniformis
atgaaaatgctgaaggtgtcagaagacgctttaaattattacagggagtgcgtcaaggggaacaaaaacataagtgaagatcaggcaagagcaaagctcactcggaatgttaacttagtactagctgaggctccagagagggtattgagtagcgggctcttttctaaggtttacatgtatcatgatcttcatatcactgttagaaatggcaaggtgactaaaattgtaaaccataagagaccaagattttcgaagaaaagatacatagaattatcaaaagctttaggtatcaaagacataaagtattacagaaagcattccgctacaagg

SEQ ID NO: 2555 - DNA, 210 bp, Bacillus licheniformis
atgggtgtttttaaaaaaatcattattggctttttgctttgccatgtaattttgttaaccttgttgtacttcaacctttatattattggagcatttgatgattggaataatacttttatctatgcagcaattatcttttcctacattccagcaatggcattaatcgaatattttacacttagctatataattcggcgtttaaatttttaa

SEQ ID NO: 2556 - DNA, 1326 bp, Bacillus licheniformis
ttgaataaaaaggtactagtaggattgacatctatggcacttgttttctcggctcaaacagcttttgcaaaagggggagaattggagacagagattatatcaaatgaaaacacaattactttagattggaatgacactggcgataagtatgaagtgtattcagatgggaagctactatggaaaggtacggattctaagtatgtacataagaatttaaagcccagaagtccacaggaatatgatattgtatcgtatgaaaatggaaaaagaaaagatatggttagtgttgatacaacgaccctaccagagcaacgtatatcaacacaagacgtctcagacgaggatatgcctgacccgttaaaagctgaggagcacattgatagtactattaatgataatgtattaactttaaacttaagaggaaaaatccaagatgattttgatgggaagattgaagtttataaagatgatgaattaatagacaataatgcaggaacgacttttgtagatgataaagttgaatctggcaaaacctatgtctataaatttgttgtattgaagaagttaagcccggctgaaatcgaaaaggtaaatgaagaattcgaaaaaagaaatcaaaagttaagttttgaccagttcaaagattattattatcgtccttacgaatatataaaggccattaaagtgccggaacaaaaagagaatctgaacagtttggcttgggagccaccagtagggccgcacccaaaccaaatgggtattaaatatcgcacattcattccaactaagtatgcacctgctgcatccatttttagtggctggattggcggagataaatttggtggagacaatagatcctttagtttttctgggggatcacatcgaactcaaactgaggcagttgcgagatttaccagcagtggatcaagtacttatttcagaaaagacgtaaactatactagattatacgacaaggatggtaatttcaaaaagcaacaaaagccaacggataaaaatattactttcacccaagggaaaaaagataaaagcatgaattactttgttattaaacatgctgctacagttggctttaacgactttggctggacaactcctgcaatagattatacggccggagtagttatatataagagcggtcgtattacggtaagtggaacaagagaccaagcacctagtcatgaaatgtatgcatatatcccatattctgatgcgatgattacgctttttaaggcaagtaacaaggggttcgaatatctattcccaccaatgccttcagctaaaatgaacattgatattaaaccataa

SEQ ID NO: 2557 - DNA, 153 bp, Bacillus licheniformis
atgaagagggcttttgaagcaatactttataagctgataaaaaaggatgtcttaaatataggcatccttgtttttattttcaaaatctgcgatatttggttgaaaatacaaaaaacaagaaataaacttgtttttggtaaagttgtatgttaa

SEQ ID NO: 2558 - DNA, 252 bp, Bacillus licheniformis
gtgtcggttgaacaactatgcggaggacaatgtacagaagaaacaattgaattggttagaaagaaattactgcagcagcaaagaggcttacttactaaaaaggcaaacattgaagctaagattagacgtctaacagatttactgcaattagaaaatgacaagcttgaaaaagttaaatgtgagctaggaaagattcagtgtgagctagaggaactgggttgcttggagaaagcatggcatgaagagggcttt

SEQ ID NO: 2559 - DNA, 198 bp, Bacillus licheniformis
ttgtttagtttatttaaaccaaatacctgtgagcagtgcaaattctattcagaatacaagactgcagatgtgcttcaaaaagacaagacagtaacaagagggaagatgagatattgcaaaaagaagaaagatgaactccgagatatggagaaatgcgagctttttcaattgagaggggggaaaaataacttttactga

SEQ ID NO: 2560 - DNA, 243 bp, Bacillus licheniformis
atgagcggatattcacaaagacaaatttgcccgcattgcgatcatgcagaggaagagcactttgaaaatttagatcaggacagcgacggcagagttacatgtcattggtgcggaaaagattattatgctatgccccaatatgaatttttaggattcgaggttgaaaaaatttgtgaggactgcggcgagcaggaaagtgaatgttattgcgaggtggaggtgaaattatcacacaacttttga

SEQ ID NO: 2561 - DNA, 195 bp, Bacillus licheniformis
atgacgtggattgacttagtgagaaagtatttccctgatgcaaatgataagcagtgcgattttattttgtgggaaaagactgcttttcctttagtgcttgcggaaactgttgaaaagcagttgcaggagtatcaaatgatgatgtttgcagatagaaggagtaaccggatcaataaggaggcggcggaagaatga

SEQ ID NO: 2562 - DNA, 189 bp, Bacillus licheniformis
atgaaaatgcaagtgactttatcacctgaagaagtgaaacaaataattaaaaaccatttagaaaagaagtttggtaatgtcggcgaggtcacacttgaagtcgaccgggaattgagagggcattatacaaacgaacattacgaaactgttttcaaaggtgccaaatgcgaagtggaggcggcggaatga

SEQ ID NO: 2563 - DNA, 408 bp, Bacillus licheniformis
atggacattatcaagattcgttacacatttaggcataaaggtagcggcaacattgaaatgaaatggtataacatcgggcaattggaagaaagggcggccgccaaactgtccccggtatttttagatgaatatgaactaatcagccgggatttatacactggattgaaggacgaaaacggccgggagatttacgaaaaagacatcgctgaggaatcctatataaatcctatgaccggtaaaaaagtgattgatcgctatgtgatcgaatgggaaagcggcatcctcaaaatgaaacatatcgataatcaaaaaggggcagatagatacctttggatgcgatttaatgaagtagaagtcatcggcgacgtgtatcgaaatcctgagctaatggaggcggcggaagaatga

SEQ ID NO: 2564 - DNA, 363 bp, Bacillus licheniformis
atgagaagtaatgttgaaattaatgaattgattcaagaccgattattcaacggttacaagaagaggaaaatcactccagatgaatgctttgagcttttaggggatattgtggccgatgaattggcttttgataatgatgggaaagtggttaatcttaaaaactttgcgggagaaatgagtttagcattgcaggtagttgagaagctacaaaaaggttatggactaaatttttatttatcaagagaacacgattttatcggtctggaagattggtgtgctgcttttgacgagtatgaagcttgggcagaaaaaccagagaaagcaacatgcttagcggcattaaaagcactgaaaattagataa

SEQ ID NO: 2565 - DNA, 225 bp, Bacillus licheniformis
atgcaccaaacatcagtgcagcttaaagatgtgaaagtattgattaggggaatctggacaaagaagaaattcactgaaatagaacgtggcgagacgtttatgatcgaggaagatggagttttaaaaaagtacatagcaagaacaaaaccatattgggataaggaatttgaagcttttgttgttgatgtgatggataaaaacaaattgagaagagggattagatga

SEQ ID NO: 2566 - DNA, 813 bp, Bacillus licheniformis
ttgtttatagctccaatgctgcttgattcagccaaagagccatttgatgatgaaaactatattgctgagcttaaatttgatggaatacgaatcattctatctaagcaagatggtaagattaagctctacacgcgccataataatgaagtcaccaataaattccctgagctgcatgatattgatattcccgaagggacagtcctagatggggaaattatcgttaccaattctgatgggatgcccgattttgaatctgttatggaacgttttcaatcaagcaaatcttctcatcaaattgtttattgcgtgttcgatgtcataagattaaatgaaatatcaatagcttcaaatccactttttaaacgcaaggaattccttagatcactaaatcttaaccatccaaatatctttgtgattgaaggagtacaaggcaaaggaaaagcctattttgaaatggctaaagaaaagaaccttgaaggaatcgtgcttaagaaagcaaactccccttacgagatcaacaagagatcggaaaactggatcaaggttataaattatcagtacactgacgtgctcattactggatacactaaggaagatatcaagtttcttctcagttaccctgacggtttatctgccgggttcatggaatttatgccattcgatgaacgcaaatacttccactctatcaaacaaatagaatatgaaaatgacgattatgtattcattaagcctttattatgtaatgtgaagcaccgttttaagactaaaaatggcaaacttcgtatcccctcatttaattcctggagagattaa

SEQ ID NO: 2567 - DNA, 249 bp, Bacillus licheniformis
gtgtttatcattcaaaacatcgagacggaattctatttgaaacataatgggagcgagtcattagaacacccctatatcgaagtggcctgtccgggagatgcagaagctttcagttcattgaaacacgcaaaatatgcagttacatggtattgcgatatgtttaaaaaatggagaattatcgatgtatacgaaggtaaatcgtatgtgaagaataaaatttttgaatttgttttagaagaagctatgtaa

SEQ ID NO: 2568 - DNA, 552 bp, Bacillus licheniformis
atgacgaaaactaacgaaaaaatccacgtattggctgacgaatcacttggcggaatcaaacgcgaatatgtagaggtcaataggaaggcgaaactgggtgagaagatcgtaattgtcgatgctgacccaggttatggagatcattattcaaatggggatttttttaccgtcgagctctacacgggttatggtagtggtgtagcaacaaaatgcggtcatcatgttggtaataacgaatactgtacactcgaagcgaccaacttcgtctacattgacggggagcgctacgaaatggtcgaacgcaaggcggaagtatgcgagaaggttattcatctgaataacgataaatcgggaggaagggtaagggaggttactaatgtgggcgttggcacgatcgatgtaatcgaatacgaacatccagacggagacatcacgtgcggattttcacatggatgctatcgtgtccttgttccattgtctaaagaaaaagaatatcaagaattcgaagataagaaaaggggatacaaagaagtaaaaaacttttatacataa

SEQ ID NO: 2569 - DNA, 213 bp, Bacillus licheniformis
atggacaaaataagcgaaatcaaagaatgttttaatgaagatgaaatcgagcgcgatgatatggaatggcttatcgaacaggttgaaaaggctgcacaatacaagatcgcattgaaaaacataagtgatatcttagaagggcaaaacgttactgaattgattgaaaaaatagcatatgaacttgcacactctgggatttatgataaggaatag

SEQ ID NO: 2570 - DNA, 192 bp, Bacillus licheniformis
atggatttagttgtctttaaaagagatgttttttttgagaatgatcacagtaatcccatttttaaaaaggggaaggaatatgaaatattaagcgaggataaagagttcatatatgtcatttctaagccgaaaacaaacgaatgttcacaagttccaaaagaagaagagggatttatttttgaatacaagtaa

SEQ ID NO: 2571 - DNA, 141 bp, Bacillus licheniformis
atgagcggcattaacactaaattttcatacaaacagctgtacacattaaaacgcgctttattggagtatgtgcaacgtaaaggtataacagatgatgacttgaaaagcgaacaagatttgttactaaaattaactgcctaa

SEQ ID NO: 2572 - DNA, 342 bp, Bacillus licheniformis
atgaggaaactggataaaacatcagaattattaaatatattgagcatgtatccagaaagagaacttatttttatgtatccaaatgaaggatctgaccacccttacacgcttggttatccatctagaattttaattgattcttatattacattgaatgatcgagtatggctatttaatgaagagaaagacgaattgtttgaggagattgctgatagtgtcgcggaggatttatatacggaatttccactaactaatgatcaatcagcttttgtagataagcaagctaagaaaaaaatagagaatctagcgtggaaaaaagcaatagtggtttatataaaatat

SEQ ID NO: 2573 - DNA, 132 bp, Bacillus licheniformis
ttggaaacagcatggtttaacttagtatggtttaaatggcatttgggagcagatataaaagtgtttgagaattgcagctggaaagactatatagattccaaaaggaggggcattgatgaattacaatcttaa

SEQ ID NO: 2574 - DNA, 669 bp, Bacillus licheniformis
atggtcgatttcaaaaaactaagcgatcctgagtggattaagcagtgggaaaaagaaaaaagagaacgtgagcggctttatgaagaaaatgaggcgttgaggcaaaaaactgcatgttttactggtcacagaccggacaagcttggagggtatgatatgaaaaaccccacaatgctgaaattgaaggacaagctgcttgaagtcattgaagacctgattacacgagaaaataaaagtcgattcatttcaggaggagcgctcggaacggacatagctgcattctggtgtgtacatatgctgaagaagaaacatccttttattgaaaacattgtcgcgattccattcaggaatcaagataaggtttggtcagatgaacagaagtattggtatcagagaatgcttgagtcggctgatgaaatcgtgaacgttgaggaagtcgataagtataaaactgatgacgataatccaggtgaattttcacttgctaagatgcagaaacgtaatgaatatatggttgaccacagtcaatcaatagtggccgtctatgatgggggtaaaggcggtacagcgaactgcttaaattatgcaaggagatgctatttaggacatcaaatatggaggttgtatcctaaatatgactttgagttagacatttcatacgcatattaa

SEQ ID NO: 2575 - DNA, 243 bp, Bacillus licheniformis
atgaagttgagaataatgaaatgttcagatgtttcttactggtacaaggataaaatcggtatgtactttgatgtattaaatagaggggaagtagcacacagcgttgatcatgaattaaataccgcattatcaaaagctgctgttttaaaagaggatgccatcatttttgaagataaaaacatcaataaagtgcaacagttatttgagaaattagaatttcaacttaaaaagatttgcctataa

SEQ ID NO: 2576 - DNA, 171 bp, Bacillus licheniformis
atgagagaatacttgtgcatgcaagattggggaattgacagtggcatttattttgaaaaagggaagaaatacgagggcatacctagtaaagacggaagatcagttaaaatgtttggggaagtaggtatggtgataacttttcatgagggaagtaagtactttaaaatttaa

SEQ ID NO: 2577 - DNA, 288 bp, Bacillus licheniformis
atgattgtcaaaaaacaaaccaaaaagatggttatagaagtgtttcataattccttggatgagatgtgggaaacaatcaagcaactggaacaagaagggtggtctggaaacacaagagtgagtgttgtagggatgcctctctttgaatttaaattacgtaatgaagaggaggtaaagaagtttaaagaattatatcagacaacaaaagtgcaagagcctgaagaagattcactctttgatgactgtccgtatgtactctatacaattcatgaacgtgaaattgaataa

SEQ ID NO: 2578 - DNA, 1164 bp, Bacillus licheniformis
ttgtcaacaatgcagcaacaagccgtggaaagtattgaagattggtttaaaggggagggtaaagcaccctacttcttagcagggtatgctgggacagggaaaaccacacttgttaattacgtaattgataagttgaagatcaagctttctgaagtagcatttgcatgttatacgggaaaagcggcactggtagtaacacagaaagctcaaggaaagtataaagcaagcacgatacacagtttgatttacgacacttacgtggataaaaaaactggagatctaactgtaaagaaaaaatcaaaagatatgctgtcacaccttaaattaattgtagttgatgaggcctcaatggtagatgggcagattatgagtgatctgaggtcttttggagtaaagattctttttattggagatacagggcaattgccgccagtctcacaaaataaaaatgaggaatttcttcagatgttcaataaccctgatttcacattgacagaaattcaccgacaagctgcagagaatccaatcatatacctgtcaatgcttgcgcgaactaaacaaaaaattgaacctggcgcgtatgggaaaaacggcgaagcggtagtgattactcattcgacctgggaaacaatgaaagagcatttttacgagaaagcagatcagattatttgtggttataacaggacaagaaagcatttgaattctgagataagaaagttcttaggatatgaaagtgacttcccagttgaaggcgataaaatgatctgcttaaagaatgactggaataaaaatcttgatggcataagtttggttaatggtatgactggatacgtaagcaaagttcatcaagtagatgctgttagagggaagcttaaatacgattcgaccgttattgattttcaaccagattttactgatgattttttcgataaaattattattccaaatgattcgttaacagatgacggatttaagctgcagccacatgagcataaaatttacaactcttttgattatggatacgtgatcacttgccacaaatcacaaggatcgcagtgggaaaaggttgtagtcattgatgaagtcctagacagagatatgcaccacagatggctctatacagcaataacacgaagttcagaaaagttagtgttagtggtgtaa

SEQ ID NO: 2579 - DNA, 162 bp, Bacillus licheniformis
atgatcgctgcatatccaacaagaattgaaattaaagactacagtaaagtaggtttagtaaagagaataagagaaaaggaggcagctggatgggaatgtattcaacctatctcaaaaagatgtaaagaggagttattaccaactgtgtcgatagtgggctaa

SEQ ID NO: 2580 - DNA, 186 bp, Bacillus licheniformis
gtgattgaattagaacttatttttaaaaaaatgggtaagatacttgattcacacactagagcctcaaaaaatttgaaacagagtgattacagaagggtcattggtgatttgcactttgttattgagaatgcacaagagattgtatacatattaaatgaattgattagagaaaaggaagaggggtaa

SEQ ID NO: 2581 - DNA, 177 bp, Bacillus licheniformis
ttgagggtactattagaatgcgttaaagcagcgtccggaatcgggcgcttttttactgaaataaaaatcttcatttttaataaaataaacacaaaaaatatcggaaaaatcggattatacgtgtttgttcgacatgataagacaaaagtagctattctcatgataaataatatgtag

SEQ ID NO: 2582 - DNA, 1002 bp, Bacillus licheniformis
atggaactgtataatgatacggtaaagaaaaagtttatagaacaagtcaaaaaggaagagcagccccagttattatcaatattccgaaaaggtgcagaacttgaagaatatttgaaaaaagatatttacgattttaattctaaagagattcttgagttcttaactctgttgaatagatccacgctttcttctataatgagttgctggtctcacatcacaaggtatattgattgggcaatttatcaaaatatcactagaggtactacaaatttgtctagagacttaactattgatgatgttaagaactgcgttgatgaagggaagaagctctatattactttaaatgagctcaaagaaattttaaataccttagtgaatcccagagacagagctatgttaattctcctatttgaaggggttcaaggtttcaaatgcagtgaaatattaaatcttgaaaaatcagatattgaaaaagccttacagaatgacaacattttaaccgtaactgatgataagcatgggcagagagatatcaaagtgagtgatgaatgtcttaaaatttgtcttgaagctgcaaatgaaccagtgtatcaaaagaaaaatggatattctgaagcatttaataaagaaacaatattagctgataataattttgttattagaaaccgaagaaccaattcagataaagatcaagaaagatcttcgttttttgtcataattaacacgatgagatatattttctcaccagagttttttgattatccatatgttaacccaacgagaataaataggtctggtgttttatatgaaggatttaaagtgtataaagaaaaagggaaattagaaacagaagattatattaatataattcaaaagagaagcgaaagatatgaagacattcataaaaaggtttacaaggttaaagaatatatgaatgaagaagagattaaaaaatattatgcgaaagagcttgggattgagggtactattagaatgcgttaa

SEQ ID NO: 2583 - DNA, 1377 bp, Bacillus licheniformis
atggaatctcctgtgatttttgatatggaagcagataaaaagttgatggaagaattaattgagactaaattaaaaatacaacatgataataaattaatgacagcatatagacaagctatgatgaaggacaaatttcctccagggaaagcgcaagaacttttcaataagcttagcagtccacatgcaagattaacgactggagaaaaatattttctcgcgaaaaacctacacaggatcactaaagaggaaagaatttctcctgaaaactatttccctccgaacagaataaaggatatagaacttaactgggaaggctacaaaacggatgaagtatcgttcccgtacacatttacagatgttacaaagattgcttcagacaattatttctttaaggtgaaagcgagcgaattatttaagctttatgaatcacaattgcttcgctacaatccaaaggctcaacgaactgacaggacaattcatttaaaagaagtagatgatgaaatacccgttcctgagttggttgagtcttcagtcgaagctatagcgcaattaacagaaaagaacgacttgataaagtcagtattgacatttaacgcactattagggagctcagaagaaggaatcgagcttttattcgatgaggaagaaagaaaaataactgttactaaaggcactcgtttggacgtaattgatggttggcacagactgactggtataagtagagctttcagaagaaatccaaatatcaaagatttttatttgaaagttgatttgtataactacacaatgaaaaaagcaagaaaacacttcggacaacaaaataccattaacccggtggccaaatcaaagatcgcggaaatgagtgagaacgattatctttctgttgtcattaactttattaaagacaacagtgacatcggagaattaattaaagtgaatgaggacagcatacgcaagggagagccttatatcaccactttcgaaagatgtctcaaaggactaaaaagggctttgaatacatttgactatacagttgaaaatttagccgaagcaagaaagcttggcatgtatttgacggacgtatttaatacggtttttaattcgtatatagatgattttacaaaccattcctttggggaaagtaaaagtgctataacaacttctccagtcattttaggagttttagcattggggattaaaatgaagttagaatcaaaatctgcagatgatgtggaggatgtgctatctaacttagatttttccttggataacaaactgtggcgagagcttaaattagtaagcgaggatacaaaactaaataataatgcaattaaagatacattcgaattttttagtcggttgacaacagaggtgtaa

SEQ ID NO: 2584 - DNA, 1095 bp, Bacillus licheniformis
ttgggggctgtagttcaatcgataagaaaatacagggtgttcgatgatattttagcttttctaaaggaaaaagacacagatagctcagctggaaacattaaggggtataacaaaaacaagaagaaaaaatcgaaatacggattgcactctaatacagcagttaactatttaagcgacattaagcagtttttttggttttactgtaagactgaaattgaatttttaaaagaagaacatctgtcttttaaaaggtcagatgttttggcatttaaacattatcttgagcataacaaaggtgcagctaacacaactatcaatcgaaagatcgcagcacttaaatcattacatggtgaactgaaaaggctttatcctgactatgttgaagatgatcctttttataacgttaaaaggagcaaagaaataagaaggacaagagccaatacttcacagatccaagcagaaatgatttgtgacaacatgttcatttatgaaaaacagaaaccacttctgaaaaaattatttgggtacttccttttgagaagttcttttagaatatccgcggctcttgacgttagatggtgtgatattgaagtatctaatgagaacccagattggtttagagtcactgtcattgataaaggggcaaagctgtgcactacaggaattcacagagtgttttatgaccagttgcttgaattaagaagtgataacacaaaagacacagatagggtattcgagggacttactgaagatgcatttagagcttctctcaaacgctcattaaaaagtctgggcattccagaagaaagcgggatatctcctcactcatttaaaggagtagggataacggaagtattcgaagccacaggaaatgattatagagcagccatgaaacaaggtaatcatagtaactttgatacaaccttgagatacttgaacagcgaaacagacatctcccaaacggcggggataataatggatgaagaattagacatatctattctacagcaagttactaaagaagagttcttagatttttttgaacaatgtgataaacaaacattaagaaaggctttacagtttttcaatcgttaa

SEQ ID NO: 2585 - DNA, 279 bp, Bacillus licheniformis
ttgaaaacaaaattaaaaatagaagatgattatataattgacgcgattgacacatttcaaaaaggtaagttacatattagagaacaaatcattcattcaaatagcgctgttgatctttattatgctaaattgcaaatagatgaattttttaaacagatcaatgattcaataaaattaattaaaattacctgcagtgatctgtttgagaagaaagaaatgaatatggctgccttagagatactaattaatattagagaagaagcaaaaaaacgaatttag

SEQ ID NO: 2586 - DNA, 204 bp, Bacillus licheniformis
atgattccgtgcggcaaacaaagcgaaagtaatgttgagtatttcaagttggcttatgaaagtaaaatgaagaagtatggggaagagtggattttcgccattgaaaataaacaaaaacaagttatgcgtgaaaagaaagagaaaattagaagagagcttacaaaaggatatatggcgctactaagtgcacaattaggagaataa

SEQ ID NO: 2587 - DNA, 114 bp, Bacillus licheniformis
atgaaaaagttgttcgttggaattgttgtatccgtttctcttttagctgtcggtattgctgcagctcaagttaacagtggattctctgttgcaggttttactgtaggggcgtaa

SEQ ID NO: 2588 - DNA, 1167 bp, Bacillus licheniformis
gtgaaagaattggagttgaaaaattttttaaagaataaatgtgaagaagaacgcggactcgaaaaggagcttgcacgaatagcaggatactctaactcgtcaggctttcatcatttcatttacaatgaaaagaaagaaatggataatattcaaggtatcattgacgtgattcagaagatttccccggaatatgagtttgatttaatgagtgaatacatatttacattagacataaataaatctgcagcaaggcaaggcttagaatatcttagtgtaaatcagctatatgacactctagataaacatattaagaaaatggtgtctgcaaagaattcagttagtaaagaatggggaaaagtctatgcagcccaaagagagctagacaaaggcaacattggtattgaagagtgcattaggctgttggctgaaatccaacccaaatcatctgaaatgaaggtttactctaggattatccccatgtatgccatactacctttaaagcaatttggtagattaaaagatatgagtgatagtgtcttgattgacacaatcagtaatcaaaattatgtttatcattcgtttaagagtcgctatatgctattactggcaaactgcttctttggaaacaatgagattgagaaagcacaagaatacgcaagacatgggatagagaattcaaatgtgaagaggatcatttttttctcatacctcacgtatggaagttctttaatgttagatgattacgagaaatcaaaaagcagttttttgaaaggtttagaagttggcaaaggaaacaaaatttatgagcaacatgcgattagaaatctttgtttcctagaaaatctatgggggaaagagaatcaatatttgaatatacaatctaatgaaataatagataggcaagaagttgttcattatcttataagaaaaggttctaagcaacaggccaaaaaaatgcttgaccagttagatctcatggagcacgatgataacgatctgggattacattattatttaaagggacttttggaaagctctcgcgaatattttttagaatcagtcaaatattttaaattaagtggtgataagttttcctgcacccttccaataattgaactcgaaaagttaggtgttgaaaaacaaattttagagataatatcaatttga

SEQ ID NO: 2589 - DNA, 469 bp, Bacillus licheniformis
atggacggcgtatccaatcaagtagaatttatttataagttcacatccgaagaagcagatatcccaaaaaaaatagaaaaaagacccttcagcagcgatgagagttgagggggaatttaaaataaaaataaatggaattgtgtatttcgaagaaaatattgccctactagagttttacgcttctttgaatgagtggattaaaaagatcaagaaaaaaaacaaagttgtagagtatagatattacaccatggagtatgaggaggacgagcccattatttcattgataccatttgacaataaggctcgactaacgactatttgggaaactcaacaattatataatgtatttggccttaattacattattgaacaaatggaaatgcttcatgaaagacttggacgagacattgagcaccattataaaatttcattgaaaaactttattggaaagatcccattaagaaaatat

SEQ ID NO: 2590 - DNA, 123 bp, Bacillus licheniformis
gtgaataaatggataaaggaggctttacaatccaagaatctttcctttactataaatgataataaaaaattatcatttgtcatcactgcaaatttaaaaaaagaaaatcggaacaaaaggtga

SEQ ID NO: 2591 - DNA, 363 bp, Bacillus licheniformis
atggctgttgaagaaaattcagatgaagtgaatgttactactaagcttgaagctgagaatgctaatattcaaactgatatgaatattaatcaggaaaccggtgaaatcacagttactggtattagagaattagaaaacggtgaaaaagaaattaaccattacaatgtattgattgaagagattgaggggactgattttaaagctacgtttgtggatcaaaaaacgggcgaacattataaaattagcaccttagaagctcaagcttccatcgtccctgcaataatagttggagttgttgctaagtttggtataaagtgggctattaaaaaatacgggaaaaaacttattataaaaacaatttaa

SEQ ID NO: 2592 - DNA, 228 bp, Bacillus licheniformis
gtgaaaaagactttaataagaattcttatatttacgttagttttatctggggttttacctgggtttgcaagcgcagaaacaattgaaaataaaattgagaacgataccaaaactgtaggtattgaagaaaatacaaataaagcgtatgaagtaaatgttgaaaagagtttggggttgctcttgaaaaagatattgagatggctgttgaagaaaattcagatgaagtga

SEQ ID NO: 2593 - DNA, 663 bp, Bacillus licheniformis
atgaaaagatcgaagattgtgtttctatttgtttcttgcttatttgtgatttttgcagttggcttatatttgatgtgtattggtgatatttctaaagataggagtgctacatctagtacaaataagaaagaagacctgatgtgggggtatgaaattattggccaagaagcgcgcaataatgatacagagcctgtcaaaatagctattcttgatagtggcattaataagtcacataaagagtttaataatataaccttttatgaatacaatgctattgcccctagtaaatccgttaaagatgagtatggtcacggtacagcaattgctggaataatagctgcaggcggtgaagagataaaagggatttcacagaatgctactttatatgatgttaaagtactagatagtagtggcaaaggcaaagttaaggatgttgttaggggaatcaattggtgtattgaacaaaaaatagacattattaatataagctttggatttgaaaaagactacgatgacttgcgtaatgctattaacaatgctttacataacaacataattattactgctgcctctggaaatactttaggccttactgttgaatacccagcgaaatatagaggagtcttatctatttcctcttttgatgaaaaattagaaaattga

SEQ ID NO: 2594 - DNA, 213 bp, Bacillus licheniformis
atgagagacgatgagcgaattaacagaattgcaggggtgattactcaaatatgggagcagcagcacgacaaaagctttttgcaactcattgagactttgaaaagtgactacattatgcggcagactggatatgtagagaaagaagtctttattagggatgatgagtttgagatgttcctaaaagagcatcttaataacgtaataggagagagg

SEQ ID NO: 2595 - DNA, 552 bp, Bacillus licheniformis
ttgacagacactatattagcaggaataatcggtgcaacagttgcaggaattgttccgttcattatttatttactaacagagactaagaaaaagcaagagagaagattagaagctttatacgatattcacaaggagcttgaatcatttgtatttaaaagtgatgatcttaagtttgaattagagcgagcttctacttttgaaaatttaattgaaaaaattaaagagatcaatgaattctttacaactcatttttttgacaaaaaaagaaaaatgactcattcagcattatttatagattccgaggtatataatcaaactttagatttttttgaagaaacttttaaagaactcaaacaaatgcaaacggaatttgcttataaaaaaacttcctcagaacaaccttctgagaaaattgaacaatataataaattgtatctatttggattaagcgcaattggggacaatggggaaaaacttaatgacttaattaaaaataaaacaaattattattatcagaaacattatccagcatggaagttttggttaaaataa

SEQ ID NO: 2596 - DNA, 1407 bp, Bacillus licheniformis
atgcaggatgttagtgtatttatttcttatagctggacaaacgatgaattagtggattgggtacgagaagagctggcaacaaggttaagtaatgacggaattgaagtcattcttgaccagtgggatttaaaagaaggtcaagatgtatatctttttatggaatcgatggtcaataactctgaaataaataaagttttggttatctgtgataaggggtataagttaaaagcagattctcgtcaaggtggagtaggaactgaaactcaaattattacacccgaaatatataaagatgcaaagcaagaaaagttcataccagtgatcttcgaaagagatgagcaaggaaatgattttataccaacttttatgagtggaagaaaatacatagatctatcaggggatttattctatgaaaactacgaacaattactgagaataatttatgaaagaccattacatagaaaacctaaaaaaggtaacccaccagcacacctttttgaagatgaacaaatcaaccactacaaatttagttttattttaaaacaacttctaattgatgtgtccaaaggaaagagtgaaaatgctgtaagtaaggcaaaacaattcaagaatgaatttataggcacattaagagagttctctattgtagatattaaacacggccaattgtatcaagaggttaacaataaaatagatgatatgcttatattgaaaaatgactatgttgaatttattcaactcttatcacaatataatttattaaatgttgagtttttaatagaatttttcgaagaatttcataatacagttatggaaataaaagcggaaattagtagctattatgacgctcaatttgatcattttaattttctcattagagaaatcttcctttacacaattgcatctctaataaaaacagcaaattatgaaatattaggggaattactgcactctcgtttttttgtatttaaagattttgttgcagatggaatagaaggaactaattttgaggtttttaatcattatattccttctcaaacagatagaaataataatgggcttctaaaactgaatgagagattgagcaaaggtttttctaaaacagagattgccaatgcagatgttttactttactatatttctgctttaatgaaagaaaatagtcgtttatggttccctttttcttatatttatttaaaaggaaaagttactttacttcaaaaaatggaatccacaagacattttgaaaaagtgaaaaagatttttgatgtaagtagcaaagaagaatttcttcataaagtaaagaattttaataatccaatgaaggagggctatggcggttttaatggctcgataccagatataacagataatatcaagctagaggatatttgtaaatatagataa

SEQ ID NO: 2597 - DNA, 849 bp, Bacillus licheniformis
atgatttaccgagatataatctattttaatgcagataagattcaatcaatccttgcccaattaaataagggagttgttgaatcacttgttgaaacaaaagaacgaaatcatgaagttgaaggaatagccaaaacaagtaaagtgctcgaatttttgggatttcccttttcaacagaaggaaattatagatacaataatgcaaaaggattgcaagaagaaaaaattcttcatgatttcgctttaactgaactacttaaaattcttccttgtaaagatgcctcaaagttagataggagtcagttgggaagaaatgatagagtgtttgtaaaagtaaaagggaaattatcaatctatgattatagagatttaaaggatacattggagaaggtcggagcagttgcaaagttaataaatagtgaggaacaaagtaagagcgatctaaatgattttgctgagtttattggcagtgtttactcagatttaatgacaatagaaataagaaatcaaaaagaaataaatttcataggcgctgttaattcagatttcctgagagaaacaatgcgaaatatggtttataaatatggatctaagccaataggtgattgggaaatgatttgtcaaattacaagacttccaaaaaacagggcgggaaatttagaagatatgtttagggactttggcaaagatattaatactgagaacttaggtaaagaaaagtctttagagagatttttaaatgaaatactaaaagagttttccaaaataaatgacatgtttgcatcagtgtcatatccgaatatcgcagttgaaccaattgctgtatatcaagaaattaatataaaaaagtaa

SEQ ID NO: 2598 - DNA, 120 bp, Bacillus licheniformis
ttgaaaatcctcgaccatatcatcttcatcagtctttatttagtcaatactttggtttccgcgccccttgctttaatctcttccaaaattgatttcacttcactttcatttctagagtga

SEQ ID NO: 2599 - DNA, 153 bp, Bacillus licheniformis
atgatttatggatatgcccgaaagagttctgagatacagaaacctatgctgcttaaaatattgaagaacttaatcaagcaggcgcagaaaaagtttattgcgaaattgcttctgaaagcagagaggaaaagcaagccctcaatgaacttatag

SEQ ID NO: 2600 - DNA, 156 bp, Bacillus licheniformis
atgaaaatggatgagaagaggagagagcttcaaaaaaaatatagggaggaaataaaaaagaagaaaaatcacaaaacctatactatcgaaacaataattgtaatagcaattgttctgttgtttattgctttgaatttaataattgatgaattttag

SEQ ID NO: 2601 - DNA, 453 bp, Bacillus licheniformis
atgaaactgcccaaagtcaaaattgaaatcgaatggaatgagcttaacagtgataaaaggattgaagatattgaaggtttgatggaagtaaacaaattaaacaacaatgatttcagctacttttttgaattgcatgaagatgaaaatgctgtagtgtttgtgaatgtttcagggtatgaccttgaggaagaagatattgaaagtggcatcggaagagtttttcaaactgaaacagcaattattatcaaaaaagcggacaatgtaaagctaatcaatgaactacgctttcgcggcgactataatggagatatgcttgatgaattaaacaacttattaaaggataaacctgtttggacattagatgattttgaaaaagctggcgtaaaattaaatgttaacggatatgatcctttcggatattcttggtacgattacatcgatgataaaaaataa

SEQ ID NO: 2602 - DNA, 222 bp, Bacillus licheniformis
atgatcaaggtttacacaataggtcatgagataccaaaaaaaattaagtcctgcatttctgaatggaattactggaattggattgttactgcaaatacaccgaagaaaaacaaggatgctaaagagatcattaacaaaattgagcctgatgctgataaagttgcagtatttaagaacggcgatgttgatgtttatgttagctacatgtttcccgttaagtag

SEQ ID NO: 2603 - DNA, 225 bp, Bacillus licheniformis
atggtaaaaatgattacggtctggtacaaatacgatgataagcgcagcgaagcgaaactaaatcatattgaagatggatggataaatgaagactatccaaaacccaaagatccatcatattcaaatcaagaagcttggaaaaaaagtaattgggaaaggaagcatgcctatttagatgaacaatatcatgtgttaaatgttccaccagcgaattgggttaaataa

SEQ ID NO: 2604 - DNA, 1098 bp, Bacillus licheniformis
atgacaggagttttaaaagaaaaaattaagagtttaattgaacttggctatgaaggggagtattgggatttaaaagaaaaatggcatgatgacaatggaaaattggtacatgatattttatgttttgctaatacttttcatgaccatgattgttatattatagttggagtttctgatttaggtgaaattaaaggtttggaagaacatgaaaagaaaaaacaagcaaatctaatagatatgcttagaaatattagctttgctggtgacagaccgaaagtgtttttaaaatcattattaatagatggaaaattcattgatgtattaatcattccaaattcaataaatgttccttattttttgaggaaaccgtacagaaaagttaaggaaggatacatctatacaagaactggagatagtaatactccaattaatcaaaattcttcaatatcaaccattgaatcgttatggaaaaagcgatttggctttaacaaaacaggactagaaaggttcagtcatcttttgaaagataaagataattggaactccaatgattatggatactatcatactcttagtccagagtatgcaatgaaatataagttctctgattcattaagagagactatatcagagttctattcttatgtaatgtatagtgagcacacgtcagttgagcaaattgagcttgaagtaaatggcacagttcttaaggaaatagagttaataacattagatagcgggaggtataccacaccttcgccagagtggggttatatcaaattcaacttcaatgatgtatttgattttaagtattttatagtcgatgaccttagatataatttacattctttctttattgatgaagaaagcgaagatggaatgatcgcttacaaaaatttcatggaagttactttaacgtttaaaaacagtattgagaaagaagattttgtaaatttcgtttatcacaaagaggctgatttcaagaataagctagaacatgaatctaagcaatattttaaaacggataacgaaatattccaaagaaggattgtaacagctcgcatattaaaacaaatgcttgaagaatttcgaggttaa

SEQ ID NO: 2605 - DNA, 186 bp, Bacillus licheniformis
atgctacgaataattttgaatgatgaccagacgcttttaaacgatccttcaatagggtggaatctcagctcaatacacgctatcaatgaaactttaaatgatacaggaagatatgatttgtatacaaaggaaaacgggtggcagtgtctttctgctaatgatattaagacactgcaaaaagtttaa

SEQ ID NO: 2606 - DNA, 843 bp, Bacillus licheniformis
atgtccaaaataaagcatgagaatattgctacttcctctgcaatacgaattgctagcatagttaatgaatacttgtacgatgatgatatcttttcgctggaagatgccattgacatttacgatataaacgttgtgcaacgtatgtttaagccgaataaaaaaacattattacactattttattgaaatgttttgtgacccatatgaggatatcgattcattacacaaaaacttagatgaagaggaagcattgaaaattattttgccaatcttaaaagagtataaacaaatcgataatatagagggatttatttttgatgattttgtaattagtgaaagaatcaataacgactatgatcaattcattaaaaatatgcaagagtttattacccgtaataataagttaattatagatcacttagttcattcgacatttcagatattgtttttggacaggagcttccttcatgactttcacaaaaaagtctccgagattgttaaaaaaaatatagtataccttgcttctacatacccggaacatttcacagtgaaacaaaggattaaacgaaccgaatattggaatacttggttggaacatgcgattttctacagagataaaggtcattgtgttatatgtagaactgatttaacaaagacactcagtgtaaccggaactgtacacatagatcacataattcctctagagttattcggcagtaatgattcttctaatcttcaattgttatgtgaatcgtgcaatacatctaaaggtgcaagaacgactgagacgaataatatgaatgtacctttttggaattatgattataaggataaaactgaataa

SEQ ID NO: 2607 - DNA, 300 bp, Bacillus licheniformis
atggataacagctcaacttcagtcagatctttaatttttagcacgcatatcgaaagattgaaagagttgctgtttaaactgcatgatggatcaattacaaaagaagagctccgggaattatccaagatccatttagagtgtatgggaatgaccgcgcatgtggttggggaagcaaacgaatttcttttaaagtctgatttgcttcctgaagacgatgctaaagaaataaatgagctgctacataagatcaaggaaagcaaaaaggaaaagaaagatttttctgatcaagaattagaataa

SEQ ID NO: 2608 - DNA, 252 bp, Bacillus licheniformis
atgagattaccgattaaacaatgcttaacaaatgaagagtcgggtcacgctgtgcttcaatttgtaacaaacacacttcctaaattgaaattcattttaagaagagaagaaagacgaattgaaaaaggaagcgtccatgcccttgattggcttattgaaaatggtggagatcctgcagaatttgattttgataactgggttgacgctttaaacgaataccttaattgcctgtatgtattggtgacacggtaa

SEQ ID NO: 2609 - DNA, 219 bp, Bacillus licheniformis
atgaataacttagaacaacatttgaaagagcaaacagatgcctttctaatcgattgctttaatgaaattgaggaatggggaaaatctagagtcttggggcaggggaaggtcagaaatctgtatgagtcgtttaatttgaatattactcaacttcacatgattagtcaggttatttacaaggaaatggcatcacggtttgttgaaagcaaagtggattga

SEQ ID NO: 2610 - DNA, 381 bp, Bacillus licheniformis
atggatcttaaagaagagatcgttgaattagaagaggctttacgaaaagcggaaactaatactgttagaggtgtattacaagaagcaatttgggacagaaattcaaaaattgaaaaactaagaccaaatggatttgttttagctgatataagccttaaagatggaacgcttttgaacagatgcctcgtattctccacaaatgatgggataggaactgatgcggtctctgatactgaggaggcagaaagcattttaaagaatgacgaagaagtgtatttacagcaagaatataatgacggcaattttgctggagatgttgaaacaaatacgattgaaagttataagctgtactatgaaaattgtctatcagaggatagttaa

SEQ ID NO: 2611 - DNA, 234 bp, Bacillus licheniformis
atgatgaagccatatagcactttggaggatgctttacaggactataaaaatcgactgcagcgaagaaaaataatgcttgagaagctctataataagcgaagagacatagaattgacagtaaaagaggaatacaaagttttgatgctggaagctgaaaagagacttatagaagaatttcttcatgatcttgaagaaataaagaaagaaaaggagaaatgccaatgcggtcactaa

SEQ ID NO: 2612 - DNA, 207 bp, Bacillus licheniformis
atgacaaatcaatttaataaatcatttacagaggcattggaagaactggtaagtggcaaagcaggctttgttcagggagaattctttgataagggactttatcttgaatttgataaaacaggagtgttacaagaagtagacgcaaaagggacttttcaaaaaaataaatgcgattatttccacagggatgctcaaacaaaaatataa

SEQ ID NO: 2613 - DNA, 207 bp, Bacillus licheniformis
atgattagatcaaatttaaaggctattgctgatgaggcaggtatttcaatttctcgattaagtgccgaaataaatcatgggaaagaaaccgttaggaaaatgtacaatgatgacatggagcggttcccaagagaattgcttgataagctctgcaagcatttcaactgtgaaccaggagacttgataaaattcgaaaaagatgaataa

SEQ ID NO: 2614 - DNA, 213 bp, Bacillus licheniformis
atgaacttacataacaacctattccacgaaacgagagaacaggtcatttcatacttactcaccccagaatcctgtgacatggtcaaagaatgggggatgcaggagcaagtgcttgatgaacttacggagggatattttgagtttaaaaaggaacatcacggcaacattaacgaatatatctcttggcgtatagagctgccttactatcattga

SEQ ID NO: 2615 - DNA, 144 bp, Bacillus licheniformis
atggaattaaaaattattgcaaagactttgcccgcggaaattaaattccttgctgatcaatggggctggaatgatacagaagtaggggacaaggtgctctattggatagcacaaatgaaagcagaaaaggagaaccaaatatga

SEQ ID NO: 2616 - DNA, 663 bp, Bacillus licheniformis
ttgaaagtgcttcatgagctattacttcaaaaaggagttccagaatcgcatataaaagaaatgaagagaatccttaactttagggaagatacatttttattttattatgagcaagaagaaacaatctgtagtaatatacctctttcgaaaataaaaagtctaggcttcagaggttcaagcggtttatcttggtttgaccatgtttgcggtaaaggagttaatatagatgaacggcgttgccaagaagcttttgaacacttagtaaaaaaaccccttgaagattttcaaaaattctataaacaattcccagtaaagttaatatactttgaagatgatgatttttatgcagttaacggggatggaacgcaccgtacactgtgggcaaaaataactggagctccagcaatatcagccgaaattacaattgctcgaaaaaattatttagcatatgaggcatttaataaagactttggagcaacttttaaatttaaaacgcttctccagaatacaataaatattgcaccggagaaagttgaatcaatactcttattagttattaggaaaataactgaaagcgagaaaataggcaagtacgtgcctgaatttatgcgaatggggttagatttgtattgtatagaaaaagcactggtttattccaaataa

SEQ ID NO: 2617 - DNA, 297 bp, Bacillus licheniformis
atgaaaacaaataaatgtgcactggattatctcaaattaaaagaagagttagaaaaagagaatatggtcattgaaactgttagaagcagaaggaatcggactcaaaaactaacgtacatctatttgaaatcaatgtacataaagtattttatatttgttgatggtgaaggttactattcagagggagaggaaacttgcgtaaacgtatattgtggggacggggatactaaatacggagcgtggtttagaaactttagagagttggtggacgagctcaagaaaataaataaacttggt

SEQ ID NO: 2618 - DNA, 258 bp, Bacillus licheniformis
atgagttatggtggttacttcggaaaattggataaaaaatcaatagtctatgttttggataatgagatagctaacttaaaagatgaggttattggaaaagaacgtgatttagagtctctatggtttaagtatagaaaattacatcaagtcctctacggacaaggagatactttactatctaatacaaataaagttcggttcgaaagtaggcttaacactgttctgaaaaagttggagaaactagaaggcgagaagaaa

SEQ ID NO: 2619 - DNA, 195 bp, Bacillus licheniformis
atgaatgaaatggatttaattcatgcgtttaaatcaatgctaatggtagctagagaatacgaggtaaaaattgatgagaagtacgaagaattagaaaatatcctattagaagagtatgacttagaagtggttcatacagtggatcatgacatgatggatagtatggaaaaggtgtatcaactattaaataaataa

SEQ ID NO: 2620 - DNA, 213 bp, Bacillus licheniformis
atgacacacaatgaaaaattactaaacgcattaatgcagttcaaaaattcagcatatgaaattcgggatctttgggagcaagctgacagcataacagatagtgatctttgtgatgattatccatttgataatgatttttgtgaagttgttgaaaagataggtgactgggtaatgacacaaaatagcttattaaaccaagataaaacaaattaa

SEQ ID NO: 2621 - DNA, 552 bp, Bacillus licheniformis
atgacaaaacagtatatcattaaagatcttcaaacgggagacttttcacaccatactacgctaaacgatatttttgaggacttggttcaagattatctttctaatgattggactgatgaagaagccggggagaacgaaacaaaatttaaacagtacacagaagatgaaaaaatagattttgtccaagacgagtatgaatataaattaattgcatatcctactccgcaacagatagcagagtgggaggagttcaccgggaggaaatgggaagaagccaaagaacctaacagggtgtttgtcgtctatactctgcatattcgggacagagggagaggagggcacacttggggcattaaaggtttgttctatgatcgacacgaagcaaacaaaaaagctatcgcaataaggaacgaacatatagaagaatggtacacttctaaaaacgacaattcttatgaagtatacgagtttatgaaaggcttaaatactagcagtgtagagagtgataacagttcttttgaaatcagtgtaacagaagaatattgcgagtaa

SEQ ID NO: 2622 - DNA, 351 bp, Bacillus licheniformis
atgagaaataaaaagttaatggaaaaagtaaatgatttaggtactcaaaatttaagcacaagagagcatagtacaagagtaatgatacaaatagcaataatcatgaaagcgtttggagttaaaagagatgaaatcaacaagccagtaagagattatgagagagagattattctatccgatgatgaaataagaaaagaattctatagtgaattaaaattcctaaacagagttaaagaaaaaaatgatatcgataaaataaaagagtttaaaaatggagttcactattttattgacgctgtaagattttttaatgctagcttagcagatgagtttgaaacatatgttaattga

SEQ ID NO: 2623 - DNA, 285 bp, Bacillus licheniformis
ttgtataaaatctatattttaaacagattaggagcgattataatggcgtataaatgggaaaaagaatgtttacaaaaatatggaaaggaagaaacttttcatttaatcgaagaacagcgggcttatgaaagaaaacataaagataatccttgtaataattgtggaaatgggaaccaaggtgccattttagaatattccaaaggcaaattgaaaggtaagccctttttaatgcgttatggattatggtctaataagcgttgtgaatattgtggtagacaccagtaa

SEQ ID NO: 2624 - DNA, 231 bp, Bacillus licheniformis
atgtctaaagtaataatatatgttcatggtggagtgccctacatagaagaaaatgacacaaatactagcgttatgataatcgactgggacaatgaagaccaacaaagttcattagcggacagagaagaaaacagtgtaatcgttgaagtgttcggaggtgtagcagagtgcactcataaaggaaagggaatagatgttgaaataattgattttgacaacctaacaaactaa

SEQ ID NO: 2625 - DNA, 111 bp, Bacillus licheniformis
atgaataatctagaaaaaagcgggtttacactcacgggaattggtttatctgcaagatatgtggggcttttaggattttttataaaggaaaagaagtccatacaatgctaa

SEQ ID NO: 2626 - DNA, 1707 bp, Bacillus licheniformis
atggcattatcttattatgacaaaagaacggcaaaggttgaaattatgggagagcttaaaaaaagagggtggaaggtatatggatataaacaagacaaaagcgatccaatgaccgactatttcgatccagcatcatgggatggtattgcagaaaaagacggatacataattcttattgatatttctaaatatggcctaggtaaatcaggcaaaaaggtaacgaaaaaaggttatactattgatcatgctaaaattgcaaaacttcaagcaacaattaatgatagtgcagcaagtgaaaatgaaaaagaaacgtccagaaaaatcatcgaaaagatgagacaaaaagaagaaatggaaacggttgtcgtctctcaatatcctgtttttaaacataccaacccaggacgaacaaattggcacattgaaaaagacggggaaatcattgcaaaaggtaatcgcgctttttctttctttgattggaataataaagaagaatcgcaagctaaacttgttaaattcattgatgggttagaaaacaaaatcaatgaacaatcaaagctaattccagttaaaaaacaggttatcaaaaaggttgttaaacctgtatcaattgatctgactattgaagaagctcaagagggacaaacataccttgtaattgataagcctttgacatatggtgtacaacaaggatatgtttataaattaactaggaaacaaacgtttaacggtaaattatctgtatctttcgtaagaatgaataaaaaattaaataaagagcttacgggttcaagcaatccagcgaacactatgtacttttccgaatctaatttcaaaagactttttgaaaaagggtgctttcactttgcagagttgaaagaggtggaagaggtaacggaaaagactgtatatgtaaaggcaaaaagagacacagcccaaaaagaaaaccttttaacaggtgaatcagtcgaaacaacaaacaaagcggcagatgaaaacgtacaaggaactacagaaaaagaaacaaccgttacatatacactgaacgaagagaaaaacggtgttgaaatccgtttcagttctaaaccatccgaagagatacgggagcagatgaaagcggccggattccggtggtcacgttattctaaacgttggtacgccaaacagtcagacagtacaatctcactggctaaaaaactaagctcgaatgatcttaataaccaaaaaaacacctttgaatatcctgaaatagatattgatgatatagaaacatatgtaattgatcaaaagatacaagaccgcgaacatgatgcacattggatttttagaacaaccaaaagagaccatacaaaggaaatccaacacctgtttaattcgtggaatgatgaagttaaaaatctaattaaaacaactgataacaaaagcgttatataccatcttaaaaaggacttgcaacggttcaaaaagcgttattatgatctgtacgtgaagtatttaaccctaagagggaataacctctcctgggcggtaactggacgtgctgggcgtaatatgaatagatataacaagctagtagaccgagaaaacgccgtaatgcttgagtttacgggaattccggaggaatttaaaaataaactatccgaagcaaaggacagaattagacatacaaagaaagaaaaaatacaaaaaattggtttcgaagattaa

SEQ ID NO: 2627 - DNA, 1230 bp, Bacillus licheniformis
gtgaaaattaaagtaattgattcaataatgggaagcggcaaaacaacatttataattaacatgattaataattcatcagaagatgaacgctttatttttgttacgccttatcttgatgaggttacaaggataaagaaatcatgtacaaacagaaaattttacgaaccaaaaatacataatgaagaaggggaaaccctgtttaaattggattcgctccataaatatttagctgaacataaggacattgtaacaacacatgctctttttagcatggcaaacgaaaccacaaaagaattgatctattcagggaattacacgcttattcttgatgaaacaatagaagtcattaaacaagtaaagatttcaactgatgaccttcatatgctatttaaaaataattggttgataaataaaggggggaaagtctattggaacacagaacatgaagaaaaaacaaacagaaagtatgacgggaaatttagaaccttgaaaagactagctttaggaaataacctaatttcatataatgatcatgttttattctggacgtttccgcatgaaatatttaaccagtttaaacaagtatataaccttacatacttgtttgatgcacacttgcaaaaatattattttgacattaataatattgattatgaactttactcaattagaagaaataaagaatcctgtgaaatgattaagtattgcaaagcacaagacaagctcagaaaagaacaattaaaacgattaatcaatatttatgatggtgatctaaacaaaataggggatgaccattttgcattgtcaaaggcatggtttgaaaaaaaatctgtcatacataaaaaacttagaaataatattttgaattattatcagcacatcattaaaacaaaatcaaataataacctatggacgacattcaaagatcacaaaacaaaattaaaaggaaagggatacactaaaggctttttaccttgtaatataaaagctacaaatgaatacagtcataaaacgtctttggtctatgctttaaataggttcgtgaatcctgttattagcaactattttacatctaagggtgttaaaattgatgaaaatatgtatgcattatcagagatgattcaatggatatggaggtcagccattaggaacggtgaattaataaatatttatgtaccatcaagacgaatgaggacactccttgaatcctggctgaataatgagatataa

SEQ ID NO: 2628 - DNA, 867 bp, Bacillus licheniformis
atgaaaggcatataccaaataacaaataagcaaaacgggaagaagtatataggcagtagcacaaatgtgttcaaaagatgggaacagcatgttactgatctgcattacgggttacatcattcacacttactgcaaaaagactggaaaaaatacagtttgaatgatttcacttttgaagtgttggaatatgttgacgacaagaaagacttattaaaaatcgaacaaatgtggatagatggggaagagatgcctaatctttataatgtgatgttggacacttcattaaagagaaagtcagcacctgtagacttcttaaacagtgttttcttttctgacagaatggatgaagaaatcaaaaataaactagttaaaaatctaaatatacacgaaaagaaaggcaatctatctagatatggtaacactaaatatgactattctaaactatggttcaataaaaatagtgaaggagtaaaaagattaaggcttaacataaacaattactttgcgaatcaagttaaaactgtccataacgacagggcatggacaacatttacacaacagtataaaaggttatcttatgttggtaatatcaagtcttttgtccctttgacagataaacttgaagaggatgacagacgtaatactctttgttttgcggcgaattgttttctaaatccatttctgaaacggaaatatgaagaattaaaagatcttactgaagagacttatgcgctttcggttttacttaaatggattgcagatgtttcaaatataaataaacctattcgcatttatgttgcttcaaaaagaatggaggatatcctaaaaggttggataaaacagaataaaaaaggagagtcgttatag

SEQ ID NO: 2629 - DNA, 120 bp, Bacillus licheniformis
atgacacaaaaacaaatattttatttcaacagctacgatgtattaaagctatctaataaacaatggaataatgacataaggaaacattacataatgtacaaccaactaaaaaacgactga

SEQ ID NO: 2630 - DNA, 279 bp, Bacillus licheniformis
atgaacacaagaaaacaatgcaagaagtctagaaagcgttcgttaagatttatcgaatccggcaaatggtttaaagagtttgcacatgctaaacataataaaaatctaaatgttatggctcttttacgtttcaattggggcttagacgattcagctaaacaatgggcaaagtatcgcctgtcagttgtaaaaggggaacgtcaggaaactgaagcaacacaaagacttaaagagcttgtaaataaacgtcgagaatcaagaaaggagaacacacaatga

SEQ ID NO: 2631 - DNA, 333 bp, Bacillus licheniformis
atgaaaaaaactgaatggatgttaaatagcgaatatcgtgcaatgttagattttgaacaacgcgggacagttttagcgggtattatagaaaatccatatgcatcaccatccggtttactttcacaaatttatgatattgttgacgatcacttagaaagatatcgcgaagacagctacatttattacattatggatcattggattgtttacaatccgattgaaaggtatttaggtgtttattacaaggaaggccatcattgcatttatgatgctcgtgaagtgactcagagtagcgataccaaaacattttgcaattatgcgtttcccatttaa

SEQ ID NO: 2632 - DNA, 447 bp, Bacillus licheniformis
gtgaaaaaagttttaaaagcaagtgttctgtttggtgtcagcatggcaatcttcttggggttctcacctcaaaatgcttccgcggcctggtctagttggcaaagttttgatggatttaaacaagggtgcaaggttcgtgtttatactgatgctacaacatatacgcgtaatgcaaaaacagttgatgtcaaagctgaacagaatggcaactgtggaactatttattataacatgttcttgtcttggaaaggctaccctcatacaggtttaggagagaatactccaacaggttcgtttagttcagtgacacctttaaaatctattactattatacgaccaataggcgagccatctacttggggattagtttatttagagatgaaaaaatcgtctaatggtgatgttatagcaagggcacaatctcctcaattaacatttacagagtag

SEQ ID NO: 2633 - DNA, 90 bp, Bacillus licheniformis
gtggctgcaagggatttatgtgttatttatttagggagaggggatttgaatcgtaaaacctctaatagagaaggaattgagaatgaatag

SEQ ID NO: 2634 - DNA, 453 bp, Bacillus licheniformis
atgttactacataatacagaaggatatacattaacaaaagacgtccaaattaaagaaaacggtcatacatacattaaacgagaagtattaaaccgtgctctcaacataggtgaagcagcctttgttggtaatagcagaaacaagattaagagattaagtgaagaagaatatatgtttattagaaaagaacctgttaccagtgaaaacactgttgtttcaaaaagattattaaacaaattaaaagaattgattgaagatgaattcagagatgatatttgtctttcttcagaagagaaagtgacacacgttaaaatgatcatcaagaggaatccttggattgaagatatgtcatttatttcttgtccatccgatatgagcaatgaggatcttcactatttgcttgatcagattgcatcatacataactgaaattgaattatttaaaacaaattaa

SEQ ID NO: 2635 - DNA, 2778 bp, Bacillus licheniformis
ttggacaatcaacaattttatacatataaatttaattcttcgcgcctaaaagaatttggatacaacattactctttcttttcaagaagcacaggaatacaacgaggtaattaccttatttgataatcaaattttaagatcaataagagacattaagaacgaaatcatcgattatgcttaccttgagactcttaacaaagagaaagagcatttacaaaaacaaaagcattctcaagaaatctctaaaagattaaaagaaattcaatcagaaatcaatgagatgcttttcgtaccagaatacataacgatcaaaatggatcacaacagccattatagagacttacataaaaatggattgatcttaaataacaaacggtttgtccgcttctcttcttctgcaggtcaagcaagagtgtccactgtcgtatttatcgaagaagagacctccaaaagacttaatgaaatcctggataacggaagagatttaaataaagccctagtcccttctaagtttaatgcatataagggattggctggcagcgccactcaagtagttagcgctccccggttttgtttagtccctgattattatagcgacactaaagtaaaagtaaactttgtgactgaaacagattttgaagaagatgacattatcgaagttaaagatattgttgaatcatttaaccgttttgatggccaaggcttaattagctacgaaatggctaaaaagtgggcagaggaattaggtttagactatgtcccagcgcaatggtgtatcagacagaactttattaaaggaatgctaaataccttccctattcatgagttttgcgaaaaagtaaataatgggaattatagaatcagaacatcttataaagactctgacgggaacccaaaaattgtggatttaagggacattgatgttatcctcactgaaagccaatttaaactctgggacagcttcccttccattgaggtttatgaaaataactgtgaaaagaataacttgaaatggggagtttcactacacagccccaaaaaagataaagacattttgaaaatgaactatcaatttttacaaactctgaatctaaaccatgaagacattgaaaagatctgtgagaaattcgttaactggataactggggtcaattcagggaacatctattacaccatcttgtttcttctgggaactgatgtgacagatgaaaaaattacgaattacatagagaaatctgataatcattgggttaagtctttaatattgaaccctgacttaatcaacgacaaatacataaaaaagaaaatttatgacttaatgaaaaagaaaatccaacgcggatgccttggggacataatcttagatggcaacttccagactcttgttagcgatccctatgcgatgatgcagcacgtttgtggtttggaagtaacagggcttttaggtaagcgagagtactactcaaattattggaatcaaaaaggtgttaaacatgttgacagtatgcgggcacccctcacctatcgtagcgaacatttaattttaaatctaaagcaaactgaggatatggattattggtacagacataattacacaggtatcattgtgaatgttcacggctctgagacaatgaattgggctggtagtgatttcgactatgacattattgcaacaacttcggataaaacagtattaaagggggtttataaagatgagttgccagtggcctacacccctcccacttcaaccaaaaaggttttgactgaggaagatttattcaatgcagaccttttttcatttggctcgattattggctcaatcaccaataaaagcacgagtggctatgctcttctttctcagcttgattctgattctaaagagtatctcaccacattaaatcgagtaaaaatgtgtaccaaattgcaaagtgctcaaattgataaggccaaaattggacgagaagttaaaggcataccttctcgctggattaattatcaaaagatcaaaaaagatgactcggagaatgttaagacgactaaggaattttacaataaaatcttattggataaacacccttacttttttatttatttatacaaaggaactaaaaacaaatacaaaaaacatgtcaaaacctatgatatcacttgcaagcagaaatttgggattagtcttcaggagctcaagaaagtaaaacgaaaaacaaaggagcagcatgaatttcttaggttatttgaaaggtttaatccagtgattgagagtgactgtgtaatgaacagactctgcaagtatattgaatccgttgactttggtattagaaacattgttaacaaggatgtcgatgatgaaatttacaagatttatatgaatgatgcagttcaatttgatgaatcacggtacaggaaagtagcaaaagcatatcaaaaacataaaaaaagcattaatcaatcattttcattgggagcaagtagtgatgcagataaaaatttatatgattcagatctctgcagcaatttctccaattccctagatttattcaaacaaagactcaatgatatttgctccaatgtttacgaggcagttaattaccttgttcgcttattttatgttgatgaaaagagctcaaataaagagattttatggcatctctacggccaatacatatttgaaaacgtaaaagcaaaacaaaaaagtttcaacatccctgtacttgatcaagaaggtgatattaactaccttaataaacattactcattaagaaaggtgtgtctacaatag

SEQ ID NO: 2636 - DNA, 609 bp, Bacillus licheniformis
gtgctatattacaaaaaaattaattcagtgctcaatcatgcaaggaaaaaagaaaatattttaatcaatatagatgaaattgatataacagagaatgaacttcgatttattgatcgtttagatatcaaccatcaacaaaaaaagctctgctttacccttctcgccttagcaaagttatattcaacagttcactacataaaacatggtgaacattcgacagagcactattatggtggaaacaacaaaagatacaaagaacttatagatacttctcatacttcgttaactgccaacaagctgcatcaaaatattggagagttggccacgaaagacattgttgaaattcgaaataaaggattcattaaattaagttttatctatggtatcgaccccggtggagaaacggctattaaaataagatcgtttgacagtatcggcctctattacgatctgcacactggtcaaaagaaagttaaatcatgcgtcaattgccaaactccatttagatttaaaagcaacaaatctaaatactgcccttcttgtgcatccgctatagcaaaagaaaaaacaagggcaagagtaagaaaacatcgaaatgtaacgctttag

SEQ ID NO: 2637 - DNA, 276 bp, Bacillus licheniformis
atgaataaaaaagaactaattggtgcagttgcagaggctacagaactaacaaagaaagatgtcgaattggttgttgactcaacatttgatgtaatcacatctgctctaaaagatggtgaaaaagttaaagtgcacggttttggcagtttcgaagtgcgagagcgtgctgcacgcaaggggcgtaaccttcaatcaggggaagaaattgaaatcccagcaacaaaagcaccagcatttaaagctgctaaagctcttaaagatgctatcaaacaataa

SEQ ID NO: 2638 - DNA, 150 bp, Bacillus licheniformis
ttggttgagtttaactatgatgatttagaaaaagtaatattaaaaaatgcaaagaagcacaatattacgattaccaaagaacagatcgagcttttcttcgcctcagaggaagagtatatgaggagtattggtttaatctcttcagaataa

SEQ ID NO: 2639 - DNA, 516 bp, Bacillus licheniformis
atgtcaaaaatcgcactatttgaagctctccctttaagaaatactatttccaaacgtattcaagaactcttgcaagaaagagatagcgttgcctatcttgaacacgacaaagatgaaccatacactaaaccaacaaaaactattgataaaatcacaacagagttggaagttgcaaggaaagattatcgtgaccttgtagtgttgatggccgaagcaaacctatatgctaaagttgtatgggatgaaaaagagttgtctataacggaagctcttgagttagctcaacaactaagaggtgaagctaataaacttaaaaactatggacgttcgaaacaaactgaacgactagcatcatattctgatgttgtgagttatcgtgaagccatgtttgagcctgagaaaatgaaatctaaaggattgaaacttgaaagaatggcgaatcgcttatcaaatgcaattgaaaaagcaaatcataactatgaaattgagtttgaagctgctaataagtatctataa

SEQ ID NO: 2640 - DNA, 189 bp, Bacillus licheniformis
atggcgaaaggtagatcaagtaaaaaagttaaccaagtgaatttaaaaggttttttggatatggatttaatggagataactgaacaaataaaagaagatgagtacacatatgatttaagggaacgattatatgagtttaatgggacaattaaagaagagaatgaacttcctgttaaagaagctgaatag

SEQ ID NO: 2641 - DNA, 1218 bp, Bacillus licheniformis
atgatcgatcctattcaaacgaagcgccgccctgatgagaatttaaaagaatggaaaattagaatttgctccaataaagatgtttacgatttaaactgggaagaaattaaggagcttattaacaaagaaactggtgaaaataaaggagaatccgcttataggaaatggttcaaaaacttcattgaaggcgttgaataccaaaaagaaaaatcagtagattccaacgctgccttgatagaattagagatgaaaaagcttgaagttatggaagagagaaagaaacttcaggcagtaaaacatgaatttcataaggaatcgcgaataaaaggtagaacagaactgctttatgaaaatgtatctcaagcaattaaagaaattggcactcttccccctccctcatttcaagcactggaaaagaacgagaaaaaaagagctgctgtcctcggctttggtgatgaacactttggtaaacaatttaaaagttgcaacaatgaatacaacgagcaaatttatcttgaacgtatgaaccaaattctctctgagactattgaatacataaaaaaagaaagcctagatgaattggtcgtactaaatggtgctgacagtgttgaaggaatggcattacgggtatctcaactgacggctttgcagtacggtttcattgatcaagttatcaaatactcacgttataaggttgagtggcttaaagaactttctaaatacgtaaagatcaagtacatacatatcccttctgctaaccatacagagttaagattacataattcaagtcgtttggaaatgcctaaagaggatgttgagcgtatcattgccacatatattcatgacatgcttaaagacaatgagcgaattgaagttccgcttcaagatgaagctatcgtagacttcaaattactggagtttgaaattgcagcttgtcatggtcaccaattaaaaaataaaaagaacgctattcgtgacatttcacagatgaagcgaaaattctacgactatttatatgtgtcacacttccatcatggaaacatgcttacagttggcgaagcagccacgcataatattcaggtaatacaactcccttctgtgatgggatcagacgactatagtgatgggctaatgacaggtgctaaagctggagctaacctttcaatttatgagtctggtaaaggccgggttattcaatacgattacatattaaattaa

SEQ ID NO: 2642 - DNA, 201 bp, Bacillus licheniformis
atgaacaatatggaatttgtaaaagaaaacataaacaaatgtctagaaaaactcacgaaattgcggatagacggaaatcattcagcatataagactgttgctaaagctttaagagaatacattgcaatgttcaatcatccaaataaagatgaagctgaacatttatcaaaagttattaagttagttcttgttgaaagataa

SEQ ID NO: 2643 - DNA, 132 bp, Bacillus licheniformis
atgaaactaagaaggtttttaattgaaaagttggctgggaaccgacctgtagcccttaatttaaaagtaaatggaacattggatgcagataaaacaaaagaaggtttgtttaaaaacattaagtgtatctga

SEQ ID NO: 2644 - DNA, 137 bp, Bacillus licheniformis
gttagcagttatccttttgctccttttccaagtctactcaattttgaaaaactggaacactggcttcgggtcaaatattatctcaatcatcattcttgtaggttgtattatcctgttagctctggacatcatcttta

SEQ ID NO: 2645 - DNA, 420 bp, Bacillus licheniformis
gtggctagttggttaacagaaaaaacaggggttgaagtcactacaaacggtgataatttagttgttccgtctttatctgatgtagatgtaaaagaatctaaaacatctgctgacagttctgcaattcaacctgctggagcgtgggactgcgtaatcgctgttggtcttatgattgggactgtcggcttcccactctctaagattgtcaaattgaaaaaagccatcaacttactcggcggcgtaaagaaaaccgttgacagaatttactctaagtacaaaagcttgaaaaagcaaagatggagaacagtagacgcttggaaagaagctgtaaaaagaacaaccaataacctgccaaaggatgtaggagaggcttttcttgatttcttcaacatatcaaacgtaatacgacaatgcgtatag

SEQ ID NO: 2646 - DNA, 228 bp, Bacillus licheniformis
atgaaaaaatattttccattctttttagcctttctactagcttttgcgaccatcacaccgtcctttgcatcagcaaaggaagagggggaaattgatgcaccaacaggaagtttagagagtgaacttctttcaccaggcagtgattttgttaaattcttagaaggcattgagcagttgccagctagtgttgaaaaacaaggtccgattaaaaagtggctagttggttaa

SEQ ID NO: 2647 - DNA, 933 bp, Bacillus licheniformis
atggctacacaaaaacttatgtgctcctgctgtgggaaagctcaagctttttctcagttttataaatctgaatccttgtttaacgctgctacaggaaaactaacagtctgtaagatgtgtcttcaaactgaatataagaaagaccctgaaaatttaacacatgtacaaaacattttacgtatgattgatcgcccttttatttatgatatttggatagcttcaatagatgaagcaaaaacaaaatctaaaaatggggatgccaatgtttttggtgtctacatgaaaaatatcggaatgaaagatttcatctccaaaaattggtcagatagcgaatatgattttgaagaagaacaagaacatacaaagaaaatgttgcttgctaaaagcgatgaaaatgtgacacaggaagacattgatgaattcattcagttttggggacgcggtctatctattgaggattatttatggcttcagaatgagtacatagactttacaaatagatatgaatgcgattctaaaggaatggaactgcttataaatcaaatttgtctaacaatgctggatattcgtaagcgtcgggaaaatggagagaaagtcgatcagcagcaaaaaacactccaggatttattgggatcgagtaatctaaaaccagttcaagaatcaggcgctagtggtgttgaacaagagaccttcggtacattgataaaaaaatatgaaaacgaaaggccaattccagaacctgagcatcgttggaaagatcctgataagattggtaagtacataaaagtatttttcttaggtcatttatcaaggatgcttggtattaagaatgactattcaaatgaatattgggacgaaatgaaaaagcacactgttgaagagcctgtagatgaagaggaagacgaggtaaacgaaaatggcctcatacagtaa

SEQ ID NO: 2648 - DNA, 1770 bp, Bacillus licheniformis
atggcctcatacagtaactttacaacagatcgaaaaaaacatagtagagggattaatctcttcaataaaggcaagaacttcaacaaaaaatctaaatcagaaagactgatggatggcattggtgcttgggcttctttttatcgagctaacccccatcgatttgtaaaagaatacttaggaataacccttaaattatttcaatgtattttgatttacatgatggtacataaccattattttatgtatttagctagtcgtggacagggtaaaacttggttaacgtcggtgtactgctgtgttcaagccatactatttcctggcacaaagatagtcattgcttcaggtactaaaggacaagcaagagaagttattgaaaagattgatgatttgcgaaaagagtctccgaatttaagacgagaaattgaggacttaaaaacttcaactaatgacgcaagggttgaattccataatggtagttggattaaaattgttgcatcaaacgacggagctcgctcaaaacgtgcaaaccttttgattgtggacgagttcagaatggtcgattttgagatcatcagtaaagtattgagaaagtttcttaccgctccaaggtctccaaaatatcttgaaaaagaagaatatgctcatctaaaagaacgaaacaaagaaatttacttatcatcctgctggtataaggttcactggtcatataataggtttgtcacctattttaatgcaatgatgaaaggatcaaaatattttgtatgtggtcttccttatcaaattgccattaaagaaggattgcttgataaggatcaagtaaaagacgaaatgtcagaagaagactttgatcccattggttggtcaatggaaatggaagcattgtggtttggagaatcagaaaaagcttattttaaatttgaagaccttgaaaagaatcgaaagctcgcctctccccttttccctcctgattactatgaccttattaaagattccaattttaaatttgaaaataaaaaacctggtgaactaaggttaattagcaacgacattgctggcatggcaggtaaagataatgacgctagtgtgtacactatttttagattaattccaaattcaaatggttatgatagacacattgtttatatggagagcatagttggtggacacacaggttcacaagcaacaaggataagacagttatttgaagattatgcatgtgactatattgtgctagatactcaaagcattggtctaggtgtatatgatgcgctttgtcagcctctatacgataaagaaagagctaaagaatatgaaccactctcttgtatcaatgacgaaaaaatggctgaacgttgcacatatcaaaatgccgaaaaacttatttacagcattaaaggtaacgctcagttaaatagtgagattgcagttcttcttaaagacggatttaaacgaggaaaaattaaaatccctataaatgaaaatgaaggtcgagagtatttaaagcgattcaagggatacgaagccttaccagaagaaaccaaggccaaatttatctcatcttatgttcaaatcaccttgttgatcaatgaaatgataaaccttgaagctgaatacagcgataacggacaaatcaagctaaaagaacctaagagtaaacgaaaagacagatatagttccgtggcctatgggaattatgttgctacccttttagaacgaaaactcaacaaacaaacagaatatgacattgatgatgatcttgtctacttttaa

SEQ ID NO: 2649 - DNA, 1521 bp, Bacillus licheniformis
atggctaatattaaaaaaatcgatattgaatcagaggaatatcaaaagctactaaacgattacagcacctatgtgtctacttttgcatctggcttcgtttctaacttgttctctcaaggtattataagtgaagtagatgctaagcagttaaaagaatacttttctaaccctgataagttccagaaagagatagaagatcttgctcaatatttctatatttcaaccgctgagatccaccaactttttgagttaatcgaagccctcccaactttgaattataaaattgattcctttgtgaaaagcaagtcctctgataagcacatctcccttttaaataaatccctccatagagtaaaacataaaagattaacacgcgacttgctaaaacaaactgcaacagcaggaacgctcgttggaatttggctaggagatgaaaaatccccctacccttttgtgttcgacagcgttgaatatgtttttccagctttcaggagaaatggtgattgggtttgtttaatcaatatggagtatttcagcaacttcaaagaggactatagaaaagagctgctaaatagcttctcccctttcattaagaattcagattatgaaaacttcctaaaagatcgtgagaaatacagatataaggaactcccacaagaacggacattcccgcttcgaaccggaactttaaaaaggaatcaagggttaggtacatcttgggtaacaccaggtttatatgatgttctacataagaagaaacttaaagacgttgaaagagctatcgccaataaaatcattaatgcagttgctgttttaaccatcgggactgataaaggtaaaggcgagtacacaaatcttaagcttccaagaccagtaaagcaaaaaattcattctggagtgaaggctgctttagaaaaaaacaataaagatggagttacagtcgtttccatccccgactttgcaaatttggagttcccggatgtaaaagccgatggattagacggaacaaaatttgaccacatcaacagtgacatacaatctgcttatggtttatcaggatctttgctaaatggtgatggcggcaactatgcaacgtcctcattaaacttggataccttttacaaaagaattggcgtcttaatggaggaagttgaacatgaagtatatcaaaaactctttaaccttatccttcctgcaggtcaaaaagataattattacatgaactatgacaaagataagcctttaacacttaaagagaagatggacattctcattaagcttaatgataaaggatggtcaattaaacatgttatcgacaatattgcaggcgtgtcatgggaaagttatttggaacaaactttatatgaaacagatgaattgaatcttcaagataagataaagccttaccaaacatcctatacatatacaggcagtgaagctgggcaccctgttgtagatgagagtactaatgaaaacaccattaaatctgcaacatcaaatggaaacagcctaccagactaa

SEQ ID NO: 2650 - DNA, 1440 bp, Bacillus licheniformis
ttgaccaaagagcaaaagaaaaaagtttttcaattgcagcttaatgagataaagaaaacagatgatcccacaaaactcccctgcacttttatcatttttgactttgagacatctcacaacaatacagtcatttctaaggaagttgctttggacgcctcccctactattatcaataagcctattgttgcaaaataccatgaggttgaagaaaacaacactgctactgatgcacttggatctcatgaagcatatttaggtactgataaacacggtgaacttgaagttaagacggatactaccccaatcggcgtgtttacttctgaaggatacattatggagatcgatactccggaaggaaaaaaagaagttttggccgccgatgcagttttatggagttcgcgtttcagcgatgcctgtgagcttttattggaatggtattcacggggcatcaatataaacacaagctgtgaaattctatactcaaattactctgttaaagatggaatagagtacattgaaacgcctatttatttagaaggtcatgcgatcttgaattctgagaaacgaggagagcacgatatcgtcctccctgcttatgattcatctcgcttagtgagttttaatgagatgcaaaaattcgagaaattggttgcacaagctgcaaaccaagaaaaacaaaaggaaggtgaaaaagtggataaatttaaaaaagtgtttgaattatcacattcggacataagaacgcttatctataatcaacttgatccaactctcgaatcaaatgagggatcatatattgctgatgtgtatgatacatactttattgtaaatatttatagttggtctgaagataattcttacgacaaatattacaaaattaactacaccaaaaatggggatactctgacaattgatttagactcaaaaactgaagtcttcttaaaacgaaactgggaagaagttgtccctgaagaaattcaaagtcagttaaatgaaaaagacacaacaatttcagagctctctaatcagtttaatgaaatcaaagagagtaaatctaagcttgaggaacaattcaatgcagcaagtgaaaagctcgttcaattaaactctgttgtagaaaagcttaaacctttcaaggaaaaacatgaaaaagcagagttcgaaaaaagagctcaagaaaagaaagaattctataagcttaaatttgaagctcttaatgctgaagagaaatatgaaactgaagaagttcaaaatcttattctagcatcagctaaagacaacgaagaagccgataaagcagttcttcaattgaattcaatgttggttgaacttgttgatcatgcaactgaccaagatggaaattttattagagagatgtccagcaaacgtgaaaaattactaaaagatgatgattcgtttgaatcgcgttattcgtcttaa

SEQ ID NO: 2651 - DNA, 603 bp, Bacillus licheniformis
atggctactagactacaaactgctcttacagaagtaggcacccacactactggtaacttgaattcattaaaaatcaaaactcttgctcacggtgctaaggtatctggatcagatattgacaactttatgcttgtggaactcggttttgatgaagaaggaaaccgcattgcaaaaaaactttccgataaaaagcacagagcttatttaattgcagccccagaagttcgctatttgggcgagtctttgactgatttctataacgctgaaggtgaacacggtcgtatcgttattttggaaccaggatacacacgttttgatgtttctgctttctctttgaatgaaggcgtcaaagaagttaaacgaggacaagtggcgcactttgatattaaaactgaaaaatatgttttaagcgaccctgcttcacctcatgctgactttgcagattcttctgctaaattccttgttgtaaacagcgaagatgatctccagtacacaatgggacaaaagctggtacgtctcgaagtaattacaggatcagaaacgggcttagtacctggaacaagttcagagactcaagcaaaagccgtagacattggcgattaa

SEQ ID NO: 2652 - DNA, 1017 bp, Bacillus licheniformis
atgaaacttgacactgtaaaaattaagggcttatttagccgtgtggtcaacaataagatggaagccacagataaatcggatatcgaaacttatattaaaaaagtatttggtgatggaactgttactcctgacccttctatgttgcaccagtttaatacgcttgttgtacagcaagcagatgaaattgcaaaaccaatggttacaaatctaatcactctatttgcaaatcacgaacaagagaaaccagggagtctaaaattaatcaaaatccctaagaaaaacaaagcaaaagtgatttggtctgctaatggatcaggtgtagatctagtccgtgttgaaggtcgagaaaatgtacctgctgttccatatacgctatccactggtttttattatgagccacttgatcttgtaactgattctgtcgaatatttcaacaaattagttaatgacattgccaatgcaaaagttcgattgtatttggataaaattcatcaattaacggctgctgctattgctaaaggaaaaatcccaccaaaaaacgtggctgttgggtcaaaccttacattacaaaaatataatgaagttgcttcagttcttcagcgttatggaggtaggccagtatttgttggagactcgcttcttattgattactttgcttttcagcaagctacagattctacatataaaaaccttctaactgatggcattaaaaatgagcttctgactgctttaaaccctactacaattggaagaactactgcagtaaacctcacaaacccattcactgatgaaactaactcaaaagttgagttgcctgtaaacaaaggttatatgtttgctggtggagtgtcacaaaaaccattctctattgttgagtacggtgggcttaaacagttaactgaacaagacatcgaggatgaaagaattaaaatgaaaatcactcaatctgcttctgttaaccttctgtttggtgaagcgattggaattatcgaggaacaagcagcagtatctatctaa

SEQ ID NO: 2653 - DNA, 471 bp, Bacillus licheniformis
atgtctgataaagttaaattggctcgttatagaaacacttcttattttgttgggtacaccggagatggtggacttaaacaattcacttggtcaggtagtaaaaatggtaaggctgagatcaaggaagtacctagagatgttgttgactggttgacaatgaatagtgtctgctttgataaaggtgaattagttattgttgatgaagatgactcaacaaaacaaatcaaagaatcaattgttgatgcggaagcatacacgaacaacactcacacaaaagaagaaatttcaaagatgattaaaacaggtaacattgcacaaatgaaaaataagcttgaaaagattacagttgactcagaaaaacagtttgttattgatgttgcttctgaattcagtgatgatatccctgctggaaaacttaaagccttagctgaatggatgggtgtcgaagatccttccctgctctttgactag

SEQ ID NO: 2654 - DNA, 399 bp, Bacillus licheniformis
atgacttcttatgatgaaatttgggagtttttcttgctaaactgtaaaacgtctgatatcaatttacctacggaagaatctttaatttataaatctataaggaacgcagtcctgcgattcaataatagacttcgcgacaaaaaattgaagtgtaacgatgaaactgaaacagtagacagagtaatgaacgaggatgaattgttaattctcgttcattatttacgtttaatttttttaattaatgaacagactttttttcagactacatggcagccatttgcaaaagacgttggtgttaccaactatggtacacaaatcaattcattaacaaagtcaattgagaaacaaacagcagatattgaccgcctcattatgaatacagaggtggattacttatga

SEQ ID NO: 2655 - DNA, 231 bp, Bacillus licheniformis
atgagagaaaaatatattaatgaaggacaagccccctcctctttacaagaacactgcataagactaagcaagaaaaacaactctgtcctttataaagtagagcaatatttaaataaaaaaatgctgtctgatacagaactagctgaaattcgtgaaatcattttggacgtgagtgctgaaatcgtaagattaggtcaatccctatctggtgatttagatgaaagactttaa

SEQ ID NO: 2656 - DNA, 660 bp, Bacillus licheniformis
atgaaagactttaaaaattaccatcagatcgacgttaataaaaagattgaacatgatgggaaattaatttttcaggctggtttgaagggttttcagtcagagactgtgtcaattgatgaaaaagaatcagtaacatgtttgattacttcaaagttttcaaatggcgatggaatgactaaatacattctagggcttcccgaagacatctatattggaggagtcgtcaaatgggacactcaaaagtggctaatcactactttcccaagctttaataaaatttataaaaaggctgaaatcaggctatgcaactcctcaatacagttaactacaaatgacaaatggattgattcagacaagataagcgaagttactggaaaaccaatcaaaactaaagtccctggagaagttattgaaataccatgtgtttttgaacgttcaacatctataaatgggactgatctagccgtcaaccttcctgatggtcaagcaaacatcacaattccaaatataaataacgacaaaataaaaattgggctactcctctctttctttggtgaggactatcttgttaatgacattgattactctaaggtttatggagatcgtggcacaataaaattaattgctaaaaagaaagtcagaggtgatggtagtgcatga

SEQ ID NO: 2657 - DNA, 531 bp, Bacillus licheniformis
atgagtaatatggttgaacacatgaccaagatttttagaacattgattaatgactctgagctcaacagacttctgtattataaggacacccccctctcccctgacctccctgatgttcaggacttagaaggctatgaagttgaaacaaccgttgaagaagatggaaaagtccgcattatcccccctatttttaagacaatcttcaaaagagctccaaaaaccgatgacattactgaatcaccaatctgtagagtgtgtatgtatttgggaagtggcttatcaaagccctctaatcaaagctatttgcttatggatcaagaccttcacattgatgtctacactcatattgagacatatgaagaaaatgaatttaggtcattgaaaattttggacagattatctgagcttctcttcaataaaaatatcgctggcttcggaaaggctttagctccgaaaagaatgctgattacaaaccctcctgctggttacttgggttataaaatgattttcacatttggagcaatgaaatga

SEQ ID NO: 2658 - DNA, 720 bp, Bacillus licheniformis
atgaacgaaatttctcaagatctctttatcttaggtattcccgttgacacccctattggcaagtgccatttcctcaaaatgaaggattacaacgagtatgcggcatacctggacttaataaaaatgagtaaaaacgagattgtttatagatatagccagcttaataaaagtggtgaattaaataaccttattgaagagatgaaaaagctacctctttttgatattgtcaatcaattaccaaattttaatgaggcctactctgaagtatttaaaaaaggttttcagaacgacacagtctttgaattaatagatcgaaacaatttcaattcaataagaaaactttttttagaaatgcattgcttaaaagaagagaaaattagccccaacccagaagtgcaacgaaggattgaacagagtaaaagattaaaacagcaagagcaagaaccacttgaagtatacgatatgattagctccatagcgacttttgcaggtatttcatacaaagaaattgctgaaatgacattgtatcaaatgtatatgacgttctatcgcattagctgctttaaagactatgataccgcaattttatttgcgacagtatctcccgaggcaggtaagaacattaaacattggagtagccatgttgacctctttgaagaagagagccacgcactgtcagatgagcaagttaaaaacttaaaaagattgtttcaagactga

SEQ ID NO: 2659 - DNA, 795 bp, Bacillus licheniformis
atgaccaagaaaacagttattcatgatacagcagatgtctattggagaagaaaatccgatggacatgtaatttctgctgcagaagctcaattggcttccatttcacaatccatttcagaagaagaattaaaaggtggtattgggaatagaacactttatcttcttcgcacagataagtcgatcgatgccaaggtgaaaaatgctttctttgatatggaattcatggctatgactcaaggggtagccatcgaggaaaacaaatttaatgtatctgaacgtgaagatgtaacagttcaggtagatggtacagttaaacttcaaaaaactcctgttggtgtagtatcactcaagaacagcaaaggagcaagcatacaggctgaatacaaagatgaagcagttacggttccagatgattttgcaaaagaaggcgatgttctaactgctgtttatagaattgaggtaacaggagaaacagtcgagatcaactccaataaattttctgaaatgtatgagcttgaatatcacactattgagtacgacccagataccggggtagtgtacagtgacctctatattcaatttgacaaggttgctccatctggtgaatttgaaatgtcactagaaaatggcgctgcttatacaccagagctttcatttaaagtgcttgcagcagacagcagcggtagatacggtaggtttgctcgtgtacctcgtactaaaacaaatacgcctgacatcccctccccttctccagacacaggaactcaaacaaaagctgtagacattggtgactaa

SEQ ID NO: 2660 - DNA, 393 bp, Bacillus licheniformis
atggctgaacaatttctaaatgaaagtaatggagtatttacatctgcagaaaatgatggcacaggaaaaccagtaacggctgtttatttaaaaaacaacagtgaagagaaccctttatacattaaagggatgcaaggcgagccggggccaaaaggcgataaaggtgacaagggtgaaccggggccaaaaggtgataaaggtgacaaaggcgatcctgctgtcattgaagaaaaaagcattactcatgaaatgcttggtgacaatattgtcagaagtaacaacattggaaccggcagcgtcttgctcgttaacttaaacagcgaagtcaaggctaagttcgatgatttacaaaaacaaattgatgaattaaaaggcggccaagcatccaactaa

SEQ ID NO: 2661 - DNA, 366 bp, Bacillus licheniformis
gtgtcagtttgcgattataaaacactaccgcgaaaagtcgaacctcaaatcacccccttcatctttcatgattctgtatctgagccaagtgaaggtgaaaaacttattgtaggtgctcatcgtacacttactgttgaaattacaggcgactgcacttcaagagaagttaaattttatagtgttacacaagatgggaaaaaaattgttctagaagggataaactcctctaatcatatgtttggcgcaagcactctgggaattgatgaaatatgggagtttgatgtcgccgggaaaaccgcaattcaatttgaaatatccaagattaatggtggatcacttaccattaagggaaatgcggtgacatag

SEQ ID NO: 2662 - DNA, 1293 bp, Bacillus licheniformis
atggataatctttctagggcacagaataaagaaaatgaaataaagattgagaatttaaaagacagatttgatttttttgaaaaacataccgtagataacaaaaaagaagttacggaaaaaatcgaagagtttaatgagctgcttaattctcatgtgattaataatgaaaatccccatggagtaacaactcagcaagtaaccataattaaagacccaacaccataccaagatgcatcttattctggagataattatccaatgggcatctcaacctttcctctcttacagggatcagttggtttcccaagtcagtacggagaatgcttaaacataaaatcaacaaaatatcgattcgcacagcttttcttccatgcaggaaatcgagaagattcaagaatctatcttcgtcattggtatccctccacaggctggacggaatttattacagtcccctcctcttctgatgtagatgatgcactgaaatcagcgaaagcttacacagaagctcatgcaaatgataaagacaatccccacgctgttacaaaagaacaggttgggttatcaaaagttgataatattaaacaagcagcaaagaccgaatttgatacgcataacaccgacaacactcgccatattactacggctgaacggacgaaatggaatggcgggcaactttataaattaacagatgacaacggcagcagaatgcgaattcctgatggcactgacttattaactttaccatccggactttattatggtgtcagtaacaaagttgtgaattctccagatccgaaggcggtcgagtggtttcattacgatgtttcaactaatagtgcgcgcaaaacaattgtggtaactgctacggccaatcctagaaggtggttcggaacaatccacactgacgggtcatttaaaggttggcacagatttattacagatgccgacgtgtccgtaacctggcaatcgcctactttattaaacggatggaagcagtatggaacccataaggttcagtttagtaaaaatgtacttggggaagttgagataattggctcaataaccggaggaactattggttttgaggtgcctgcttttacgctaccagcagggtatagacctttgcaaatgacacattttataggcgtagcttcaagtattggaacaggttcagcccctcaatttcatagaacacatatttccaccgatggaaatgtatatatacaaagctgctccaatacagtcaatccaaatgaatttatcacttttggatttaaatttaagtcggcttag

SEQ ID NO: 2663 - DNA, 312 bp, Bacillus licheniformis
atgaaatggctatacaaatacgatgaaaatttcaactacttgccaggggaagaattacagatcgaagacgacgataaaactcctgatttttattgtgatgcaagaccgcctgacggtctatatttacctaaatttgatccaaagaaaaataaatggttcgaatcggccgcacaggaatatatcgatagtttgcaacctccggagccagaacccaatcccatagatctattaaagaaacaaaatgccttactgtccttgcagatagctcgccttcaatcagaggtttcagaattaaaaggcggttacacctca

SEQ ID NO: 2664 - DNA, 486 bp, Bacillus licheniformis
atggcaacacaaaaattaacgctcagtcatattaaagaggataataagaaatacaatgagaagcagagaattgaattgaatgatcaatatcatacttacatttatccgaattttgactctgcaagaattatgaagatgtttaaatctttaattcgggatttcacggatattaaaaataaaaaaggtgttaaaactgaacttagcccaggtgacttgctttatgtgtatacaattatcgaatttagtgatattgcagaattccctaaaaaacttacagataaactaaaaatgttcgaggaaattgcaaaatcggatttcgcttctaagatttacgagtcattccctaaagaaagtttgcaaagaattgataaaacagctctaaacgttgcaaaaattgctcaacagagcaaggaatttgtagattcactagaagctaatgaagatattctaagaaaagttgaagagcttactcaagaggatagctaa

SEQ ID NO: 2665 - DNA, 417 bp, Bacillus licheniformis
atggcgacttataaagatctcgccattttagtagagacagaagctttaaaggccatccaacaatctaatagcagcactaagcaaacgttaatcaaaactgggcaagaacatgttgaaactgatgtttacgacgtgtacaatcccttagtttatgaaagaactcacgagctgaaaagttcctttgtaactgaaaatgaagctaatgggctctcattggataacattcgagaagatgaaggtcgtgatgttgcaactgttgttgaaactggtgaaggctatacctatcctgatacatatggttatggctatggtagaccaagacctttcatgactaacactgctgaagctttaaagaatggccgcttaattgaagctgtgaccaaggatattaacaaacttgggcacaagacaattaaa

SEQ ID NO: 2666 - DNA, 1002 bp, Bacillus licheniformis
atggcgaaagaaataaaacagaatatgatacgtccccgtgcaaagaagctgcctgatgttactgatgagatgtggctgcaggttgatgaggagcacagaaatttaacagaagaattcttggatgctcactcattccgtgacaaaacgagaaagcaatacacctcttcccttcggcaattcttttggtgggtacataattctctaaatggaaagaaactgtataagatcactaagcgtgacttcattagataccaaagtttcttaaaaaacagaggcatgtcttccagtggtatcgcactaaaaaaagctggtgtttcctctttaaataactatattgaaaacgtcgtggctgaagatgacgacaattataaaacattcaggaactttacccgcggcctccctgctattcctaagacaatcacctatgaaaaagtaaaaattacatatgaagattatcaaacaatgatgaaagcacttgaagaagatgagaactatttagggatggcttggcttgcaactgcttttaatgtaggagctagaagagctgaaatcattcagtttaagacagaaatcttagattaccctatccctgaaggccagcaatatgtgttatcgcataaagtatttggcaaaggcagtggtgaaggcaaggtactggaatacatgatcaatacagaagctctaaaatatttaaagctgtggcatgaaaaacgcgggtacgatcatgaatacctctttaccactacttacggtggacaaccaaagcaaatgtcagaaacatgggctgattatttttgctccgatgttttgtcagacattcttggccgcagaatcaaccctcacctttttaaagcctcttgtatcacctacttactcgaagtcaagaaaatcaagattgaacttgtcagcaaatacattgctcaacacgaagatgtctccactacaatcaaacactatgatcttcgcgattttaaagaagaaaagaatcaaatatttatgtaa

SEQ ID NO: 2667 - DNA, 678 bp, Bacillus licheniformis
atgcttaaacctgattttagcaagtttaacaatttatcaaataatattaaggcttctgattcagaaaaagtatggagagagtttctcctcacatcttttaactttgtaaatcactgttcttataaagttaatgaagatgagctgtcagaaataacaaaaagcttacagaactggattcaaagaaggcggtttaatcagtataaggaaaggaacaatatagtaacaccacaacaaggggaaatctttttagccgatttaggactaaatttcgaatttgcttattgtcatcctgttctaattctcgatgaaattgaaaacaaattgatcgtgttacctgttacatcaagtcctgacaaagtgaaagatgcttttcatccaataacaaatccttctggacttaaacgttacaggagagttactcctgctgatggatttgaatctgaatcagctattgtaatggatgaattgaggattataagtaaagggcgattattgaataagatatcctctttgaatgaagatatttatttagtgggatcaatttttcaagaagtaattgaaacttccttttcattgctttatagcttacagtatcaaaaaatcaatgacatggaacaagaaattgctgaactaagagatgaaataaaggttttaaaagaaaaaaaccatcaagtttaa

SEQ ID NO: 2668 - DNA, 288 bp, Bacillus licheniformis
gtgctatactttaattaccaaaatattggaggccgaccattgatgaacttcgatcctgagaaattcaagaaacttcttaattctgcgtcaaatccttcaaatccaaaggatacaaaaataaagaactattacgtgaatcaagagtatcaagaatttgtatctttcgatattgactttgagaatgtagatatcgccttgcgtattgctggacttttaggaaaacacgctacgaactttactataaccactttgcatttccctgacacaaacaaaattgattatatttag

SEQ ID NO: 2669 - DNA, 462 bp, Bacillus licheniformis
atgtttagatggtggattaggaaaaggaataaactaaaaaaagagcctgaagatttaggagaggtattgctaacgtggcctgatgaagaaatacagaaatacattagagattattttggttatagttcaaacaaaaacaagaaaattgagttacaccgaattagacggcttgatttagatacaataatacttggcatcgcaaggatgaaagaaatcgaggagtctttcgacaattcgaagacggttcccagtttcatagcggcaactgtgtttatgcttactcaagttttcaatttttatacagatgacgaaaaatttcagttgatcttcattctggtatcatactttattttcttcgtggttatattcattattaaaaatggtagtgatcatcgatcccgagcagctcaatataggagcttactggaacaggtgaaatcggaaaaagagaaggcatcctaa

SEQ ID NO: 2670 - DNA, 459 bp, Bacillus licheniformis
atggatagtgatgaatattataaaaaatatttagaagagagtttaatcaagttaaaaactcgtgaccttatagagtttattaaaagagaatttcctgaagaggtcaactataaccatgagattcaccaaaagaaagttgaagcgttgaaatctctatcaaaaacagacttatctgcggctatagccagactagctagaattcaacgaaagtttgatcatactaaattgtggactattggcgcggtttttattggtacagctcttgttaatttacaaattttatttaaagttaacctcacaaaaatttccgaggaaaattatattaattatttaatgtatggtattactgccttaactgtgtgctttgtcttatatagggctatcagaaaggataagaaaatatcagatacagcagcatatttaaaggatttgattgaacaagttaaatcagataagtaa

SEQ ID NO: 2671 - DNA, 741 bp, Bacillus licheniformis
atgcaggatgcgctctatttgctcgatgaagcagaacaggctttagaggatatatctaaattacacgataaggctctagcttctgaagatttgcaacgtaccttagcctttaaaattaaaaattttttggctgctttgaactcttctttggattacgctgcatattatatctttgaagtgttttgtcttgaaaatgcatcggcagtttacgataatattgaatacataaaaagaaaaatatattttccggcctataaaaaagaaaaaatttttgaagagcaggttaataaacattttgtgggcttaaaggaagaccataattttctttatgaagtatttaagatgccccaagagttcgaaatcggctcatcttggttaactgactttaaaaaacattgtaatgaaaccaaacacgtaagactcacacgaaacaaaaagctctattctggaacattggattatttgtcattcccagagggtattactatgctgaataataagtttgaaggagtagggcaggttttgacagtgaatgatgttccttttgatcctgataatccacataaccatccttacataaatcagtatgaaggagaattcacttcatacttttcctttgaaggtagtagtaaacctatagttaaaactcttgaattttatttgaacatggttatggagatcgtaactaatataaatgattattgtgaatctcaacaaattaaaccaccaaaaaagaattaa

SEQ ID NO: 2672 - DNA, 462 bp, Bacillus licheniformis
ttgatgacaatcggtcttgctgttgctggaggagctatttcattggtatctgctctttttgttcagtgcttccaatttaaaaaccaaataaaaatggaagaaattaaagttaaaagagaatataagctaaaaagaatggacgtttataatgaaatcttgaaaatccaaaacaaagattatgttgcaactattaatgctgaggaaggaacatgtaagtttaattacgatatttatttaaattcaataaaacctatattgtatcaaaattatcatctgcttggggaaaaagtcattgaagcggttaagaacatagaagatttcttgtactcaagaaatgttgcatatgatcgcccagatattactgatgaagaggtatgcactgattttttgaatatgattaaccttatggaaaatgaagctaagcaatttagacttgatctggaaaaagttgaaattatttga

SEQ ID NO: 2673 - DNA, 627 bp, Bacillus licheniformis
atgttaattattgcagggtttattgttttctttggatatgctctgtctgagggtaaaaagcaagaagaaaaacaaaaagagggtaaaaaaagtgaccgaaaaaaccttgatcaatatgatttagatttttctccgaacaaatcatatataaaccctgacggaaaaatgaaaattgccttcaattcagaaaatgagctatttaaaatatatagggtgtccccaaatggggcgattcatgaagttgctatcccctttgataaaattgtcgattcagaaatacttattgatgatacaacggttatgaaagcttcacgaggtcaacaagtagctggagctttaattgggggtgcaattgctggtggagttggagcaattattggtgggagttctcccaataccacaggcataaacactgtgaaaagaattcggttaaagatcacaaatgaagattttgaaaatccagtttattatattgatttcctccctactcgtgataagttaaaccgtagaattaataaaggttggaacaaagaagactctacagtgtcttatgcattaaagaaagctgaatattggcaaggtgttctggaattggccataagaaaaacaaatcaagtcgctcattaa

SEQ ID NO: 2674 - DNA, 222 bp, Bacillus licheniformis
ttgaaatttattaatgctaaaccgcggctaaacgaaattttagatgaaagaggtatttcgcaattaaaactttcacaaattacaggtattagccaatcagcaattaatcgctttgatcgaaataagcagcacctagataatcatttatttattatctcgcgagttcttgggatcacgattgaagaactttttgaagttgaagaggaagaagaaaacaaataa

SEQ ID NO: 2675 - DNA, 249 bp, Bacillus licheniformis
atgctgagcaaaaaagtatatgggactattatgcttacagtgtcgcgtcaaacagcagcttctagcaaatgtttagcaatacttgattcatactatgccatatccgatgatcgagttgatttgactgagttgactctactacacaaaaatggaaaagttttagggacggtcaaagtacataatgtgaaaatttcttgggatggatttaaaaagggagagaacatcattggctcaaatatacactcatga

SEQ ID NO: 2676 - DNA, 2298 bp, Bacillus licheniformis
ttggctcaaatatacactcatgaatttgtgcgagattatttcaagaaacatggatgtgaacttatttcagaatttaaaaacgttaggcagaaactttcttacagatgtgtttgcggagaaataggaactacaaatttctattcatttagaaacagccatcataaaaaatgcaataaatgtgtaagaaaaaaagcaaagaagccgaataaactagactttgaatatgtgaaaaaattttttaaagagaataattgtgagctccttgaatccatgtatattaatagctctactaagatggcttatatctgttcgtgtgggaaaaaagattataagacttggaataaatttagagcaggacaaaggtgtaaggattgtgcaataaatcagagtgctgaaaaacagagagcagattcttcatatgttgaaaactttctaaaagaacatggattttcaatagccgatgggaaatatgtaaacacaaattcaaaaatgttgcttatttgtccatgtggaaaaccaactgaacgaacatggagttcggttaaacagagtccaaaatgcaactgttcaattcattacacaaaacccttaaaaagaaagtttacaaaagaggatctgattaatttttattggaaattaaagaacgatcttggaagataccctagtttagaggatttaaagaaaaacccatcttgcccttccccatctgtttacgaacgaaagtttgggggatggataaagtttttagagagtattggcgtaatgactagcgacagatggtatgttgatgatatcgaaaccttaaaacgtatgtatgctgactattcttatgaggacataaacgatgctctcattaagaaaaggagcaaaagcacaatacagcataaagcaaatagcctcggattaaaaaaatcttataaagctaaatttggaaaagaaaaattctcaaatgattatttaataacttttctgaggaacttctacgacaaatacaatcgaactcctgttgcaaaagattttgcggaaaatgatttaaactatgatactttcactaaacgttttggctcttggaataatgcgctaaaaaaagctggtctaccaattaatagagaacgatcaaaaaatctctctaataatgaattacttaaaatgaaggaaatgtatgaagcaggagttgatatgcgagatatagcaaaacactttaattatacacatactgcgcctatttattatcatttgaataagatgaatgttaatctaacacgtaataatcgttggtcagaaaaacaaatccactatttgaaagctcactatcctaacgcagagtggaaggatttacttaaaaaccttgcacctttttcaaaagagagtattactacaaaggcttataaactcggtataaaaagaaactcaaatttttacaccgaaaaagaagaaaagattcttcgaaaattttatggaaaagtgtcttttcatgaactccttaagatgttgcctaatagaacggaatcttctgttgtttctaaagttaatcatatgggtttaaaaattagagaattttggagcgaagaagatattaacatgctgaaaaaacattatcagacctctactgatgaagaattattaaaaatgttcaaagatagatcatggtcttcgattcaaagtatggcaacaaaaaacttgaatctaaagagaacgaaggaatattacaaaaataaaaaagaaaaaattagagatcatctaatcaaagaacttaaagagtacgctcatgctttaggaagaacacctacatcagtagaagttcaaaagaaccgaaacctacaaggaatttcaacatatattaggtattttgatggttacagaaatgcttgtctaaaagcaggtcttgatcctaatcaatctatttttggtaggtcaattcactgtatatcattaaatggggatgtatgcctttcaaaaaaagagaaagaaataaccgacttatttatagaaaataacatagcgtatgtaaaagaggttctttataaagatatactgggcaaaaataatattccaaatataaaacttgactggtttgttaacaacagagtcattgttgagtatttcggaatgacagataaagattattataaaaaaagagctaattataaaatagagttttgtaagaagtatgacattccattgattccgctgtaccctgatgatttaacgaataactacaacggcttaaaagaaaaatttaaaactcatggaattaactttgggaatggagatgaacaaaatgaaaaaataccttaa

SEQ ID NO: 2677 - DNA, 252 bp, Bacillus licheniformis
atgaaaaaataccttaatcacttgacattgaccatagccgcttgtcaaacaactcacggcaactcagaagatgaagctgaacgatttaccgaatatgatttattggattttggagagtttgaagaacttaaagaaataacattaataaattttgacggtgataagataacccttcaagcctttaatatggggcttgaaattgaggacaccgaagaaatcgatgaagaagatgaactgctatacataaaataa

SEQ ID NO: 2678 - DNA, 7296 bp, Bacillus licheniformis
ttgagtcaacagttgagaattgtagttactccagttgccgacacctccgctcaatcagtcgagcaaattaacaagcagcttaaaacactacaatctaagttaaactcccttcaactcaaaacgaatattgatgcttctgctttaaaaaccctcaaagaattctcttctgcagttgaaacatatcaaaaaaatctcaagaattacaaccagacagttaaagaaacacaaaccgtcattaagaatgctgatgggacaactgaaaaaaccattcagcagcacaaaaagaatggtgaaatacttcagcgagaaattaagacgattgataatcgaaatcaaaagattcgtcaagaaactcaagaaacagcaaaattaacctctgaaattcaaaagcttggccaagctcaaaagataattgaacgtcaaaatgctcaaggtatcaagacaggcactactcaaaaaaatcgtgatggttttaaggatattacgtacaatctcgaccaaaatgggaatattaaaaactcaaccactgtaacaaatcttgatcaacaaagaaaagcaatcgaacagcttagagtaagcttacaaagactaaaagagcaagggcaactgtctgaagtcaccctctcctctcttggaagaaaaattaatttagctcagtctacagaacaaattgaagcactcagagtcaagcttaagactcttgatgacaagtcagcagcagttgcaaagactaaagagcttgaaaggcagttagaactatatagaagacaagcacaggtaaatactcagaacctgcaaaacagatacggcagctcattgagcaatgcaagtaatcaacagcttcaacagtatttgaattcagttaatcaattaactgcaaggacacctaatctaagaaatcagatggctagtcttaatatgcagtttagggaaatgtcctctaacattgctgctactacaaggcagacaatgggttttgttgagcaattaggagtcgctgccgcccgcataccggtgtggtttgctggtatgacaatgttcatggggccaattcgcgggttgcagtcgatggtcgatcaagttattcaaattgacacacttatgactgaaattcgaagggttatggatgaacctgattataagttcaatgatatgttgcaggaagcagttgaaatgggagatcaactttccaataaaatttcagatattcttcaaatgacaagttcattcggaagaatgggatttgatgaaactgaactaggaagcattactaaaactgcagaagttcttcaaaacgtatcgaatctgtccgttgatgaaacggtcaatactttgacaagtgcaatgttaaactttaatgttgccgctgaagactcaatatcaattgccgattaattatagtcgccttatatagtaatgtataagtgaaaaacccagtgaaccctattgctcaggggtgtgtccttttcacaggatgctaacggtggaactctaagggagaaatcctatgacaataccgtgccaagcctattttaggaaggtgtaacgactagcctttaaggtgtagaacagattttgagctactgttcgaagtgctgggcatcccaatgggatgaagatatagtctagtcccctacttaagtatcgggaaaccgagggtaatattcgaaattgaatgaagtcgacaacaactatgccgttacaacacaagacctggctaactccataaggaaggctggcgcgaccgcttcaaccttctcagtggatttaaacgatttaatcggatataccactgcagtggccagtaccactcgtgaatccggcaatatagtgggaaatgcattaaaaacaatcttcgcaaggatcggaaacaatgaaagttctataaaagctttagatcaaattgggatctccgtcaaaaaagctggaggagaagccaaaagttcaagtgaactaatcgaagaggttgccgataaatggaattcattaagtgatgctcaaaaacaaaacacaagtattggtgtagcaggtatttatcagctttctcgattaatcaatagtcgcctagttaagtaattagctagtgaaaagtcagtgaacctaatttagggtgtaatgtgatcgcttagatttaagtaggaaatgacttattaatcatattgctaacagggaaaatctaagtcagagttgatatgatgaccctgtgccaagtatttgcatcatgctgcgaagcacatgcaaatgaaggtgcaacgaccatcccttttgggagtagtttgcaggtgaaattcctgcttacgaagcgctggctgccctttagttaaaaaagaggcaaagatatggtctactccgtttaaatattccgaaaggaacggtacaaaggttaacgcgttaatgaacaacttctcgattgcccaggattcggcaactacggctgcggaatcaaccggaagcgcatggaaagaacaggaaaaatattcagaaagtctccaggcaagaataaatcgattatcaaacgcgtggacagaattgagtttagcctctggggatgcagtagtttcagatggcatagttgcacttacagaaactctaaaagaccttgttcaaatcggaacaggtataacaaaaacaatcggactccttcctcaagtttttggcattgcaactactgcagtattactctttaacgcttcacttagaaccggagccatagctaatggtaacttattcttgaggctacttaacaacttccctacatcattaactgccttctcctcttccatgactggagcagcaataagagcacgctttttaaatattacattagctacattaaaaaccaccgctcgaacaacaatggcttttcttgcaggtgctgtactgcctatggcagggttcatggctttaggctttgtaatcgaaaaacttgtctctgctttttctgatgctaaacaagaacaagaaaagcttgcagagtcacaaaagaaaagcgttgaagcaataaccacaaataaagaacagaccgatcagttaatacaaaaatataaagagttgcaaaaagcaaaagataacggttccctctcccctgacaaggagcaagaatatctacaggtcacacaacaattagctcagacgtttccaaatttgatttctggctacgactcccaaggtaatgccatcattaaaaataacgaagcattagaagatgctataaaatacaccaaagaattagccgaattaaacaaaaaagatatccaaactggcgcaaatagcaactttaaagaaaccctgagtgatatcagcaagctgaccgatgagatgaaagagtatcaaaaagttgcagaccattataagaacaacgatcggccattctgggatatcttcgacagcgacagtgattataaaaattttgggattaaagctgaacaacaagctcttcaagtcaaccagaagctatctagctcacaagctaaacttagagagcaagtgctgcaaactgttgacgcttataactccattaaaatcaaccctcagttaaccaaagatatcaacgaagccttcaataaaattgactttagtaagatgacttctgatgaattagagtcgttttccattaatgtttcaaaatacatggatgacattcagaaagcattagaatcagggaataaagttgatttctcaagagcatctcaagcacttcagaatttaattaaccaacaaatcaaaggtgctgatgaagctgacaaactttccttatcttatgatgacctaaagaatgctgtagactctacaaaaaatgctgctgattctgcaaaggtcacttgggatgaaaatggtgaaggggtaaacgaattaacaggagaagtcgaagatttaagtcaaaagctcaaggatgctaaaggcgatctagaggcaataaaagctgtaatggacgatttggtggcttctcagcaaacagaactagctatttctgcccttcaaaatgaagcatatgattcttttgctgactccatctcccctctcaatgaactgcttgagaaaatggctgaaggaaaaagcatctcagctgctgaagcaatgaaactggttcaaaaagaaaaagacttggctggagcaattactgttgaaaacggcgtagttaaactaaaccgagacgcaatcataaaactacgtgatgcaaaacttaaagcatacaacgacatgcaaaagtcagttaaacaggatctaatcaaccaggcaaacgcaacagtaaagaaaataaagaactatggtttagaggtcaaatcaatccagactgttgccgatgcgcaagccaatctttccaaaatgagaaaacaagtagacactttaatggaaagtggcaatatccagatggcaatgccaatcattaaagaaataaacgagttgagcgacgtcactggacagttagaagatctggataaaatggctgaactggccaactcatctttaaacgaagttggtacgtcccttgagaaatattctgacgaacaagagaaagccagcaaagaaactgagaaatccaaatacgtcgttgataaatataaagaagcccttgaaaaagtaaatgcagaaattgagaaatacaacaagcaaaccaatgattatcctaaatggtcacaaaaatacagagatgcaatcaataaggaaatcaaggcattagagcgtaagaaaaagctaatgcaggatcagattaaactgctgaaacagcaaattaaatctggttatattcctcaaactggacttgttacctcctcttctggttcttcatcaggctcatattcttccggaggatcatattctggcaaatactcttcttatattaatgctgcagcaagcaaatatggtgttgaccctgctctaatcgcggcaattattaaacaagaatcaaacttcaatgccaaagctcgttctggcgctggagcaatgggtttgatgcaactcatgcctggtactgcaaaaagtctaggtgtaaaaaatgcatatgatccctaccaaaacattatgggcggtaccaaatatattgctcaaatgttaaacaagtttggcggtaacatcgagaaagctttagctgcttacaatgcggggccaggtaacgtaataaaatatggtggcactcccccttttaaagaaacacaaaattacgttaagaaagtactctccaactacaataaaagcttatctacagcgacatccaagattgcaaattattacacgagcagcaacggatttagggtaagctctaaatttggtgcaaaagaaagtggtctccgctcctcccctcacaaaggaaccgacttcgcagctaaagccggaacacctgtaaaagcactaaaatctggtaaagtcgttactgccacctattcaaaaacagcaggtaactgggttgtcattcaacaggatgatggaacagttgcaaaatatatgcacatgcagaaaggtctcaaagttaagaaaggtgatgttgtatctgctggccaaacaataggtaaagtaggaagcactggacactcaacaggaaaccacctccacctacaaattgagcaaaatggcaaaccaattgaccctgaaaagtatatgcagggtttaacctcagatctttctcagtctgaagctgaaagacaacaagccctttcacaggcaaaatcggatttaatcggtttgcaaggtgatttagatgcagttaatgatcaaattcaagatctgcaatacgaattggttcaatccaagcttgatgaatttgataaacggaaatctgatctagaagtcaaaattgctcaaaatgagtctttggccaaacgctacctttctgacagcaaagaatttcgcaaatatacaaatgagcagaagaaagctgttgatgagcaacgcaaaattcaacagcaaaaaattaactggatcaacaaagagttaaaaacaaataaaaaacttaactatgctcagcgcgatcaactaagagaagagctgaaacaggctaaattagacctcatctcccttcaagatcaagtcagagagctgcaaggggaactaattcagtcacaggttgaccagaccctcaataatattgagaaatctgttaagaaaactgaggctaaacttaaagatgttgatatcaaaattcagatgactgaagatgacaataaaaaagtcaaatactacagtcagcaagtaaaattgattcaacaacagcaaactgaagccaaaaagtacattaagcaacttgaagcacagaaaaaggcagccaaaggcttccctgacatccagaaacaaattacagaggaaatcgaaaactggaaggataagcagaaggattacaatctagagctttataacaccaaaaaggctattaaggatatttataaatcactcgcagatgaagtcgtttcaatttataaagaaatgtacgaaaaaatgcgggatattgagctggaagcacacagaaaagcaactcaagatataatcgacgaaattgacaaagaagatgacgaagccaagttccagaaatcccttaaagaaaaacaggatgccattcaagaaacaaaagacaagattaacaaactgtctctcgatgattcagatgaggcaaaagcaaaactaaaagatttagataagcagctccaagaacagcaacaggatcttgatgaatttttaaaggatcgtgaaaattccaaacgtaaagaagcattacaggatcaacttgaaaaagatgagaaatcaataaacaccaagtatgatgatcttgtcaacgacgaaagagcattcaaacagcttgaggataagttgatgaatggaaagattaccgatattgccaagcagcttaatgagttttcaaagttcattaacagcaatatggagtctattggtaagagtatctccaacaatctaattgataagcttaaagaagcctccaaagctttaaatgttgtggtcgcgggaaacaccacaggtaagaaagttgcctcttttgatgtaggtggctatacaggaacatggggtagttcaggaaggcttgcaatgctccatgaacaagaacttgttttaaataaagctgatacaagcaatgttttgaaaattgttgaattaaccaggaacatttttggagatattcaaacaaaagctacactcccttcccctaattctgcatctaatcaaacgacaagtaaccaaacatttaattttaactttaatgtagataagatgactggctctaaagatgatgcaaataaatttctaggtgaagcatttaacattgtatcggctagaggagttaagatctaa

SEQ ID NO: 2679 - DNA, 762 bp, Bacillus licheniformis
atgataagagaaagcctgtacttcattttcgggaacgaaaaatccacagatatgggtgttgaaaacgtcaatactgatggagggttagtcgaggaaacatttctagctacttcatcaattaacgaaacctccatcaaggggaatgatacacccttctatgaagggaaaaaacgtgatccaaagcaattcaatcttaatttttatataaaggatcactggaatcaaaaaagaatcgctaacattaaacgatggctggatgttgatacataccagcctttttctttcagtgacaaccttgatattgtttattacgcaatgcctgtagatgcaaatgatttagttcacaatgcgagcaaggaaggctatataaggttaactatgaggtgtgattccccttatgcctacagtaggactataaccactccgtggtacgatgcttctaaggaagacattacagttgagattaacaataaaggtgaatgcaccattattccatcgtttaaaattcaaaagatcggtaagggagatgttaaaattgaaaatttaagctacttctcctccccttctgtattcaccgatcttgaagatggtgaaatgataacagttactggagaaaaagaaattgtcgaatcatcaatatacggcgatgaacgttacgataactttaatgatgagtaccttctacttggttatgggataaaccgtattagagtaacaggaagatgtagaattcttttcagttatagatttaaatatcgttag

SEQ ID NO: 2680 - DNA, 2640 bp, Bacillus licheniformis
gtgcctttactgtttcaacaagtaacgcgatcatttaatttaagaaagccgaaactctctcttgctaaagctaacaaaaagaaaatcgcaaatcttgtcgatatctcaaatgttaatttgacattaagactaggcgaaatcaatgagttgtctttcgcagtacctttaaaaattgaaatagacaaacaatgggttaagaatccgcatctcaagcgcctgaaattacgaaggctcgttaagctttctgcctacaatttcaaagatgaatggttcattattaaaacaaagcaaaaaactggtgcagacaatgatttagtgacgtttacgtgcatgtcacttggacatcaattgagctatcgaaaagttagaagatatgaagtcacttcctacaatatgcaaaaggttacaaatgactgttttgcaaacacaaactggaaagccggatacataaatcctctattcaatgaaaaattccgcagttttgatattacctcttctacaaagttagatttcctctttaaaatatgcgagacattcgaagctgtccctgtatttgacaccatagaaaaaaaggtgcatttctatactgaagatgaagtatcaaattacaaagggatgagattaaaatacggtcagtatttggattcgatagaagacactgaggaacttgaagaagtctgtaccaggctttatgtaactgggaaagacgatctctcaataaacgctgctaatccaactgggcaagcttatatagaagatttcacatattttctttatccatttgagcgagataaagatcgcaaggtgataactcacagttacgaaatgagcgatgaattatgtcatgctattctcgattttaatgagttcatcgattctcaaactgaaacattctcttcccttctctctcgacaaaccgaggaagaaaagaaactttcaacacttaacgcagaaaaggcaaagcttgatttagaatacaaaatcattttagataaaattgcagtagcaacagaagcgaaagatccaactgccgagcttataaaagagcgaaaagctaaagaaattgaaattgaatcgaaaaagaaggaaattgaagaaaaagaaaaactgattaaggacattcaagataaaataacccttttaaaggggaaattgacgctcgaaagccaccttaatgatgaactcaaggaagagttggcggaatttataaatgagcaggaatgggctaatgacaatctttatgatgaaactgatctttatgaagccggacttgaggaaatgaaaaagcgcaacacccctccaatcaatattacaatgagcatagttaatttctttggaatcttaagtgaacatcaaaattgggacaggctatctatcggagatattgttcgagtacagcatgatcgccttggtattgatgttaaaacaaaagtaattgaaatgacctttgactttgaggctaataagattaatttgactgtgtcaaattcaaaacgagttgaaactgttaaagaaaagatggtcaaactcgtttatacagtcagtcatataaacaacgactatgcaattagaaaaattgactggatgaataccgctgagaattttaaaatccggaatgatcgaatttccgccccagttgcagctcctaccgtcgcatcagatggaacggcaattactcatgaactgaatgacaatggttcagtagatattgttttaaaatgggaatacccatattctgatgaggataaatacaatatagacggatttgaagtttatctctactccagtgaatcatctgatgaatatgtttttggttctaagatgagccatgaagaaatggttaatgtgaagtatgacaagcgttcctacaaattcacgggacttgcctcgaataaatactacactgtaggtgttagagcctaccgcagagttgatgcagacattgagagaactggaatcattctctctgacattgttcagtcaaaacacattacagaaaacccctacctcccttctgctattgcagaagtcaaagggcgagtaaatggactaattcaagctgtttctgaagaaagaccagaaaatccagatgtcaacactgtttggatcaatcctaaaactaataaacaagaactttacgatggtgaaaagtggattgagcaaacagtatcttcggcagattcgttaaatggatatagtgctgagatagcatcctctcctaacacgatagctgttcgggatgaaacaggaacaattgatgcttcaattacaggaagcgcaactcaacttggcggctatgatgcttctgcatatgttcttaagtctgaactcccctcttctcctcaatacgcaacaggagagtacattggtgacggaaagcaaagcagatcaatcggattaaactttatccccaatacggtaaagatttattctacatctccaaccgattcaacactcattattcaaaacagcttaggtggttattccatagaaaacggagaaataggctcctatctaaaaggcggcgataaaacatacgggtcattgaatttgaattattttattactggctcagacagtaacactcgcggaaacaaactaaatgttaaatatatttgggaagcatttaaacaaaattaa

SEQ ID NO: 2681 - DNA, 798 bp, Bacillus licheniformis
ttggaagatactccaagattttataacgaccctattctatctaagaagagaaaagggtcgattgatgatccttaccagctttacaatgaaacacaggtgatttataacggaaaggctcaattaacagaagtccccaacagagaaatgagagttgaagtctctggtgacggcaagctatggaaagaaattgaagatggtgaattacaagacgactactttaaggttgattaccttaatggagttgtcttttttaatgcgtcaaatgaaggaaaatctcttcaattcaaatacagcggtgaaggtgcttattatttccctggttctcgtatttggacagaacgtgacggaaatgaagtaactgagacattagattcactaacagaaagagctcgtaaagctactgaggaatcggaaaaagccacagaagaatccaaagagattactaagtggacacgagctacgacatcagattatgaaaatgtagttgaaaacacaagaaaaatatacctcccaatggtttacacatacaaagatctgctagatacctacccaaatcctcaaattggttggacagtcactattagagaaacgggaatcgagtatcgttgggacggttttgattggatcaacattagtatctccgataaattcgatggctataacgttgtttctagctatgttgagccttataacattcggactgtttggttaagaaccaatacatcaccaagtaaaaaaagggttaaaccatcaaaagatgccccagaaactaatttgatctggattaggaaagagtaa

SEQ ID NO: 2682 - DNA, 1905 bp, Bacillus licheniformis
atgtcaatccctgtaaacacaatgggctatcatgatgaagaattacagaaatggattccaatagacgccgtaggattaaaatctgaaaacaatagatataccgctgatgatattaaatctttagatgatataaagattgacaatgataatcatgtttactcatcagctaaagaaagaattgactctgactttctcaaaattaatgagaaagtagataaattggataaaggcgttgataataaaataactaatctggaggaaataatcaatgaaagctccagctccctaaataaaaaaatttattttaaaaatgctcttagttatggagcagaccctactgggggaaaaccttcggccgaggctattcaaaaagcgctggatgatattcataacgaaggcggagggcaactttttattcccggtggcaaatatttaattgaaaaaagaatgtttgtctatgaaaatactcgggtcactatggctcaaaattgtattctgctcagaggatgggcaggtggattttttgctaatggaacgccaactgataaattcaaaggttatttaggaagaggaaacataatcattgaaggcggtattttagatgggaattatgcaaacattgataagtaccctacgagcgctatggattccataattcttggacatgccaaaaatattacaatagacaatgtaacatttaaagatacgataagcgcccatgcgattgatgccaatggatgtgataatcttcgaattacaaatagcaaatttactggttttattgatcttactggacagagaaactactcagaggctattcagcttggagaattcattgaaataggacttaatcaatttggagaatttgatgccacacctaatacaaatgtttatattgcacataattattttggaaaatctaaactgttaggtggttggggatgtgctatagggaaccattatgccgtttatgatgtttttcaaagcaatatcaccatttttaataatgttatcgaggactgtggatttgctggagttcgaactttcaaatggaataacgttaaaattacaaacaatgtgttcatccgtaataaagagtgtgtacgtatttcacaagctgcaggcggaattgaaagctctaaaaatgcagatggtgtacagatgaatcgaccacaaaatggacaaaacgtgttagttgaaggaaatgacttttacgattatacatccagtggggttgttgcgtttggtcaaatttataataaagaaatagcctggaacgatgaaattcgcatatcgggtaattactttaaaataaaaggacaagacattggcaaatacaatgatgaacaggcaataaagctagtctttgctagaaacattttcgttaacaataataagatttacggtggacgaagaggaatgtggattgaaggttgttacaacacttttatttccggcaatggtatatcaaatgtcgatactgaagcagtataccttgctaagagtagggacacttcctccactgttacaaagtcctaccatgtatcaattgataggaatgagatcaataccactggacgaaacggtatatttgttcaaaaatgtgactactttgatgttagagataataatgtactaaataataataaagaacaaagtagcgaaagaggccgtggaggaatttatgttgagaatggctacgatggaagaatagaaggaaatcgaattagaggtgttgaaaaagaattcgctattttagtagaagctgaagctactgaggtgaatgtagccaacaccaaaggaactggccgtatcattgttctgggtgagtccaatttcaatggctactatgggacgaacaaagatgattacattcgtaaaataactactaagagtgaatcctaa

SEQ ID NO: 2683 - DNA, 1089 bp, Bacillus licheniformis
ttggttaaagtcgtaaaaaattttgtgaaagtcaatcaatacactcgtccaggtctaaagctttctggtgttaaaggaattgtaatgcactggactgcaactccaggagctagtgcgttaaatgagcgaaattatttcaatggtacatgtattgctgataaacgttatgcttctgctcattactttgtagatagaaatgaagcgcaatatattattcctgaaaatgaaatggcttatcatgcacacgatcaaaaccgctgctttgtgagcttcctaaaaccaaatgcgaaccaaacatcgatttccgttgaaatgtgcgtggagaaaaacggcaccattcatgatgaaactgtgcagaatgctgctgaattggttgctgatctttgtaaaagattcaaattgtctacagataaaatcgtccgtcattatgatgtaacaaacaaaagctgtcctgccccttgggtaagtgactcaagcaagctggcagcatttcgcaaaaaagttgatggactgctcggaaacaaaactgtttcaaattctacagctccctctagtaaaggttcttcctcctctactgctgcaagttgctccctgaaatcaaaagttaatggtcttcgcttctattctaaaccttcttgggaagacagagatgttgttggtacagtgaataaaggctatggtttccctactgttgttgaagaagttaaggttggaagtgcttatcagtacaaagttaaaaactctaaaggagcaacatattacattactgcatctgataaatatgttgaagtttcaggaagtttgaagactgcctcctccccttctaaatcaacagcatcaaaatccagctccggttcttcttcaattaagtctgtgggaaaaattaaaattgttggagtatcaaatgctgcaattgttatggacaaacctgatcgcaacaattcaaagaatatcgggacaattaaactcggcagcaaaattgacatttccgggtcagtgaaagggaaaaataaccctaaaggctattgggaagttatttacaatggcagacgcggttatgtttcaggtcagtttggcacaagagtctaa

SEQ ID NO: 2684 - DNA, 288 bp, Bacillus licheniformis
atgagtcgactaacaactcttatggaacagcaaatcgaaataaacaaagatgcccaaaaacaatcgcgcgaacaatttgtcacattgactgagatgaataacagcttaaaaaatctaagcaaatcatatgaaaaactcgacaatcgagtgggcattctggaacaatcagattccaatagaaaaattgatccaggtcaattcggtaaagacctcatgtacaaggttttacctactgtaatcgcaacgttagtcggtgcatggttgcttatacatttcggacttaaataa

SEQ ID NO: 2685 - DNA, 255 bp, Bacillus licheniformis
atgaataaaatcaactggaaagtaagactgaaaaagaaaacattccttgtaacaattttctctgcaacacttttatttgttcaaacaattgcttcagcttttggatatgacataacagtatacagtgctgctctaactgaaaaattcaacgctatattaacattgttggttgcattaggcattgtagttgaccccacaactaaaggcatctctgatagcaatcaagcaatggaatatgaagagccaagacaataa

SEQ ID NO: 2686 - DNA, 300 bp, Bacillus licheniformis
atgaaaacgactgttacatactccccctatccatcaaacttttcagaagtacatattaacaccggagaagaaaaatcaattaagcttagtctcgttgcgtctcctcctgatatccctcctcagaatgattcagaagatactgaagaaaacgctgtagagatttcatcagccatattggctgaccctagtttaagaatggaaatcaatgatgggatttcgactgaggaattgatgacattaaacaaagaggatgctaaggttttagtgcaggtactcagagactttcttaaacaaatgtaa

SEQ ID NO: 2687 - DNA, 1107 bp, Bacillus licheniformis
ttgacaacgactgaaattgcatatgaagaagtagccaataagattaaccagtggtatacgatgattaaaaagcgtgaaattgaagatgccataaagttgaaagatgaaattgattgcttgttggatgatatggaggagaatcaaaatttgctcctttattacaatctcttagatgcgcgtcacaagatgtcggtagacatgtttaagtcgtcaggggaaatccttgagaagattcggaaaagtcctgaaatgcagaaaacggatgatatgctccaatattattttttgtttttctctggtcaatatatgtttttcaaaaagaagtacatagatgcaattaattattacaaattagctgaagataagctggttaaaattgaagatgaaattgaaaaagcggaattttattatcatttagccatatcatattattacattgatcaatatttcttctcattagcttatgctgaaaaagctctaactatcttcagggaatttgaagactatgcacatagatcaattagcagtgaaatgatcttgggtgcaaataaacttgatttattccattatgaatcggcttatgagcattacagccatgccttaaaatttgcaaaggctaagcagattcctgagtctgaaggaaaggcatatcataatcttgggatactctatataagaagaaacatgctatctgaagcaaaagactgttttaaaaatgctttgcagcttcaagattatatccaaagcataaatggacttaaatcaatctataaccttactcatgtcttgtataaatcgggacagattgaagaagcaagggaatggtatgacaaaggattgaaacgtgcagaaaaagaaggagataaggaatatttggcgaaacttacacttgttaacaccttatacgatgagtacaatgaaagtgtgttaacgaattcccttgacattttagaaaagttggatttatggaatgatgtagcagaattgacactagaagtggggtgctactacaaaaaatccgatgatatcaagaatgcagcaaaatatcttgaaaaatgtattcacgcaagggatcaaattctaaaagtgacggaggaattaaaatga

SEQ ID NO: 2688 - DNA, 1260 bp, Bacillus licheniformis
atgaatagtgatactgtatggcaaagaaacttcacgttccttttttgttctaagctggtgaagataacagcagactgctttgcagtaaatacaattctgtggtttttgatttttgaaggaaaaggggcaattggaactgctctattactagctgtatcttttctcccgcaggctttattggggccaatcataactccactaatgaaggtagacactttaaagttttggatgttttttgcggacataaccagagctctactcatgcttgcgattccaatttgttatttcagcggtttttcgccactgtggtttatcttattactcatgttgattcattcagccacaggagcgtcttataaccctgctagtgtttcgttgattccgaaaattgtaaaagggaacctcattcaaaaggcaaatgcggttatgcagtcatcagaacatattgtaagacttgttggggtaacagtttgtggtgttactattgttgcaattggggcagcgcgagcaatgttaattacacttccactgtatttgctttcagccagcatagtgctttttattaaatacaaaataaagggagcagacgaatctgaaagcgatagaccaaaacaaaaaggcacatacttcaaaaaattaaaaagaggatttacgcttgttcgaagtcatcatattttattcccgttagctatctattgtgttttttctaatttggcttccgcgccttgggaagcactttctgcagtttatatagctgaagaattaggtggagatcccatcattcattccttactaaaagtgactacagcaggaggagcttttttgttaggatatattctggctaaggttaaggttaatcgttatggactgttatttgtaactgctggaatagtcgaagggattgctttttttgtcacaggaatgaattcattattaccattagtgtttttggctgccttggctttaggagctacaattagtgcaattaatgtaccagagcacactataatccaaatatctgttgatgatgaagatcagccacaagtgtattcagtaataagtatgatttcttacgtcatgattccattgggagctatagttggtggttatgctgcaacagtttttggttcaggaagagtaattgctgttggagggatagttgagatcattgcaggtattgctatcctactgttcacaaagcttgggaaagctcaacgtattgatatgatacgagagaaagaaggaaatttgaaggcttga

SEQ ID NO: 2689 - DNA, 354 bp, Bacillus licheniformis
atgaggccgattatttctgatgaacttgctaatgctattcataaaaaaatcattattgatttatgtatttatgctatggaaaccagagtcaacaaagctgagttaattaaaaacaagaagctcattggttattatgaaaggaaattaaaaaagcttctttcaatgaggaaacgtatcaattcatacttgaaaaatgaaaacacgaaaattcaagaagttgtcatatgtgatgatatgtttgttgagtatccttattatataagaaccgaagaagggggaataaaagaaggaacttctcggtactggaaagcagctttaaagctccatatgaaaagaatgcttgaaggattataa

SEQ ID NO: 2690 - DNA, 483 bp, Bacillus licheniformis
atgtttaatgaacgagaagcgttacgtttgaggcttgagcagctaaacgataaagaaattattgtcatgagagagctcagagaagaacgagaaggtatttattcaaagttgcgcgagttggacaaaaaccagagtaatcctcctcaagtcagagaaagctcttcattgatggatttagttagcgcagcagcccaagaattgaaacagtctaaaagctcatctccacgcattcagacaaacaatgcctcgcaaccctttaataagtctataacatctatacagcgtgaagcagcacttaaaatattgagtatgcataaagaaggcattagaggggcagggcttcgtaaggaaattgagaaagaaacaggcatgaaagttaaaaatatgacaacttttatgagcggactcatgaaacaccatcctgaaatcaaaaaaccaggccgcggtcattatgttattaagcgtgaaaagtcctttgagtag

SEQ ID NO: 2691 - DNA, 459 bp, Bacillus licheniformis
atggtttattctaaagtggaaaaattcataaaaaaaaatgacagcaaacatgctactccccatgattttacaggaggaattagtgaagaaaaaatcaaaaaaattgaaaatgacttacaaaccactcttcctgaaagttataaatggtttttaagaaactatggttctggcggctcttttggcgttgaaatattgggtcatggacttgtatctcctgaagtagtagagttcaccaaagactatagagaactttatgacttaccaaatcacattgtagtgatcgttgatgtagacgcattcgcttattgcctagatactcaaaaaatggataatggagagtgtcctgtagttacatggatttatcaaagcggatatgatcaccaaaaggcttctaacttccttgagtttttatgggaatatttaaatcaagctaaagaagattggtatgaggaagaatga

SEQ ID NO: 2692 - DNA, 423 bp, Bacillus licheniformis
atgaataaacaaatatcaaagatgataaatgagtatattgaagaaggcgactttgtcggagcagtaaccaacgaagatatcacaaatgcagaaaaccagttaagatgtaaatttccacaagaatataaagaattcataaaatcttatggttctggaggtatatgtggggttgaagttttgggtgtagaaggagatggctatgcttcagtagttgaggctacagaaagatttagaaactttggtttacctgagaaatacttagttattgaaaatgtagatgaatttgtttattgtctcaatactgaagaaaatcattgtgtaataagatgggatgacataagcaaaaaggagattgaaagatattctagttttgatgagtatttacaagatagcttccaagaagcaatagacaactgggagtga

SEQ ID NO: 2693 - DNA, 267 bp, Bacillus licheniformis
gggttatcgaataaagagcagaaaggtagagcgccatatgcagttgataaaaatggggtagaatctcaaattgagcttcatcacatactccaaaaggaagctggaaatatggttgaaataatagcgactacacatgatgaatacaaaaagattttgcatgggttgataaaaaatggagatagttttagaaacaatgagatattagacaaacaattcaacaactttagaagaaaatattgggtttggagatcacaaaatctagattga

SEQ ID NO: 2694 - DNA, 474 bp, Bacillus licheniformis
atggatgaaaataaattaaaccctttatatcaaaaaattgcagagacaatagtagagactatacctgaagagtggtcaagagtgtttatttatggcgagattactgaagatgtccgtaaaggtttcttttattattatcctaaaggacaggatacaccagttcatggacacgatatcccagaacttttcaacattggacgaagtgattatcgcaatctttggagagaattattagacaatttggaagagctatggaatgaattccggaacaatgatcacgagccttggacaagtttaacgatgatgattcaaaatgacggagaactcaacattgactataattatgatgacttgtcagatgcgaatgatcataaaagaagaatcctttggaagcataagtatctcggactttggccaaaaaatcaggatgataaagtatttttagaacaacatctagagtcaaataaaagatga

SEQ ID NO: 2695 - DNA, 2049 bp, Bacillus licheniformis
atgaagactttggacgtgcaggcgttgcacaaagccattgatcaaacgctgaaacaattaaaacagcagtcagacgaatttgctcaagtcaaaaaaagcgttgaggatatcgtatcacttaatgatgccttaaaaggaaaaggcggcgacgcgatccgtgccttttacaaagaatgtcacaccccttttctacagttctatgatacctttatagaggaatacagttctacgctgaagaaaatgaaaagtgcaatgaacgccctggaaccaaaccagaacggatttatttcccagtcctttctcgaacaccaactagagaatggcttaaatgctgctgatcgaacaacgaaacatttggtttctaaggccaacgccacaatcgcaaaagtcagtcatatcgttgatttaccggatttgaatgacagcgattttcatgaacaaaacaggaaagcattaaaggaaatcaatcagacaattgaaaagctgcatacgttcgacagggaacagacaagcgctcttaaaaccgctgaaaacgaccttgagacgatgcagagatacataaccagactagagaaaatgtatactggcccaaaaattgagattgcgagctatcaaaaaggatctattttaaagccggatgagatggatgctttgcgtggtggacaagacacagcgatgggcgtcatgttggataagctggataagagatcaaagcttgaaaaagaagttagcgaggttagcaaacaggataataaaattgctaaactaaagaagaagctcgaaaatgtcattgatcctgatgaatttgttgagattgcaaaagagattggaattgaaaatctgacagaaaagcagcagtattactatttttacactataaatagaaaacgaaaacaaagtggtatcatggggcgtatcaagcagggcattgaagaaggaattgaagatgtggccgtcgatacagtgacaggaatacgagataccattaccaatccaaaagagacgctagagggtattgcctacacagtcactcaccctgtagaaacctttgaaattataaagaaagatatcgaggactccttcgtgagggacgtcatcaatggtgatgcagaaagcagggcgagatggtttacatacgctactggaatggttgcgtcatccattgtcggaacaaaaggtgtagataaagttagcaagttggctaaggcaggcaagatgggaaaagccgcatcaaaggtaaaggatgtctctaaaaagacagctagcaagggcataaagagtgcgaaaaaggcaggtaagaaagcagcagataaagttgtcagggattttaaagatattaaaaatcttcttccgaaagtccaaatcgcttccccccaactagctatggccaatgtaggcaaagttccattcaacactatggatgggtctcgattgaaaaataaattaattcaacaaaccaaaaagatttctgatcaagcaaaacaagcaagaaatcgaatggtcagcatccttacgggtggttcctcaaaaacgaaaacagacatcaaagtagactcaaaaaccatacataaagtgaaatatggcgaccatttcacaagagtgaaaagaagaaaggtattaaaaccgaacattgagtatacaacgcctgtaggctatacttataaaacagatcataaaggacgtattacaaatgtcagaggcaaactgaatttgggagcagcaaagagaaacaaatacgctcaaagaattgtcggccgcgaggatcgattaaaaaccgatgaaggcggtcatctcattgcaagtatatttgaagggtctggaaagcttgacaaccttgtcccaatggatggtaacttaaataaaggagaatggaaaaagcttgagaacatgtggtcgcaagaacttggaaatggcaaaacggtagaggttgaaatacacccagtatacaaaggagattcgcaaagaccaacaagctttgatattgattatcgaattgataatgaagattgggtatttgtagagtttaaaaataagcctggaggtaaatag

SEQ ID NO: 2696 - DNA, 555 bp, Bacillus licheniformis
ttgacaagttttgttcagaataccgtgaatggcttaaagagtttattagaccaaaatggagtcattaggattcttggctctgaaggtgaaattacagacactcttgtcacattctctgacagcggagcctctcaaagagatatacgagctttcgaaacacatcatcaattatctcttcctgatgattataaaaaatttttaactctgcataatggagccagaatttttgatagtcttttagatggagtgaatattggtggaggtctgcatttatttaacctcaaggaaattgatacagaactgaaagatgaggaattttatgcggatgttaacggtattccaattggacatttgttggaagagtgcgatctaatgattgacaaagacaagcttaaagataaagatcccaactatctttatttacttgaggatggtctggagtataagcctcttcatttgaattttgagatatttttagaccggtatgttatgtgtcaggggcagccattttgggagtggagatattacacagcggagaattattatagaacatga

SEQ ID NO: 2697 - DNA, 990 bp, Bacillus licheniformis
atgaaaaaatttgttcagagtatgttgctgagtctgttagtgttagttgccttgtttgggtttgaagctttaggagctaaagccgcctcaactgataaagaggatggtgttacctctgtctctaaagaaattctcaaatttgaagttgataaaaacaaaaatgctaaacttgtagacattgaagaagtaaatacagaaaaacagatagaaaaagctgaccaaatctcaaaaaattttaatcacgactacctatatcattctgattatagtgctgttaaaaacaatacagttaatttgtatccttcagagcagcaaaaaacatctagtcacaaagttcagggaaaagtgccaggttttgtagaggttcaagttgaaacgctacttaaagaaaaaaccagaacagttacaactgttataaagattgttagagttatgggagaaaaaccagtttatattaatgcttctcatgacctttttgcgagtcgttattacaacgggaaatatgtaaaggtcttagatcacaagaagaaattcactcttattgaaattaaacctggggctgcctcatcaaaaagctttaaagttggagcagcaagctactataagagagagtattcagcaatcgttgtatggaaagactcacctccatcctacgatgcgcaaaccagctctccttttttggcaaataagatagctaatctatatccatatgttaagaacagccacaataaagaagtaatgggagctcctgccgatgcacaaatgaaggttgtcccagaagatcagagagagaagagggattctaacttacgaaataaattcatcacatggtatactaaacagtatggaaacccaaaatggaattggagcggttacgaaattcaccacgtcattcctcttcaatatggtggaagtaatcatatgagcaatttgtttccacttcaaaaaaatgtgcataagaaagtcacacgttggtggagaaataaataa

SEQ ID NO: 2698 - DNA, 1569 bp, Bacillus licheniformis
atgaaaagaacatttgatcatataaaacatgttgcaatttatctgagaataagtcaggaaaaaagaggggaaaatgttgaaacccttgagaaccaccgccaaattctttttgaattctgtaaagaaaacggatatacgtatgaagagtatggagaagtaatcagcggagggaagtctgaaattgaacaaagaaaggagttgcagcggcttcttgaagacattgaaaagtttgacgctatactttgttttgaattaacaaggctatcacgtaatggactgataagtcagacagttaaacaatactgtatcgattatgacaagcctatattaaccccttatcaatcctacgatcttgcaaattcagaaacagacagacttctttatgatgttggtagcatgatttcaagtcatgaacatggcactatcgggaaaagaagtaaggcaaacaaaaaacaaatgtctaaagctggccttcacgtcagcgggaatgttccttttggttacagaagaaacaatgaaacaaaaaagcttgaaatttatgaagaagaagccaaagtcgtgaggtacatattcaaacttcactcagagggcttaggaagttttaagatcagagacatcttaaactccgaagggtataaatcagcaactggaaaggcatttgagctacctacaattaaaaggataataaagaatccaacgtataaaggcacaattgtttttaatgaccgaaaaaaggtaaaaaaaaatggcaagtttgtttatgagcccgttgaaacaattcgggtagaaaatgcacacccagcaataattccccctgatgaatgggatagggcaaacagggagcgtttaaatagagcaaaacaggcagctgtaatacgtgaaaaacctgccagtaccactggaaccactatgttaaaggatctaatttattgcggagtctgcggaaggaagatgaggatattctttgacgacagaagtagtacaggctatgtgattcaacggtgttatcatttgtataacggagaaaaatgtccaaatcgcggaatcaaacttgaattagttgaaaaagaggtcgcaaaagcacttcctaactttaaaagtctgctgaagaaaagtgtccagaggcttcaacaggaaaaggaagctggtgtagaaacagatatcaaacggaaaataaaacaacaggaaaggaaattaaaagatttaaacgaccagcaagacaagttaattgacttagctttaaaaggcatctttaacgaagaagaaatccgtaacaaaaaacaagggttgattgatgagattaaatacacagagtcagcgattgctgatttgaaagaaaaaatgagcaatattgatataaacgatcatataaacagtttaatgaacattattgagctgattgagaaactacctaacatggagcctgaagaagtcaatcaatccttaaaaacgtttataagcaagattgtatacacgagagttttgcccccagagttgttaaataaatcaacacgcaataaacaaagaaaagagtacccatttgaaatagaaatagaattcattgaatga

SEQ ID NO: 2699 - DNA, 1029 bp, Bacillus licheniformis
atggaaaacggtctgtttaagccgaaaaggcactggaaggatattgagctttggaaagatgttcccgaggaaaaatggaacgactggatatggcagctgaccaacaccgtcagaacgcttgaagatttgaaaaaagtcgtcaatcttacgaaagaggaagaagaaggggtgcgaatctccacaaagacgatccctttaaatatcacgccgtattacgcctcactgatgaatccggatgatccgcgctgtccgatcagaatgcagtcggtgccgctcgcagaagaaatgcacaaaacaaaatacgaccttgaagatccccttcatgaggatgaagattcgcctgtccccggcttaacccaccgctatccggaccgggttttgtttctcgtcactaatcaatgctcgatgtattgcagatactgtacaaggcggcgtttttccgggcaaatcggcatgggcgtgccgaaaaagcagctcgatcaggcgatcggctatattcgggatacgcctgatgtcagggatgtgctgatatcaggcggggacggcctcctcattaacgaccagatccttgaatatattttgaaaaacctccgcgccattccgcacgtggaaatcattcggatcggcacaagggccccagtcgtcttcccgcagcggattaccgacaagctatgcagcattttgaaaaagtatcatcccgtctggctgaatacgcatttcaacacgagcattgaaatcacgaaggaagcgaaggaagcctgtgagaagctggtcaatgccggggtgccggtcggcaatcaagccgttattttggcaggcattaatgacagcgtttccattatgaaaaagctgatgcatgatttggtgaaaatcagagtccgtccgtattatatttatcaatgcgacttgtctgaaggaatcggccatttccgagcgcctgtatcaaaggggcttgaaatcattgaaggcttgcgcggccacacgagcggctatgcagtgccgactgcatttttttatttcatgtgttga

SEQ ID NO: 2700 - DNA, 834 bp, Bacillus licheniformis
atggtgaaaaaatggagcaatgacagctgcacgcttgaagcggatgtcgacttgttcagcaaaaggatcagaattgtcaattatgaaggcaatgtgtgttcattttttcccgacatactgaaagaagcaaaaaaacatgatatagggaaaattatcattttcaccaaaacgactgacagagacgcattgcttgagcggacgtttgaaccggaagggaaaatcgacggatactttaacgggcatgatgctgacgtgttcgtaaaatatgtaaaagaagacaggcgaaaaaccgctgactggcttatgcaggatcaaatgctggcagagctgttcagcacaccccgcatcgccgagatccaaaacgcttcctttaaaatcaggcgggccgtctctgttgatgcgcctgttctcgccgacctctacaacagcgtctttcctgtatatcccgcacctgtttcagattcggcatatctcaaggaagcgatgggaaagggggctgtttactacctcgcttttgacggcgaaaaagtcattgcatcagcaggcgcagacgttaatcccgctttggggaatgcggaaataaccgactgcgccgtcctgccggaatacaggggcttttcattgacgaggcggttgattgccgagcttgaaaccgacttgaagcaatcgggcatcttttgcgttttttcaatcgcaagagcggcttctttcggaatgaacgccagtctttatcatttatcatactcatacaggggccggcttttgaacaactgcctcatttatagaagcattgagaatatgaacatctggtgcaaaaatttaagccggtcttaa

SEQ ID NO: 2701 - DNA, 1269 bp, Bacillus licheniformis
atggagaacatagagagaaaggtgtgcgattggatcgattcgcatgagcaaaaagcgattcgccttttgaaaaaactcgtcggagaaaaaagcacgatgggccgagaatttaacgcccaggccgtcgtcctggagaaattgaggcaattcgaagctgaaatcgatgtctgggagccaagcataaagcagttggaacagcatccgctgtttaaatcagacagaacaagctttaaagaaagcccgaatattgcggctgttaaaaaaggaaagggcggcgggaaatcgctgatcttaaacggacacatcgatgtcgtgcctgaaggaaacagaaaagactgggagacggagccttttcagccggttgtgaagcaggggcggatatacggccgaggcacaactgacatgaaaggcggcaataccgctcttttaatcgcgatggaagcgctggagcaatgcggggttcaactaaaaggagaccttatttttcaaagtgtcgtagacgaggagtgtggcggagccgggacgcttgcggccgtaatgaggggctacaaagcggacggcgctttgattcccgagccgacaaatatgaaaatgtttattaaacagcagggctcaatgtggttcagaatcacggtcaaagggctttctgcgcacggcggcacaagatatgaaggcgtcagcgccatcgaaaaaagcatgcttgtcattcaatcgctccgccagcttgaacaggtcaggaataagagaataacagattctttgtatgacaatatcccgattccggtcccgatcaacatcggcacgatcaacggaggcgcctggccttcgtcggttgccgacacggtgacactggaaggaaggtgcggaatcgctccgaacgaatcccctgaagccgtccagtccgagcttgaaaactggctcaacgatcttcagtaccatgatgaatggtttaagcactatcctgttgatatagaatggttcggcgccatgtggcttcctaacgatttggctgaagaccatgaactgacgaaagtgctgaaatccgcctatcaaaccatcacggcagaggctccgctcatcgaagcttccccgtgggcgacagacggcggaatattgtcgcacgccggaggcacccctgtcatcgtcttcgggccgggagaaacgaaaatggcccaccaggcaaacgaatacattgaaaaagacgccctgatccagtcagccaagatcatcagcctgtttattatgaattggtgtgattatgaaaggtga

SEQ ID NO: 2702 - DNA, 654 bp, Bacillus licheniformis
atgggtttgggagtcatagagcgggagagaatcgcgaaacgggcggcccgcgaaatcaaaagcggaatgattgtcaatctgggcattggcattccgtctttagttcccaactttttagacccgggcacttccgtaatgatccaatctgaaaacgggcttctcggcatcggcggatcgcctgaaaaaggaaaggaagatgagaatctttgcaatgcggcaggctggcctgtcaccgtagtaaaaggcgcttcttattttgattcagctctgtcgttcggcatgatcagaaagggtgcgattgatgtcaccattcttggttctctgcaggtcagccagtcaggagatctggccaactggatcgtcccaggcaaaaaggttcctggaatgggaggggcgatggagcttgcccaaaaggcgaaaaaagtcattgtcgtgatgagccataccgataaaaacagtgcacccaaacttgtcgctgactgtactctgccgctgacagcaaaaggctgcgtcgacatggtaattacagaaaaagccgtgatcaccattgacagcggcggttttgtattacaagagctgatgaatgaagaggatcttgatgatgtgctgcggctgacggagggaaagatccggatcgacgggccgctttcgtaa

SEQ ID NO: 2703 - DNA, 693 bp, Bacillus licheniformis
atgacgatgccgaacaaacgtattgctgttgaagatgccattgccgatttgaaagacgaagcgaccgtcatgtttggcggatttgggggagtcggttcaccgccttctttcatccgggcgattttgaaaaaaggcgtaaaaaatttaacggtcatatgcaatgatgcaggatttcccggcatcgggatcggcccattaatcgtcaataaccgcgtaaggcggctgatcgcttctcatatcggttcaaatcccgttgcgggaaaacaaatgaccgacggttttctcgccgttgaattttctccgcaaggtacgctggccgaacgaattcgtgcgggcggcacaggtcttggcggcattttgaccgatatcgggatcgataatgacatggtgcgccaaggaaagaatatcgtttcattaaacggacgcgcataccttgccgaggaagccttgagtgcggaatacgctttcatttatggaaaaaccgccgatgaattcggcaatatcatctacgacaaaacggctcgcaacatgaacccgcttatggcgatggctgctgatcggacatttgccgaggtcgagcggatcgttcccattggagagctcgatgaagaagaaattgtaacacccggtgtttttgtcgaaggtgtagctgaaacggaaggggtgaactggaaatgggtttgggagtcatag

SEQ ID NO: 2704 - DNA, 1341 bp, Bacillus licheniformis
atgtcgtttttgattaagccggatctgcacgcaagctatccggtcgttcagtatgcaaaaggaagctggattgtcgaccattccggaaagcgttaccttgacggttgttcgggggctgttacctgcaatctcgggcacggtgtccaagaagtgattgagcctctcaaagagcagcttgatgctgtttcattcgtctaccgttcgcagtttacaagtgagccggccgaacagcttgccgaactcctggctgaatggctgccgggtgatctgaattggtctttctttgtcaacagcggatcggaagcagttgaaaccgccatgaaaatcgccgttcaatactggcaggaaaaaggacaaaacgacaaaacgattttcctttcaagatggaacagctatcacggaattacaaatggagccctgtcgctgtcgggattttatgagcgccgctacaggtttacgcacatgctgcacaagtatcccgccgcttcagcgccaaactgctacagatgccggctttctcatcctgaatgccaggaagcgtgcgtgaaagaaatcgagctcgccgttaaaaggatcggaaagcaattcatcgcgggcttcgttgccgaacccgttattggggctgctggagcagctattacggcacctgctggctattataaaaaagtaaaagaaatatgcgaagataatgaaattctctttatcgcggatgaagtcatgagcgggatcggccgaaccggccggatgctggcgattgaacattggggtgtgactccggatattgccgtactcggcaaggggctgagcgcaggctattcaccgattgccgcagcggtcatgtccgacggcatgatggaaacggtcaaaaacggctcaggggccatcatgagcgggcatacgtacagcgcaaaccccttttcagcccgtgctgcgctcgccgttctccgctacatcctgaagcacgatcttgtcaaacaagccgagataaaaggggaaaagctgaaaagaatgctgaaagaagttatgaaacagtcgagcattattggcgacgttaggggcaagggacttcttctcgggattgaatttgtcgccgatcaaaaaagcaaaaagacatttccttcttcaatgccggtgtcggctctcgtcatttccgaagcgaaaaaaagaggactgcttctttatccgtcccaggcgggtattgacggcggcgggggagatgcggtcatcattgcgccgcctcttacgatatcggacaaagaaatggaagagctcattgaaatatttaaacatgccgtatatgagattgaaaaacaagcggaaaaggtgatgcgcgaaagatga

SEQ ID NO: 2705 - DNA, 1236 bp, Bacillus licheniformis
ttgaaatatgcttgggtcataaaaggggactttttcagactgtggtctggaacttttttatcgctctttagttcggttcttttctattattcattggtatggtggtccttatctgaaaccgggagcgccctttcgggaagcgtcgtgatcggcatcgggctaactgtctcgattttggtatcgccgtttacaggctggctgtccgacaggtttcacaggggaaagctcattgcggcttcggatatgatcatttcagctgtatttttaatgatcggatttttggcgctgtcaggcatgaattcggtttttttgctggccgcttcaagggtgatcgtatcggcatgtttgaccgcaatcgaacccgctgcaagatcgctcttgccagatacattgagaaaagaacaaattgaaaaaggaatcgcatttcaagaagtgctcacacagctcatccaagtgattgttccgcttgtcacaggagttctgttttcctttttgcattttggctggttatgggtgctgtgcggaagcctttccttcttgtcgatctttttggagtggagaatcaaagatgaaaggggcagccaaaagcgtattccttttaccaataaacaattgttcagcggttttacaagcttgtatcaaaataagccgctcaagtatttgttgtatgggacgagcatacagcagcttgtattcagcggttttccgatatatatcgtcatttggacttcgctgcttttaaaagatcaggcctggctgggcggcgctttccaatcattttgggcgtgcgggacgctgtgtgcggcgcttttcttgtcctttatcgcaaaaccggagcacgcaaaagcagctgtgcctgctttaatgctgattttcggcctgcttttgtctcctctcggctggattgatcatgtcgtgctgggcgctgtgaatttgatcgtcatcggaatgatcagcggcgtcgtcaacatctatattgaaggttacttgcaaagggtaacggaaggtgaaaatagaggcagatcgctgggcgctttctttgcggtcaacagctcttttatgccgctcggctatgctgccgcagggatgttgtcggaggccgtcagtccggaatatttattcctcatcgtcgcactgcccgcgccgttcgctgcgttttcaatgatgagatcattttatttatgggaaaaacagacgaaggaaacggtcgctttgcaggatgaaacgtcaatataa

SEQ ID NO: 2706 - DNA, 129 bp, Bacillus licheniformis
gtgcattactcccattattgctgtcctactggaggatacggctacgggtttcacggaagaaacacatttgtactcatcgttgtcctctttattttgctcatcattgtcggtgcggctttcatttgctag

SEQ ID NO: 2707 - DNA, 771 bp, Bacillus licheniformis
gtgacatccatttcgaacacagaagaccgttatttaatgctgacatgcagcaaaaaaattgaatcccattatcatatatacacagatgaggagatcccgcagatgttttcctctcattttctgcagctgcaggacgattttccgctgacagagctgtactccctgctcgttcggacacccgaaattttaaaacgaaattatgttcatgtgaaaagctcttataagcgggatctgccttttacgatgaaaaagtcgctctttgatcttggctatattcttgatgaagaattgttttattccatcaggcttgcagattggaaaggagattcccctggtgtacgggcagagtgggggacggagaaatcgctcattgacggctgccgcatgatgcaggcttatgatacattgtctatcaatgaagcgtttgcgaaggaaaagctgctgcgcaagtatcctttttatgaggaaggcatcattcagctgtgtgtctgctactcggaagaaggcgaaccgattggatgtgctgagctttatctcgatcacgacgaaaacgttgctaaaatcgaagaagtcgccattttggagccataccagcggaaaggctatggatcgggccttatcaagcagatgctcaccgccgccaaacaatcgggcatggaatcgtgctatcttgtaacttcgggaagcgatcaggtgaaaacgttttatgaaaagctgggctttcagcagaaggaaaagctcacgacaatatttaaatatttgttcgtataa

SEQ ID NO: 2708 - DNA, 144 bp, Bacillus licheniformis
atgtcaaactgtttgaacgcaagaaatccggagaggaaagctgaggagagcagcatgcaagatgatccttttttcaaagggtcatctttttttagaggattttctgctctgaaagcgaaaaaacattacaatagatcatcttga

SEQ ID NO: 2709 - DNA, 456 bp, Bacillus licheniformis
atgacgaacaataaagaagaacggctgaaacagctgacccggatgcaatatgaagtaacgcagaaaaacgggacggagcttccattccaaaacgagtactgggacctgcatgaagacgggatctatgtcgatatcgtttcagggaagccgctgttttcatcgcttgacaaatttgacgcacactgcggctggccaagcttcacaaaaccggtcgatgccggagaaatcgaagaaaagctggacacttcacacggcatgattcggactgaggtgagaagcaagtctgccgattcccatcttggacacgtgtttccggacggacccggaccggacggcctgcgctattgcatcaattcagccgccctccggtttgtgccgaaggacgaccttgagaaagaaggatacggcgaatatgtcaaactgtttgaacgcaagaaatccggagaggaaagctga

SEQ ID NO: 2710 - DNA, 546 bp, Bacillus licheniformis
atggctgaaaaacgcgaactcgccacatttgccggaggctgcttttggtgtatggtcaagccttttgacgaacagccgggcattctaaaagtcgaatccggctataccggcggccatacggaaaatccgacctatgaagaggtgtgcagcaatacaacgggacatagggaagcggtgcaaatcacatttgatcccgatgtctttccatacgaaaaactgctggaactctactggcagcaaatcgatcccactgacagcggaggacaattcgcagaccgcggagagtcttaccggacagcgattttttaccataatgacaagcagcggaaactcgctgaagaatcgaagaaaaagctcggagaaagcggcatctttaaagatccaatcgcgaccgacattctggaggccgggccattttatccggctgaggagtatcaccaggactatcataaaaagcaccctgaacgctacacacagtatcggatcggaagcggaagggaaggatttttacaacagcattgggggcgaaagcatgacgaacaataa

SEQ ID NO: 2711 - DNA, 435 bp, Bacillus licheniformis
ttgaaagttagagaacaaatgatgtatgatatggaagcactgcttcgcacagtatttaaacagatacgtgatgagataaatgagctgctcgaaaaagagatgtcccgcaatgaattcatgattctccgcctgctgagcgagcaaggtccaaagaaagtcacggagtttgcaacgattttaggcgtttcagcaagccatatcacagctgtaaccgatgcattggttgaaaaaggctggatcacgagagtccggtcaaaagaagacagacggatcatcaaaatccatctgacagacgcaggaaaagaaattatcagatatttcgaagaaaagaaaacggaatattatttcaagcggttcagcagctacagtgatgaagagctgaaaacgctgattgaactgttcagcaaattggacaaaaaacgggaacagcgctaa

SEQ ID NO: 2712 - DNA, 252 bp, Bacillus licheniformis
atgactgctccttacctttgtccaaactgcaaaacaaaccgaacacggttcaacttaatcgaacagtccccgacatccgttaagattgatccggcaacaggggaaatagtggaaacgtattcagatgacgagctttcgccttttcacctgccgtacagcggccctgccataaaagtgcagtgcggcgcgtgcggattaattgaggatgagaagacttttatcaaacttgctgaattcgataaacgaacataa

SEQ ID NO: 2713 - DNA, 1089 bp, Bacillus licheniformis
atgtttttaatcgatttatttttgaatttgtgcattttaattacttcgctctttatttacactcagctaaagtggaatattttttcccgaaaagctacaaacaaacaacttgattggattgacggcattcttggcggggtgctcggaaatgtgcttatgttcttttcgatccaggcaaccgatgagacgatcgtcgacttgcgttatgtccccgtcatgattttgtttttatttacgggcgcctttccggcctttatctgttctctgctgattataggaggaaggtttgtttacgggacgaatacatcctcgattgcagcgcttataggtatgatcgtgatattcgcaggatattatctcattcttcggatcatggataaagacgccggcacttatcgaaagacatttgcattagttatttttgccaatgtggcgatttcaattgtgatcttgatgatccttcatgatttcttcttaatgaaaatgttattgacgtggttctggattttatctactatcggcggctttacgtcagtatacatcgtctcatatttaagaaaatctcattttctgttaaaaaagtatgaagaggaatcgtcgattgattatttaacgggattgaataatgtccggcaatttgatgcgatatggaatgcttatatttcaaacgcaaaagagaagaacgagaaactgtctttgcttttgatcgatatcgattatttcaaaacgattaatgatacgtacggacattcaaatggagatgcgattttaaaagaattaggaacgattttaaaaaagtctgcccgatcggaagatatcgtatcaagaaacggcggagaagagttttcggtcatattgccgaactgttcccattcgcaggctgcagagattgctgagagggtgcgcaaggaagtggagacacacacttttttcatttctcattcaaaaaagattcatattacggtttcgattggagttgcggcatttccggaggtgattcacagtacgggagagctgattgaaaaagccgatcaatgtttgtacagggctaaacaccttgggagaaacagagtgtgcacctccgtttga

SEQ ID NO: 2714 - DNA, 1309 bp, Bacillus licheniformis
atgaaaacggactttacatacggaaatgtatttaaacagctggtctatttttccggaccgatcattttagccaatcttttgcagatttcattccaattcgtcgacagcttgtgggtcggaaatctgctcggagcaaaagctcttggtgctgcggccgtctcaggaacggttttctttacggtgctgtcgttcgtattgggcgtcaacaatgcggcgctgacgattcttgcgcagcaaaaaggaaaaggggataaaaagggactggcatcatatgtaaacgcgtttgtcgttctgatgacggcgatgagcgtattgctcggggttatcggctattttttcacagagcctttgctctcgctacttcaaacgcctggcaatatgatggatttggccgtaagctatttgaggattcattttatcgggattatatttttattcggctataatttcatcagtacagtattaagagcggtcggcgacagtcaaacacctttgcgtttcgtcctgttggccgtcatcctgaacctgttcatggatccgctgtttatctcggtattcaacctcggaattgccggagcggcctatgcaaccgtcgtgtcccaagggattgcttttatttacggagtggtctatacggtgagaaagcagcttgttccattttcaaagccggcgcttccatcgctggcagagacgtccgtcattttgaagctcggagtgcctgccggcttgcaaatgatggtgatttcaggcggctcgatggcgattatgagcgttgtcaattcatttggagaaagcgtcgtgtcagggtttggcgcggtacagcggcttgacagcctgctgattctcccagcgatggccatcggcacggctgtcaacagtatggctggccaaaccttcggaagcggcgacatggagcgtacgaaaaaaatcgccaactacggcgtcatttatgtcctgctgtttatggctgccgtcagcaccgcgatatttctgacaggctatcacgcggtcaggctgtttatatcggaagccgattcagccgcattcggggaagagtatttaaaaacgattgcttttttctatccgtttatcggaattaactttgtgttgaacggtgttgtaagggcagccggagaacgtgatttctttttgggctttgcgctatccgtttacatatctattttcaaagtggcttggcgagaacggcatagcgctgggcatcggaatgagctttatgctgagcagcctgaccgcctttttatattaccgctacgggaagtggaagcacctcgttctatttgaaaaatga

SEQ ID NO: 2715 - DNA, 705 bp, Bacillus licheniformis
atgttctctgcagttcataatgcccgttatatggcggaaggcttccaggggagccgctatgatgttctgcctgccgaggcgcccttttattttcgaaacagcggaaaagcagtgatgatcagactgctccacgcggctcctcataccgacaatctcgacgttttcgtaaacgggatatccgtttttcgaaacgtctcctatacagatttatcttcttatgtccggtttcctgccggccgtattcaaatcgacgtttttcgaagaggctgggcgaacggtcccctgcttacggtacagtatcacctgatccacggccggtactgcacggttgctgtcacaggcacagccgcaaagctcgttcccgtcggaatgtatgaccagcctgcggctgatccggaaagccgcagcattcgatgcgtccatctctcgccggactctcccgctcttgactttgcagtgcaaaacggacctgtcctgttttccggcgtcccctttcaatctgttacccggtacatcccggtgcgttcacagaaaatggacgtcgagctgaggggggccggttcaacagcagtcctgctgaaggccccgaggatcacgcttcatgccggcgaatccacaacgttgtatggcctcggtttcgtcaacggctctccttctctcgaaataaaagcggcgccgtttcccgtcaaagctccgccttcatag

SEQ ID NO: 2716 - DNA, 202 bp, Bacillus licheniformis
atggaacgtatctacacatatttcagcttgttgtctatgttgttttcactgtacttcggcggtctcgccgccttcagtttcgttgatgaaaacatggacaagatgtatttgaacatcgggtattgtgcgttgtttttaagcattatgatttttactcttgatgcaaaaaaacacaaaaaaactgaccatcacaatcaataat

SEQ ID NO: 2717 - DNA, 132 bp, Bacillus licheniformis
atgcttaaaaacaacgcacaatacccgatgttcaaatacatcttgtccatgttttcatcaacgaaactgaaggcggcgagaccgccgaagtacagtgaaaacaacatagacaacaagctgaaatatgtgtag

SEQ ID NO: 2718 - DNA, 573 bp, Bacillus licheniformis
atgaagaaatggaagagcttatttttaattttagcagcagtcaacgtcatgatacttgccgggattttcattctcatttccctgcccggcggacaaaaggagccgccgcgtccgactccgagcgaatatcaattgaacgtgacgagcacgaaagattcattggccgcattcatcaacacgtacttggaaaaggagtcttcgcctgatcttgactatcaaatcgaaatcgatgatgaattccatatcgtcggtgcgatccgcgccttttcctcgacagtcgatgcgagggtgtcctttcggccgacggtggaaaaaaacggagacgtggtccttgacgtgacgagattttcgatcggcaagttgaatgttccgatatcgatggtgctcaactacatggatcaattttatgaccttcctgattttgtacacgttcgttcagacgctagagaaattcaagttcgtctgtcagagatgccgcttaaaaacggaatgtatgtgaaagcaaaagacattgatttagaaaaagatcaaatcgaatttgtttattacaagcctgcacaaacagattcataa

SEQ ID NO: 2719 - DNA, 753 bp, Bacillus licheniformis
ttgaacatacgttttattacagtcatgatggccctcgtctgtctgctttcagcctgtacggagtggaatgcgggcgttgaaaaaacatcggtctcccctaagcgcgatatcgtgattgcagcggtgggcgattctctgacagagggggtaggcgatcaagaaaagaaaggctatgtcggcatggtggccgatgagcttgaaagccggagcgatgtgaagtccgtaacggtcaaaaattatgccgttaaaggctcccggactgatcagctgcttgaaagattaaaagacaaagaagtacaagagggcctgaaagatgcagactacattttgtttacaatcgggggcaacgacctgatgaaagtcgtccgccaaaacttcgcgcacttaacgctcacacctttccgtgctgaacaaaaactgtttgaaaagcggttttcgaatattttagcggaaatcagagagcaaaacgccagcgctgaattgatttatgtcagcatgtataatccgtttaagtttacgctgtctgaactgcgggaagttgaccaagtcgtagacgaatggaatgaaggcgcggaaaaaaggctgaagaaggtctccaacacgaaaatggcggatatcgctgatatttttgaggaatacagcgatgaaaagaagattgcagaagatgagtttcatcctaatcaatacgggtattctttaatagcgaaacgcgtttacgaacaaattaaaaacgaagacctcccagcagaataa

SEQ ID NO: 2720 - DNA, 156 bp, Bacillus licheniformis
atgaaatcatcgccgatattaagacgctggaaaaccgttgataaaaacgggcgacctgccgctaaagcctgtttcctgaacaccggaaaacaggcttttttttacatcggccaaatgattttcaaaagaatcaaaacatggtacacttttttttag

SEQ ID NO: 2721 - DNA, 582 bp, Bacillus licheniformis
ttgaaaaacgtttttggcattttccttgcaggtattctcacagtgtttctttcgtcctgcggaactagcaagattgataatcctttgaactatgatgtacagtctttttcttttcaaaatcaagacgggaaagcggtgactcttgaaagtttaaaaggccaggtgtgggtggctgactttatatttacgaactgtgaaacgatctgtccgccgatgacttcacatatggctgaactgcaaaaacaaatggaagaggaaaacctgcaggcccgcatcgtctcattcagcgttgatcccgaaaatgatacgcctgaaaaattgaagaaatttgcggccaactacccgctcagttttcaaaattgggactttttaaccggatactcgcaggaagaaatcgaaaagtttgcgctgaaaagctttaaatcaatcgtgaaaaaacctgaagatgaggatcaggtgattcaccaatcgtcattttatctagtcgatcaaaacggcaaagtcgtcaaggattatgacggtgcaagaaatacgccgtacgatgaaatcatcgccgatattaagacgctggaaaaccgttga

SEQ ID NO: 2722 - DNA, 843 bp, Bacillus licheniformis
ttgacaagcattaaaattgtaacggactcgaccgctgacttgagcgaagaactgctcagaaaatatcatatttccgttcttccgctctcgatatcgatcgacggcactgtatacagagacagattcgatattcagccggacgaatttattgagaaaatggagagcgccgcagaactcccgaaaagttcacagccgcctctaggcgcttttatcgaactgtatgaagagctgaccgctgacggaagtgaagtgatcagcatccatctctcaagcgaattgagcgggacataccagactgctgtaagcgcttcaaatatggtcggcgggaacattacggtgattgattccatgtatatttcaaaaggcctcggttttcaggtcgtgcgggccgccttgctggccgaagagggcatgacggccgaagcgattgtaaaagacttggagaacttgcgcgaccggacttccctctatgtgacaattgatcattttgacaacttgatcaaaggcggccgcatcgggaggggaaaagcgctgctcggctcattgctcaaggttaagccgatcgcgaggcttgaggacggaatctatacgcctgaaaaaaatgtccggagcagcagtcagcttatccgttatttaactggtcaatttgtttcagcggttaagggaaggacggtacaggcgatcggaatcgcccatgccgatgcgctcgatctcgcccatcggctgaaagactccttgcttgaacatatcccgggaatcgatattgatattgactacaccacaccgattatctcggttcataccggaaaaggagcgatcggttttaccttttacaccgattga

SEQ ID NO: 2723 - DNA, 159 bp, Bacillus licheniformis
atgcataaatatttatggcattctttgccggcccatgaagagagcctaatccgctttaaaagagcggaagacggcatccgccggcaaagaatttttcatgcggatttggcctcactagaaaatacaccatttgaaccgacaggatgtgaagggaattga

SEQ ID NO: 2724 - DNA, 252 bp, Bacillus licheniformis
ttgttacttaaaagcctggagttcaaacgttcggatggacagaaggtgaaggtgacggaaatacctctgctgaaggaggacgacccgcatttttttatggccaatctgaggcttgaaatctttttaaagacgctctattgctcaaagacggaaaaaaacgtctactcctttagggactacttaaagagagcattgaaatggcaggattacctggccatttatcaacaggatgaattgaagcataatgcataa

SEQ ID NO: 2725 - DNA, 1269 bp, Bacillus licheniformis
atgaaaccgttgcttaaagaaaactctctcatccaagtcaaagacattttaaaagcccaccaaaatgtaaaagatgttgttattcatacccctctccaaaaaaatgagaggctgtccgagaggtacgattgcaacgtatatttaaaaagagaagacctgcaggttgtccgctcttttaaactgagaggcgcctattataaaatgaagcagctttcaaaagaaacgacgaaaaacggggtggtctgcgccagtgcaggaaaccatgcgcagggagtcgctttttcctgcaaacatctcggtattcacggaaagatttttatgccgtcgacgaccccgaggcaaaaaatttcccaagtcgaattgttcggcaaggaatacgtcgagatcatcctgacaggcgacacgtttgatgatgcttatcaaagcgcagtcgcctgctgcgaggaagaaaagcgcgcatttatccacccgtttgacgatcctgccgtcatggctggccagggtacggtcgcggtcgaaatcttaaacgatatcgaaacggaaccccattatttattcgcaagcgtaggcggagggggtctgctttcaggagtgggaacctatatgaaaaacgtgtccccggatacaaagctgatcgcggttgagcctaaaggcgcgccggctctttttgaatcaaacaaaaaaggcgaagtcgtcatccttgagaaaatcgataaatttgtcgatggagccgctgtgcagaaaatcggcgaagagacatttaaaacgcttgaaaccgttgtcgatgatattttgctcgttcctgaaggaaaggtgtgcaccgcgattcttgagctgtacaaccaatgcgcgattgtcgccgaacctgcgggagcgctgccgatcgccgctttagatctttacagggatgaaattaaagggaaaaatgtcgtatgcattgtgagcggaggaaacaacgatatcggcagaatgcaggaaatcaaagacagatcgatgatgtatgaaggactccagcattatttcatcgtgaacttcccgcaaagggcgggagctttgcgcgaatttttagatgaagtgctcgggccgaccgacgatatcacccggtttgaatatacgaagaaaaataataaaagcagcggccctgcgctcgtcggcatcgaattgaagcagcgcgaagattacgagccgctgatcgcaagaatggacaggaaaggcttccgctatgtcgaagtcaataaagatgaagggctctttcatttgctgatttaa

SEQ ID NO: 2726 - DNA, 1002 bp, Bacillus licheniformis
atgattaaacacacatatccgtccgtaggtttctccgagctgatcggggaatgcgattcctttttgcaaacgaaaaacagagcgatacaatttgcagcatcttcccatccgattctgattcatggggaaacaggcacaggcaaagagctgttcgccaaagccattcattccggatcatctttcaaggatgatcccttcacacatgtaagctgcagcacgctggatgaagatgaaacggctgaagatttttttctttcagagctgaatgagcccggaaccttgtttctcgacgaagtgtggggtctatccttgcatctccagggcaggcttttggcagccattgaaaaagggatgcaaaaaagattgatcacctcttcaagcatgcctctcattgaacggattgatagcagcgaattccgcaaggacctgtactacaggctcaatgtgctcgaccttccgcttccctctcttagtgaacggcgaagcgacatcccccttctcgtgcatcattttttaaaaagcggggatcatgacatatatgtcgaaccggtcgtttggaaagctttagagcagcatgagtttgaggggaacgtcagagaactcaaaaacatgacggattatatgataaccgtctcagacggaaaaacgattcagctttacgacacaccgccctcgttaagagaacaaatcaaaaaaaagaagcctaaggacaaaaaaacggcttcggcatcacttaccttaatggaaaaagaggagtttgcgtttttgctcgatgcaatcaagcaattaaatgaaaaaggagagcctgccagccgcagggttctgtccgagctgagcaaaagcggcaagtcggagcttacaccccagcaagtgagaagcagattggattatttggaaaaaagagagtttattacaaagggccgcggaagagccgggacaaaaatcacgcttgaaggcctccgctttttaagctctttaaagcatcacattattcaagattag

SEQ ID NO: 2727 - DNA, 642 bp, Bacillus licheniformis
atgtacacgattaaagaagaaattgctaatgcaataacccatggactcggcgtcctcctgtcaatacctgccatcgtatttttggtgatatttgcgatccgctacggaagtccggttgatgttgtcagcttttcaattttcggcgcttccatgctgttcctgtatttaagttcgacccttctgcacagcattcagcaccaaaaaacaaaagatattctggagatcatcgatcactcagccatctacgtactgattgcagggacatacacaccgctgctcctcggacctttgaaaggcgcgctaggctatacgatgcttgctgtcgtttgggggcttgcgattggcggggttgtgtttaaaatcttttttgtgaaacggtttatcgttgtcagcacactggtatatcttgtgatgggctggatggcgatcattgcgatcaagccgctttatacggccttgaccggagaagggttcgccctgctgcttttagggggaatcttgtattctgtcggaaccatcttttatttatggagaaagattccatatcatcatgcgatatggcacactttcgtgctcggcggcagcgcctcaatgtttttctgcgtgcttttctacgtggcaaaagtgccgtttgtatcgtaa

SEQ ID NO: 2728 - DNA, 623 bp, Bacillus licheniformis
atgttgcgctattgttttttatggatttattcggcctatatgctcatcaagcatatcaagcttctgcaggcgctgcagacacttgatccgcgcctttcgtatgccaatcagatggaagctgtctttgataagccgaaagcttttttgcgagggtgcatcggcttaaccggttcaaccgtttccatccatcagaacggaagatcgccggctggcccgtgctttatgtgcacccaaagctcggcctgtcagagcttgccgtgctgcttggacaccttgacaaaaccgcttcgttttttgctgatccgcgcgcctttcgttatccgctgatcagcggctggctcaataaaatggccgcggtcagaaaaagcgccgacaaggaagcatcgctagaagaagtggaagagattctccggaaaggccaaagctttattatgtctgaagatgacggactcgattacaaatctttatccaaaaggctcggcattccgatcgttgcagtcgaaacagccggtacggaagacatgaaaaaaggcacgttgttcaagaggctgagacctgttgatatcgatttgacgatccacccggcatacgtcatgactgaaaacaaacagcttcgggcataa

SEQ ID NO: 2729 - DNA, 489 bp, Bacillus licheniformis
atgatctcattgattgctgcaatggacagaaaccgcctgatcggcaaagacaatgatttgccatggcatctgccgcaagatttgaagtattttaaagaggtgacgaaagggcacgccgtaatcatggggagaaagacgttcgagtccatcggcagacctttgccccaccgcgagaacatcatcgtcacatccaataaagaactggatatcccgaattgtcaggtgatgcactcggcagaggaagcggtgcggtttgcgaaaaacagaaacgaagaatgttttgtcatcggcggttcaacactatacacggagattctgccttttgcggacaagctgtatgtgacaaaaattgatgaaacctttgaaggggaccggtactttcctgaattcagcgaagctgagtgggaaatcgtttcgaggcggaaaggcctgaaagatgacaaaaatccttatgactacgaattcctcgtttatcaaagaaaaggatag

SEQ ID NO: 2730 - DNA, 273 bp, Bacillus licheniformis
ttgcgaaaagccgctgaaagactcgcccgtccccgccatcaggcgggttttttatgcggcatattttacgcctttctcgaaaaatgtcttgttttcgaaaggttaaacaagatacactacaaaaggatgaaaaaaatagaaacatcatgcggatatgtgccgtcatatgtaagaaaaccggaattgaacaaaacggggaatgagacaaatgcattcgggcggcctgatcagaatgaaaacctcgaagaaaggttcctctcatcacagctttaa

SEQ ID NO: 2731 - DNA, 549 bp, Bacillus licheniformis
atgaagaagtatacgatgaatgaaatggtgcacttaacgaaaaatatgctgaatgagcgcggggttgcgattgaggatatcgcgctgatcgtacaaaagctgcaggaaaaataccatcctgatctcccgcttgatgtatgcattgaaaatgtcgaaaaggtcttaaataagagggaaatcgttcatgccgttttaacggggatagcgcttgaccagctggccgagaaaaagctgttgcctgaaccgcttcaatatttggtcgaaacggacgaacccctttacgggatcgacgagattatccctctatctatcgtaaacgtctacggttcgatcggcttgacaaacttcggctatctggataaagaaaaattcggcatcattaaagaactggacgactgtccggacgatgaggttcatacgttccttgatgatatcgtcgcagctttggcggcagcggcggcaagccgaattgcccattcgcatcaggatcttgaggatgaagtgcaggaagagagaacagacggacagagcgttgcgaaaagccgctga

SEQ ID NO: 2732 - DNA, 603 bp, Bacillus licheniformis
atgaagatgtggatgagaaaagcgcttgtcgcattatttacaattgcaacgttcggccttgtatctcctcctgcggcattgatggcggacaagccgcaggagcatcagagcgtgaaagaatccggatatacggctgtttatcaaaagcaagaagagcccgagcttgatgaagacggcgaatccaaatcttcatttgacacctacagggatgaactgctcaatgaagctgaagatctatcattcgtaaaattcggcagcaggatatcgccggtcattgaagacgagtacagggaagaagtgcttccaaagatcgaggagatcatcgtcagccatctcatgacaatgcaggacaatgacgcttaccaggatcttgtcatttccaaaacgccgacggcggggaagtcggagagaatcttccacgtttacaatcggaaaacgggggaagatgtgctaaggttccatgtgcgcagggacaagccgccgcataaagggtactggtttaactttcattaccatactgccgaagacggctttcaaaaacatcacgatctcggaagcatttactgggaccgcaatacaccgcctaactggatgagtcactaa

SEQ ID NO: 2733 - DNA, 75 bp, Bacillus licheniformis
atggttgaaggtctttttatagccgcttcattaattaccctcgcttattttatcgtcatggaaatcgcagattaa

SEQ ID NO: 2734 - DNA, 771 bp, Bacillus licheniformis
atgattgtcacaacaagctacagaccgactgaaagcacgattttaacagcagaaaaaatcagccggacgctcggcgcccgcttttccgagcggagaaaacggccgattcgccaaattcggcaaacagagcaggatgatgttctcgtggttggaaaagagcgctttgagctgtatcattcagaaggtgaaaagttctttttccatccgaactctgcgatgttccgggccaagcgtatgttaagaggcgaaccggacccttttgtcgaagctgcacaagttgaaccgggggacaaggtgctcgattgcacgctcggtcttggatcagacgcgatcattgcgagccttgccgcaggcgaacaaggcgaagtgcgcggaattgaaaaaagcccgcttctcgcttttcttgtcgaggcggggcttcaatcgtgggagaccggccttgacgttttggatcaggcgatgaaaaggattcgggttcattcaggcgacagcattgattacctgctggaacttgatgatgcttcagcagatatcgtctacttcgacccgatgtttgatgatggaatcaaagaatcagacggcatcgcccctttaagaaagtgggcgcattccgagtttacgcttgacggcgctttacatgaagcccttcgggtcgccagaaaaagagtggttctgaaagaccactggaagagtccgcgctttgaaaaatacggattttccgtaaaaaaacgcaaaacggccctgtttcattacggtgtcctcgaaaaatga

SEQ ID NO: 2735 - DNA, 435 bp, Bacillus licheniformis
atgtcaacagcttatgaagaatacatgcgccagcttgttcttccgatgcgtcaggaattggtgcaggccggctttaaagagttaacgaccgcggaagaagtggagacattcatggaagacgcagaaggcacgactttcgtcgtcgtcaactcagtctgcggatgtgccgcagggctggcgcgaccggcagccgttcaggccgtctccggaagcgaaaaagggcctgacgagaccgttacagtttttgccggacaggatcgtgaagcaacggcaaaaatgagggaatacttcgaaggatatgaaccgtcttcaccttcaatggcactgctgaaaggcaaagaagtcgttcatttcattccgcgtgaacagattgaaggccgtgaaatgacggagattatgaaaaacattacggacgcttttgaaaaacattgctaa

SEQ ID NO: 2736 - DNA, 1677 bp, Bacillus licheniformis
atgacaggtttacgcagtgacatgattacaaaagggatcgacagagcgccgcaccgcagtttgctgcgcgcggctggggtaaaagaagaggacttcggcaaaccgtttattgccgtttgcaactcatacatcgatatcgtaccgggtcatgtccatttgcaggagtttggaaaaatcgtcaaagaggcgatcagagaggccggcggtgttccgtttgaatttaatacaatcggggtcgacgacggaattgcgatggggcacatcggaatgaggtattctctcccgagccgcgaaatcatcgcagattcagtggaaacggttgtatcggcgcactggtttgacggaatggtatgtattccaaactgtgataaaatcacaccgggcatgatcatggcggcaatgcggatcaacattccgaccgtgtttgtcagcggggggccgatggaagcgggaagaacgagcgacggacgaaaaatctcgctttcctctgtatttgaaggcgttggcgcttatcaatcaggcaaaatcgatgagaaaggactcgaggagcttgaacagttcggctgtccgacttgcggatcatgctcgggcatgtttacggcgaactcgatgaactgtctttctgaagctcttggcatcgccatgccgggcaacggcaccattttggcgacatcgcccgaccgcagggaatttgccaaacagtcggcccgccagctgatggagctgatcaagtcggatatcaaaccgcgcgacatcgtgaccgaaaaagcgatcgacaacgcgttcgctttagacatggcgctcggcggatcaacgaatacgatccttcatacgcttgcgatcgccaatgaagcgggtgtagactattcgcttgaacggatcaatgaggtagcggcaagggttccgcatttatcgaagcttgcaccggcttccgatgtgtttattgaagatttgcatgaagcaggaggcgtatcggcagtcttaaacgagctgtcgaaaaaagaaggcgcgcttcacttggatacgctgactgtaacggggaaaacgcttggcgaaaatattgccggacgcgaagtgaaagattacgaggtcattcatccgatcgatcagccgttttcagagcaaggcggactcgccgtcctgttcggcaacctggctcctgacggtgcgatcattaaaacgggcggcgtccaagacgggattacccgccatgaaggacctgcggttgtctttgattcacaggaagaagcgcttgacggcatcatcaaccgtaaagtaaaagcgggagatgtcgtcatcatccgctatgaaggccctaaaggcggaccgggaatgcctgaaatgcttgcgccgacttcacagatcgtcggaatgggcctcggcccgaaagtcgccttgattaccgacggccgcttttcaggagcctcccgcggtctttcgatcggccacgtttcaccggaagcagccgaaggcggcccgcttgctttcgtagaaaacggcgaccatatcgttgtcgatatcgaaaagcggattttaaacatcgaaatctccgatgaggaatgggaaaaaagaaaagcaaactggcccggctttgaaccgaaagtgaaaacgggctatctcgccaggtattcaaagcttgtgacatctgccaataccggcggcattatgaaaatctag

SEQ ID NO: 2737 - DNA, 1137 bp, Bacillus licheniformis
atgaaaattaaatcgatagaaccgacaccgagtccgaatacaatgaaggtgattttgaccgaggaactgccgggtggaaaaagcaataattataaaaaggatcatgcggaaggcgcacctcccgtcatccaggaagttttaaacatagacggagtaaaaggcgtctatcatgtggccgattttatcgctgtcgagcgcaatgcgagatttgattggaaagacatccttcctaaggtgcgcgctgcattcggaatggatgaagccgaagaggcggagggccgttccgaagaaaaagaatcgttcggcgaggttaaagttttcgtgcaaatgttcagcggaataccgatgcaggtgaaattgaccgacggcgagcgcgaggagcgcttcggccttccagaacgtttccaggaagcgatcttgaagcttaaaaccgcgtcttccaacgtcgtgctcgaacggtcttggaaagagcaaggcgtcagattcggcgatttttcagaaatcggccgcgaagtaacggaagagctggaggcggcttacgatgaagagcgcctgcggaagctgacggaatcagctgcatcaagcgatgctgaggctaaacgtacggctgtgcagcgaaagtcttaccgggtaacgcttgaaatgatggatgaggaagattggcaaaaacgctatgcgcatcttgaacaaatggatcctactgaagaggatattccagtactcgaaaaagcgctcaatgacccgaaaacatcgatcagaaggcttgctgtcgtttatttgggcatgatcgaaacgcctgcggtgcttccccttttatataaagcgctcgaagacaaaaccatcacggtcagaagaacggccggcgattgtctgtcagacatcggcaacccggaagcgattccggcgatgatcaaagcgctgaaggatccgagcaagcttgtgcgctggagagccgccatgtttctgtacgaagtcggcgatgaaagcgcgcttcccgctttaaaagaagctgaaaacgatccggaatttgaagtcagccttcagatcaaaatggcgatcgaacggatcgaatacggtgaagaagcaaaaggctccgtatggaagcaaatgacggaaagccgcaaaaaagacagctga

SEQ ID NO: 2738 - DNA, 672 bp, Bacillus licheniformis
atggctgggctgaatcaggaacaaacagaacagatccgcttgatgtccgaatgggtaaaagagaagctttctgccgaaggcacaggtcatgactggctgcataccgaaagggtgaggaacgtaagccttcagatcgcaaaagaagagggtgcagacctgtttatgaccgaagcttgcgcacttctccatgatgtgattgatgaaaagctgtccgatgagcaccgggttccgctgcaggagctgaaaaggcgcctgtccgaagaatggaaggtcgatccggaaacggttgacgggatttttgctatcatcacaagaatttcattcagagacagagagaaatataaagacgaacttctttcaaaagaaggaatggctgtccaggatgccgatcggcttgatgcgatcggcgccgtcgggatcgccagggctttgatgtatgcgggtgcaaagggccatctcctctatgggggcggcaatgcacctactgcagtcggccacttttacgagaagcttctccttttaaaagatttgatgaatacaaagacgggacggatgctcgcagaaaaaaggcataagctgatgctcgaattcctcggcgaactggaaaatgaatgcgccttctctagagaaagccgccttgatagatcagggctgggggttatggtagaataa

SEQ ID NO: 2739 - DNA, 480 bp, Bacillus licheniformis
atgtccatttacgatatcagcgtcaagacgattaaaggcgaggacacgacactgcggccgtataaaggcaaagtgctgctcatcgtcaacaccgcctcgaagtgcggatttacacctcaatatcagcagcttcaagacttgtatgaaacatataaagaccgggggcttgagattctcggctttcccagcaaccaattcatgaatcaggagccgggcgatgaaaaaagcattgaagaattttgcagcgtcaattacggtgtcacgtttccgatgttttcgaaggtgaatgtaaaaggggatcaaatccacccgctgttccgccacttgacgaacaaggcgaagggcatgcttggaacaaaagcggtcaaatggaatttcacaaaatttctcgtcgatcaaaccggagaaaacgttgtgcgcttttcaccgcaaaccaatccaaaggagatggaggagaccattcagaaatggctgggctga

SEQ ID NO: 2740 - DNA, 1686 bp, Bacillus licheniformis
ttgcaaatgaaatcccatttatcagacatagaaatcgcacaaagaacggaattaaaaccgattaccgaaattgcacggaaactcaatataaatgacgaagaaatagagtgttttggttgcacaaaagcgaaaatttctttgaaaatttttgagcgtttgaaagaaaaacccgatggccaggtgattttggtaacctccatcaacccgacaccggccggcgaagggaagtcgactgtcaccgtcggattgagccaggcgctctggcagattggcaaaaaatcgatcgtggcgatgagggagccttcactcggtccgacaatgggcttgaaaggcggggctgccggaggagggtattcccaggttcttccgatggaggacatcaaccttcactttacgggagatatgcatgcgatcacagctgcaaacaacgctttggcggctttcatagacaatcatattcatcagggaaacgaattaaacatcgatatcagaaaaatcgtctggaaaagggcgcttgatctcaatgacagggcgctgcgtgaaaccgttgtcggcctgggcggaaaagcgaacggatttcccagggaagacggctttgacattactgtcgcttcggaaatcatggccgttttatgcctggccagagacttggccgatttaaaaaagcgcctggcttcgatgatcgtcgcctacacagtcgacggacagccggtaacggccggcatgctcggtgtgcagggagcgcttgccctcctgttaaaagatgctatcaaaccaaaccttgttcagactgttgaaggaacaccggcgctcgtccacggaggaccgtttgcaaacatcgcccacggggcaaacagtctgatcgcgacaaaaacggctgcgaagctggctgactatgtcgtgactgaagcgggatttggcgctgatttgggggcggaaaaattcatgcacatcaaaacgagagccggcgggttcacaccgggggcggtcgtgatcgtcgccaccgtcagagcgctgaaaatgcatggcggaacgcctctcgccgatttgaagcaaaaagacctggaagcattaaaaaggggaattgccaaccttgcgaagcatatcgaaacgatagatgccttcggtcttccatacgttgtggctgtcaacagattcgtacaggacacggaggacgagcttgaggccgttcttggctggtgcagagacaacggacatccggctgcactttgcaatgtttgggaagagggcggaaaaggcgggactgatctcgcaagggaagtcattcatgtcatggagcaaaaagacaacaggttttcctatttatacgaattaaccgactcgatcgaagacaaattagccaagatctcccgcaccgtttatggcgccgaaggggtagagtttaccgaaaaggcgaaaaaacagctgcttgaattgaaaaagaacgggttggacggactgcctgtctgcgtggcgaaaactcagtattctttatcagatgacccgggtaaaatcggcaggccgcaagattttagcatcaccgtccgcgaattaaaaccatcgaggggcgcgggatttatcgtcgctttgacaggcagtattttaacaatgccggggctgccgaaacaccctgccgcgcttaagatggatgtcgacgaaagcggcagagccaaaggtttattctaa

SEQ ID NO: 2741 - DNA, 909 bp, Bacillus licheniformis
ttgcctatcaacatacctatcaatttgccagcaaagcagattcttgaaagtgaaaatatttttgtcatggatgaaaaacgggcttttcatcaggacatcagacctttaaatattgtgattcttaatctgatgccgcagaaaatcaagaccgagacacagctgctcaggatgctcgggaattctcctttacaggtatatttcacttttttaataccgtctacacacacgccaaaacatacaccaaggcagcatttggaacagttttatacaactttttcttcaatcagggaccgaaaattcgacggcatgattattaccggtgcgccgatcgagcatttggagtacgaagaggtatcctattgggaagaactccgggagattttagactggagcaaaacgcatgtcacgtcaacgcttcacatctgctggggagcgcaggcgggactgtatcatcactacggcattcgcaaagtcaaactgccgaaaaagacatttggcgtttttgaacacagaataatggagaaaaatgaaagactggtcagaggctttgaagagttctactatgtcccgcactccaggcatacagatatcaatatggatgaccttaaagccgtttcccatttaaaagtgctcagcatatccgatgaagcgggcgtctgtttaattgcttcaaaggatgaaaaacaagtttttttaactggacatcctgagtatgatacagatactcttaaagaagagtatgaaagggatttagccaggaacatggagattgatccgccggtgaattattttaaagaagggccggatggcgcggtacctgtaaaccgctggaaagcccatgcgactcttttgttcatgaattggctgaactactacgtttaccaggaaacgccgtatgagtggaaatga

SEQ ID NO: 2742 - DNA, 1152 bp, Bacillus licheniformis
ttgaataccaataaaaatatattaattttgactgcaaattacggaaatggccatgttcaagtagccaaaacgctctaccaagagtgcgaaaggctcggttttaagaatgtaactgtttcgaatttgtatcaagaatcaaatccgattgtgtcagagattacgcagtatctctacttgaaaagcttctcaatcggcaaacagttttatcgccttttctactatggagtcgataaaatttacaataaaaggaagtttaatatttatttcaaaatgggaaataaacggctggaccaactggttaaaaaacatcagccagacattatcatcaatacgtttccaatgattgtcgtgcccgaatacagacggagaatgggaaaagtcattccgacttttaacgtcatgacggatttctgtcttcataaaatttgggtccacgaacatattgataaatattacgtagcaactgattacgtgaaggaaaagctgctcgagatcggcactcaccctagcaacgtcaagatcacgggcattccgatccgcaggcagtttgaagaagaaatggacaaagataaaatctacgagaagtatcagctgtctcccgacaagaagatattgctgatcatggcaggcgcccacggggttcttaaaaacgtaaaagaactgtgtgaatctctggtgacgaaagaggatgttcaagtcgttgtcgtgtgcggaaaaaatacgatgctgaaatcttcattggaagacattgaagccctttatccaaacaagctgagaacgctcggttacatcgaaagaattgacgagctgttcagggtggcagactgcatgatcacaaagccgggcggaatcaccctgacggaggccacggcaatcggcgttcccgtcatcctttacaagcctgttcccggacaggaaaaggaaaatgccctgttcttcgaagacagaggggctgccatcgtcgtcaacaggcatgaggagattcttgagtcagtctcttcccttttggctgatgagaaaaaattaaacgaaatgaagaaaaacattaaaagcctgcatttatccaattcatcagaagtcatcctgacggacattatcgagcagtctgaaatcatcatgaacaaaaaacagactgtccgggcgctgtcctaa

SEQ ID NO: 2743 - DNA, 690 bp, Bacillus licheniformis
atgaaccgttattcagttgatgagtttgtatccaaaacccagcaggaagacaaaggggaggggctgtttgaaatggaaacgccccgtctcttggaagtcaatctcgacggaaaagtgtgggcaaaggccggttcaatggtttcctatagaggaagagtcaaatttaagcgagaaggggtatttgaacacggaattggacggatggtgaaaaaagtgttcagcggcgaaggggctgccctgatgaaagcggaaggaaacggaaaggtgtatctagcggatcagggaaagaagatatccatcttaaacttgaaagatgactccatatttgtaaatggacatgatctgctcgcatttgaaccgtcgatccattgggacattaaactgatgaaaagaatttccggcatgctggccggcggactgtttaacattaagcttgagggaactggaatggctgccattacaagccactacgagccgctcactttgatcgtaaccccggaaagccccgtctataccgatccaaacgcaacggttgcctggtctggaagccttcagcctgaatttgtgacagatgtttcttttaagacgttcatcggcaggggaagcggggaatccatccaaatgaagttttcagggaatgggtttgtcgttgtacagccatttgaagaagtttattactcggaatcttag

SEQ ID NO: 2744 - DNA, 201 bp, Bacillus licheniformis
atgcaaaacggtaaagtaaaatggtttaacaatgaaaaaggcttcggcttcatcgaagttgaaggcggagacgatgtattcgttcatttcactgcaatcgaaggtgaaggatacaaatctctagaagaaggacaagaagtttctttcgaaattgttgaaggtaatcgtggacctcaagcatctaacgttgtgaagctttaa

SEQ ID NO: 2745 - DNA, 183 bp, Bacillus licheniformis
gtggaaagcaatgaactgcaaaccgttcttcacaagacatttgtggaggtatataaagatcttgaacagctcgttgatatcgcgaaaaaggggcgtccatctctcgagaagaacattgaggaaatcgagcaaaggctgaagcaaaatatactggcgatcgaaattcagctgaaaattaaatag

SEQ ID NO: 2746 - DNA, 267 bp, Bacillus licheniformis
atgaaatcagaccatcgcgatgatctcgaaaccggatttaatcagcgcaagcagcttgaaattgccgtagaaactgctcaaaaaacgacgggaatggcaacgaggcaaaagagctccactttgctgaaatcggcgtatcaatccattgaagatgccagacagctgtcacaggctgaggaattagccgcactggatgaagattttttaaacgaacagctcaacatactaaatgattgccagcatcagcttgatgaatcacagcattaa

SEQ ID NO: 2747 - DNA, 186 bp, Bacillus licheniformis
ttggataagaaagagatctttaaggaactgacacatttgcaggacacctactgtgaagggtgcttcatcaaaaaacacttcagaaaagaatacggaaaaacgtatgcccacgcattttgcatttcaaaatgtacggtcggagaaaagctccgcacctatggagacgtgctgacaaacaaaaattga

SEQ ID NO: 2748 - DNA, 660 bp, Bacillus licheniformis
gtgaaactgagagcaggaatgaaaatcaagattaaagggtcttcacccattcaatttacagccgatgaatggatcgaagtgaaagaggcagtggcggcggggcgtcagctttctcaaagcccgtatgtcactgaacttgaattcgaagatgagaagggcagcttttggaccctgaaagaactggaaaagctgaaagaagaacttgcggctgaaccggatgagatcaccgtgtattttgacggcagctatgataaagaaagtcagctcgccggtttaggcattgtgatttattactccctcggcggggaaaggtatcgattgagaaagaataagagctttcggctgacaacgaataacgaagcggaatatgcggctctctacgaagccgttaaagagcttagagacctcggggcaagcaggaactccgtcgtcattaaaggggattcgctcgtcgttctgaatcagcttgaaggcagctggccatgctatgatcccgttcattcgaaatggctggacagaatcgaaagccagcttcaaaaattaaagctcacgcccacctatattcaaatcagccgtaaagacaataaggaagcggaccagctcgcaaaaaaaatgcttgagcataccattgtggaaagcacaatcaaactagatgaataa

SEQ ID NO: 2749 - DNA, 702 bp, Bacillus licheniformis
ttgtttaacgaaatattatggattagttttgcgatcattaattttatcattgttctcttcttttttaaacgatttggcaagaccggtttatttgtctggatcggttttgcgacagccgccgccaatatcgaggtagtcaaaacggtcgagctgttcggtttgactgcgacgctcggcaacatcctgtacggaagcgtgttttttgcgaccgacgtcatcaatgaaagatacggaaaggaagaagcgaaaaaagccgtttcaatcggttttttcattctgattaccttgacgctcgtcatgcagggagcgctcctattcaagccgcatcccgaagacatcgcacagcctgcgctggagacgatattcggcttcttgccccgcgtggccctcggcagcctgctcgcctatatcatcagccaaacgcttgatgtttatgtatattcgggaatcagaaggttatttccttccgaccgggcactgtggcttcgcaacagcggcagtacagccttaagccagctgcttgatacgttgatttttacgagcgtcgcgtttatgagcgcttatccgctggatgtatggattcagatttttatcacgacatacgtcttgaaattcgttgtagccgtattcgcagcgccgtacgcttatgccgccaaaaggatcacccctttggatgaaaggagcgaaaacaatgccggttga

SEQ ID NO: 2750 - DNA, 399 bp, Bacillus licheniformis
atgccggttgaggtgtatattgacggagcaagcgccggggatcccggaccgtccggacttggcatttttatcaaagacggccagaagaccgagtccttctcccttcccgccggctcactgagcaaccatgaagcagaattcatggcgctgatcgaaggaatgaagctgtgcgccgaacgaaactaccggatcgtttcgtttcggaccgattcgcagatcgtcgagcgcacggcggattcggagtttgtcaaaaatcaggctttcaagccttatctggatgctatcatccgcttaaaaaaggattttgatttattttttatcaagtggattccttcgaagtcaaatcaagcggctgacaagcttgcgaaaaaagcgatattgctgaaccaacccgagtaa

SEQ ID NO: 2751 - DNA, 147 bp, Bacillus licheniformis
gtggaaaaacagcattcagcaggaagaggccgtctgacaggcggtgtcacgccccagggtgatattgtattgaaccgggataaccgtcatacagacccaaaaaccgagcttgaaaaccgggcgaaaaaaagcaatacaaaacattag

SEQ ID NO: 2752 - DNA, 888 bp, Bacillus licheniformis
atgaacaagaagctgctgcttgtagacgggatggctttattattccggtctttttttgcgactgcggtgcaccgcaattttatgctgaatgacaaaggcgtgccgacaaacggggttcacggttttttaaagcatctgttaaccgctgcgtctgcgtttgaaccgagccatgtcatctgctgctgggacatgggaagcaaaacgtaccgaaacgatttatttaaggactataaagcgaaccggagcgagccgcctctagaattgattccgcaatttgacatggcgaaggaagcggcggaagagctcgggattttaaatatcggccttgcgggctatgaagccgatgactgcatcggcaccctgacagcgatgttcagcgaagaagcggacatcacgatcgtcaccggtgataaagatttacttcagcttttaacagtcaatgttaaagttgccctgcttcaaaaaggaatcggcaattataaggtatacacagaagaatcattcagtgaagagacaggtatcgaaccgaaagctttgattgacattaaagcgctgatgggcgatacaagcgataattatccgggtgtaaaaggcatcggcgaaaaaacggcctacaagctgatcaaggaatattcgactgttgaccggctgctggaaaacatcggtcagctgacgaagggccagcagacgaaaataaccgaatgtctagaagatctgaagatgtccagaattcttgcagaaattaaatgcgatgtaccgctttcctgctcattggacgatgcggacttcaccttgatgcatgacagggcaaaggagatgctgagacttcatcaaatacggggaatcgagccgctgctgatgaaattcgaaaaaagagagatcggataa

SEQ ID NO: 2753 - DNA, 150 bp, Bacillus licheniformis
atgggaagaacaaagcttggcaacgcgaatgcacagcgaaacaacaacgctaaaaagaagaacggctttaacactgaatttgcgactgaatcctattcgcaaatggaagccgcaaaattaatctcaagcaaaaaacagcaccaaaaatag

SEQ ID NO: 2754 - DNA, 270 bp, Bacillus licheniformis
atgacaaacgttcatgaagcgattacagcacattcaaaaaaacagcaccagcacatcaagcagttcgtgcgtctcgaacaggagagggaaaaagcaatcgatgatgtggtcgataagtgccggcgtaacgaagcattttcaaccgacctcatcaaccaaattacagtgcagatgaacgaattggccaaaaaaggcatcgttcccacaagacggctcgtctcgaaggaaatggttgccgaatacgtcagccgaaaatatccgcaggcctag

SEQ ID NO: 2755 - DNA, 3564 bp, Bacillus licheniformis
atggcacaaataaacacgaaagacgatctgatgaaaagagccggagcggttttcggggagctcacaaaaaacggggatgacaagcggtcggcgcagcttgcgggcatcatccgaaaatggctgagaaaagaagtgtacatcgcgttaaccggacactattcagcagggaaatcatcgcttttgaacgcgctgcttcaggaagacgtcctgccgacaagtccgattccgacgagcgccaatctcgtgctggtccgccggggagaaatgaaaacaacactccatacggtcgatggaagatacgctcagatggacgactcttatgataaagaaaaagtgcaggcgtactgcagggacggcagccagattgaaatggtggaaatcggggggcctttttcaggaatagcgcctcaggccgtcttaatcgacacgcctggaattgattctacagacgatgctcattttctatcggcgtattcgattcttcaccaggcggatgccttgttttatgtcgtgcactacaatcatgtccattccgaagaaaatgtgaaatttcttcgatcaataaaagataagatacccaatatttttttcatcgtgaaccagattgaccgccatgacgaagctgaaacagacttccacgcctataaaaagcaagttctagatatgctgctgaaagaagggatcagtgaagaacacctcttttttacatcggtcaccgcagccgatcatccgctcaacgaattcaaccggctccgtgctgagctggaaagactgcagcatcaatccgaacagcagctgcaggcatatacggagcaaaaaatcagcagcttgattcatgaacatatcaaaatgctgatcagtgacgaagatacggctctgtctgaagaaaccgcttccttaagagaaaccgtcgatactttaaaatcacagcttgccgatttgacagaacaggaaaaacgggcggaggaacaaatcaaaaaagacatccaaacgattgcccaaaacgcaaatataacgccgtttgagatgagagagctggccaaatcgtatttggaatcaatcgaaaagggctttaaaaaaggaattcttttcagtaaggccaaaacgcttgaagaaaaacaaaaacgaaaagaagcttttcttgccgacgtccaaaaaagggttcaagccgaaatcgattggcatgtcattgaagcaatcaaggcattcatgaaatgctttaacgtccagaatgatgaaatgcttcgggaagttcttcaatttcggaccgtgatagatgaaaacgacctgcttcgttcccggaaaaaaggggctgagcttacaccggaatacgtgctgaactacacgaaagaactggctgaaaacatcagaagaaaggcgaagagacaagcgcagccgctcatcgaccagctcaaaacctttattaaagaaagaagcgtcctgcaggcggaagcgataaaagctgaatatgatgcggaacaagcgaagctcgccgagcgcgaaagacggttgattgagcagcagaagtcatatgaaaaagcaaaccgtctctgggatcaatgggaacacggcaatcagagcgatctgccggcgaattggtatgccgccgaaagaaagccccttgaaaaaacgcttgatgcgaagcgagcggaaccggtccgtgcacaaggggaaaacagcagccgtaaagacgaggctcttcatccgaaaaagggcgtttctgagtccattgagcactttttcgaacttgcccggattttggcggatatcccggctttagaaaagcagagaaaagcattcctgcacaaaacggagcgccttcatacaaggcagtttaccctggcgctcttcggcgcattcagttccggcaaatcgtcttttgcaaatgcgctttgcgggcggaaagtgctgccgtcatctccgacgccgacaacggcaacgattaataaaataacaaaaccgtcgggaatcaaaagggacgggacagccgaagtcgcttttaaaacggaaggggaaatcacagctgaactggatcagcttttagatggaaaaatggcttcagcaaaaggctccgcttttggcgaaaaacttaaaaacctcttgaaaaaagaggaactgcacgatgatgaacggctgctgatcaagaacttcctcaaggcttataagcgttatggttcatatatcaatgatcaggaaatcctgacgatttccgctgacgatctgcatccgtatgtcgctgaagaacaaacggcctgtgccgtccgcgaagtcaccgtttatttgagcacaccggtcacggagaaaggaataacaatcgtcgatacaccgggagccagcagcatgaataaacggcatactgaacttgcgtttcaatacatgaaagatgctgatgccctgctttacttaacatactaccagcattcattttccaaagcggaccggtcgtttttgcgcaagctggggctcattaaagacgctttcagcatggataaaatgttttttattttaaatgcggctgacctcgcgaaaagcccggtcgaattacagacggttgaagactatgtaaggggagagctcttgaaagaaggcatccaaaatccgcacctgtaccatgtatcgagcaagcaggagctcaacaaaaaaacttcgccgtacaacgacttcagcaggctaaagcgggagctcgacgattttatcgaaaacggtttggccagaacagctgtcgaagagctgcttgatgaaggcaaaaaactgtgtgaaaccgtctttcagctccgcggttcactgcaccgttccgctgaagaaaaggaagcggagcaaaagcgcgtcgcaaaagcttatcaagaggctttggctgcgattgaagaagcagagaaggggtcatcaatccttcaaatgacggaaaaggatgtggaagagcaattttaccacatgaagcagcgtctggccttttttgcacacgatttatttaaagctgcgatacaccccgggcttcagaacggagattggcgcgccaatctgcaaaccgctttgaaaagctgcttaaaggagtatgaattcgaatttttgcaggaactaaaagcgcttgatatcagaatggaaaatttgatgctgaaatttgcgggcgaacaatgggcaaatgccgtaaaagagcggcttgccggcaatccttatttttcggttcatatccaggctgaccggcctgagaccgaaagctgggaaacgactgaagcgtcagcggatgaaggggagtttacagatgaactgaaaatgttcaaaacacctaaaacgttttttcagcaaaatggcaaagcccggcttgtcgaggcgtttactgcaaagctttcggcgatcacggacaattggattcaacgtgaaaagcagacatttttaaaccgctgcaaaacgagcgccggtcaattacagaaagcggctgttctatccgcaaaagctcaactcgaagaacaaaaagaagcatattttcatgaggcgctggagagcgcagagcgcgaaaacattgaaaaagcgcatgccttggcaggcgaatggctccgctcatgttga

SEQ ID NO: 2756 - DNA, 96 bp, Bacillus licheniformis
atgacgatgttttttctactggcggccgtcagtacatacagtttattgattggatatgtcttaaaaggaatcgcaggagcgaatctgcaaaaataa

SEQ ID NO: 2757 - DNA, 504 bp, Bacillus licheniformis
atgttttggacgattttaagcatttttgccgcccagcgcctgcttgagctggcagtcgcgaagttcaacgaaaaaaaacgctctgaaagagggagcggtcgaatacgggaaacgtcattacccttacatcgtcgcgatgcatgtttcgtttttcgtatctttgatttgggaaacgaccgcttttcaacgcggaacccttccgatggcgcttgtcgtattgacaggcctcatcttcacgcaggttctccggtattgggcgctcttttcactggggaaatgctggaacacgaaaatccttgtcatccctggaacgaatcttgtccgaaaggggccctatcaatggattaaacatccgaactatttggcggtcgctcttgaatttctgcttttgcccctgctttttcaggcatacgccaccgcacttttatttacggtgctcaacgctgctgtcatgtacatccgcattcgtacggaagaacaggcattagaaaaattacaccattg

SEQ ID NO: 2758 - DNA, 1098 bp, Bacillus licheniformis
atggcctatgtcatttcggcggggacaagcattccgcgctgccatgtcgaccagaaggaagcagccgtttttgcgagggagatgttcaaagattcatttaaagacattgatcgtctgctgtcagcttttcaaaatggcgaaatcgcttcacggcaatttgtcatgcctttggattggtacaaagaggccaagagcttcaaggagaaaaatcaaacgtacattgatatggctgtcagacacagtgctgaagccgtttcgaattgtctgtcggacgaccgttttttgaaaaaagaaatcccttgcggaaaaattgacgcgattttttttatttcctctacaggcatctcgactcccagcattgaagcgaagcttatgaacattctgcctttttcaaaacgggcgaagcggatcccgatctgggggctaggctgtgcaggaggggcttcaggtatagcgcgagcattcgaatactgcaaagcgtttccaaaatcccatgtccttgtgattgcggcggagctgtgcagtttaacgtttcaaaaggatgatcaatcgaaaagcaatcttatcggcacatctttatttggcgatggaatcgccgcgcttttaatgtgcggcaaggaagcggatttctcagaagccagatttgaggttcttccggaagtattgggctcacaatccagcaccttggaagattcggaagaggtcatgggatgggaaatcaatgacaacggttttcgcgtcgttttttccagggacattccgacattgatcaaaacacacttaaagaacgatatcgaagcatttctgaataaagaacatatcgctttggagaacattcaagtatttctggcccaccctggcggaaaaaaagttctcgacgcttatatggaaatccttggcttttccgaagcgcacatcgactgttcacgaaaaattttggccaggcacggcaatatgtcatcggccactgtgatgcatgttttaaaggaatattgcttgcatggcggccccgtgccgggaaaatacggtctcttaggggcgctcggaccgggcttttcatcggagctgctgctcttgagatggacaaaaagagagtga

SEQ ID NO: 2759 - DNA, 552 bp, Bacillus licheniformis
atggaaactgtgaatgagcttgtcgaacgaatcaggacgaaagacggcggtgaagctgtcatccgtcccgtcaaaatggcggatgcccctgacatcatcgaggcggtgaaagatgtgattcaaacgggcgtttacatccaaaaagaacggccgcgcacacttgaggaagagcgtgcatttatcagcgatatgatgaaaaaagacaacatgtatgcggcggttgaaatcgatggtacggtgtacggaattgcccgggtcatacgcggcgaactcaaaatgaagcggcacacgggtctgttcagaacttggctccacagcaaggcgcaggggcttgggatcggcagggaaatcatgtcctacaccctgaaatggtgcaggctgcatcgcctgcataagctctgcttgaccgttttttccgaaaatgaagcagcgctgtcgctctataagaaaagcggctttatcgttgaaggggttcaaaaggaacaggttttgtcggacgggaaatatgaagatgaagtgctgatggcctattttttcaacgggtccacataa

SEQ ID NO: 2760 - DNA, 1317 bp, Bacillus licheniformis
atgaaacttacagccggtaaaactgtttcattaagcattcagcacgtccttgccatgtatgcaggagccgttgtcgtaccgctgatcgtcggcggcgctctcggtctgacgccggctcagctgacataccttgtatctgccgacattttgatgtgcggtgtggcgacgctgctgcaagtttggaaaaaccgctttttcggtatcggtttgcctgttgtattggggtgtacgttcacagccgtttctccgatgatttcgatcgcctcgacatatggtattccagcgatctatggaagcatcatagcaggtggtgtgattgtcgtcatcatttcttttttcttcggaaagcttgttaagtttttccctcccgtggtcacaggatctgtcgtcacggtgatcggtatcaccttgattcccgttgcgatgaacaacatggccggcggtgaaggcagcagcgatttcggcgagctgtccaatcttgctttagctttttccgttttactagtcatcgtccttttatatcgttttacatcaggatttatcaagtcaatttccattttaatcggcttgatcgcaggaacagccggcgccgctctaatgggaaaagttgatattacagaagtcgcaaacgctggctgggtgcagatgattcatccgttttacttcggcgcccctgtttttgaagttaccccgatcttgacgatgtccctcgtgctgatcgtcagccttgtcgagtccacaggcgtctactttgcattgggcgatttgacggaccgccgcctgacagaaaaggatttaggaaaaggatatcgcgccgaagggattgccgtgctgttgggcggggttttcaacgcctttccttatacggcgtattcgcaaaacgtcggtctcgttcagctgacaggagttaagaaaaacagcgtgatcgcgcttgccggagcttttctcattttgttggggctgtttccgaaagccgctgctttaacgacgatcattcctaaacctgtgctcggcggcgctatggtagcgatgttcggcatggtgatcgcctacgggatcaaaatgctgagcagggttgatttcggcaagcaggagaacttgttgatcgtagcgtgttcaatcggaatcggcctcggcgtgacggttgtaccgcaaatgtttcaaaaccttccggacgccgtcaagcttttgacagagaacggaattgttgcgggaagctttaccgccattctcttgaatgcgatctttcacattcatccgttttctcgtcatgctgaacagcctgaagcagtttctgctgagaaatctgccgtttaa

SEQ ID NO: 2761 - DNA, 585 bp, Bacillus licheniformis
atggaaaagctaaaacgaaaaattgcagagcagggcacggtgttgtctgacgaagtgctgaaagttgattcatttttaaatcatcaaatcgatccggaattaatgcttgctgtgggtgaagagtttgcttcgcttttccgggaggaaggcgtcacaaagattgtgacgattgaatcctcaggcatcgcacctgccgtgatggccggcttgaagctgggcgtgccggtagtatttgcaagaaagcgtcaaccgcttaccttgacggaaaatctgttgacggcttctgtctattcatttacaaagaaaacggaaagtacggttgccgtatcagccagccacctttcaaaggatgacaaagttctgatcatcgacgattttttggcaaacggacaagcagctaaagggctcgtttccatcattgaacaggccggcgctaaggtgtgcggaatcggaatcgtcatcgagaaatcattccagacgggcagggaggaacttgaaaatcttggaatcagagtcgaatccctggcgcgtattgcctctcttgccggtggaaaagttacctttttacaggaggttgggtcatga

SEQ ID NO: 2762 - DNA, 129 bp, Bacillus licheniformis
atgaaaagggataaaacaaaaaaagacgaacctgcacacattttttcatttgaacgttcgtatttaacagataattctgacccgaaaacccctcccatacagacgggaggggttttcttttacaaatag

SEQ ID NO: 2763 - DNA, 1503 bp, Bacillus licheniformis
atgtcgatcaatacatatgaaaaagagtttttagaaacattaaagaaaatcagccggtatgagcaggcgattaatgtcatgtactgggatatgagaacgggcgcgccgagaaaaggggaggaaagccgcgctgaagctatcggccaattgtcggcagacgtctttcagatgagaacgtccccgcggatgaaagagcttttggataccttagccgggcaaaaacaagatctgccttttgatacacagaaagcggttgaagaagcgaaaaaagagtacgatttaaacagcaagattccggaagaggagttcaaagaatatacgacactgacttccaaagcggaatccgtctgggaaaaagcgaaaaaggcgtccgatttttctctctttgctccgtatttagaaaaaatcatcgactttaaaaaacggtttatctcatactggggatatgaaggccatccttataacacgcttctggaccaatacgaaccaggcgttacagtcgaaaagctcgacgcccttttttctgaattgcgggaggctatcgttccgcttgtgcaaaagattgccgccagtgataaaaagcctgatacgggctttgttcacgatcatttcccgaaagagcggcagcgcgatgtttgccacttcttcttacaggagctgggctatgattttgaggcggggcgcctggatgagacggttcatcctttccaggtgacgatcagccaaggggatgcccgggtgaccacagcatacaatgaaaacgattttcggtcggctgttttcggaacaattcatgaatgcggccatgccatttatgaacagaacattgatgaagcgctgggcggaaccaatttatcagacggcgcatcaatgggcattcatgaatctcaatcccttttctatgagaactttatcggcaggcatcaaagcttttggacgcggtattttgataaaataaaggaagcaagccctgaccagtttgcaggcgttactgccgaagggttctacagagccgttaatgaatcaaagccgtcgctgattcggatcgaggctgatgaactgacatatccgctgcatattatgatccgctatgaaattgaaaaagcgattttcagcggcgaagtatcggtcggagaccttccaaaactatggaatgacaaatatgaagcatacctgggcattacgcctcccgacgatgctaaaggaatcctgcaggatgtccattggtccggcggagatttcggttattttccttcatatgcgcttggatatatgtatgcggctcaactgaagtcaagcatgctgaaagatcttccggagtttgaccgtctgattgaaaacggcgattttcaaccgatcagaaagtggctgacagagcatgtacacatccacggcaaaagaaaaaaaccgctggaaatcattaaatctgcgacaggcgaagaattaaacgtccgtcatttaatccgctatctggaagaaaaatacacaacactctatttgtaa

SEQ ID NO: 2764 - DNA, 1920 bp, Bacillus licheniformis
gtgacagcatctcgtctgcctttttcattaacaaaaacaaaaaacttttatgaagaactgaacaattggatcggtgatgtattttacgatattcttcctgaaaaaggctttgatttgcgcgatgagcaaatattcatggcttttcaattagagcgggcatttaaggaaaagaaggtcatgtttgcggaagccggcgtcggcaccggaaaaacgctcgtctatcttctgtttgccttgagctatgccaggtatacgggcaagccggcggtcatcgcctgcgcggatgagacgctgatcgaacagctcgtcaaaaaagaaggcgacatttataaaatttccgagcatttaggcctgacgatcgacgcaaggctcagcaagtcgcatgatcaatatttatgtttgaaaaaactggagaaaacgatgcagcgctctgatgatgaaaaatggcttgacctttacgaaagtctgccgtctttcgttcacgaatcgcagggcatgcagactttttatccgtacggcgaccgaaaagagtattcgtctttatcaaacgatgagtggtctgaaatcggttacgactcttttcaggactgtcttacatgtgatatgaggcaccgctgcgggctcacactgtcaagagaccattatcgaaaatcaaccgatttcatcatctgttcccatgatttctatatggagcacgtttggacggaagaggcgagaaagcgggaaggccagcttccgcttttgccggagcacagcgcagtggtttttgatgaagggcatctgctcgagtttgcggcccaaaaagcgctgacatacagggtgaaacaatccacgctcgaaatgttccttgagcgcctgctcggcaatgacatcagagaagaatttgcagagcttgtcgaagaagcgcttcgcgccaacgacgaatttttcggtttgcttacggaaaatgccgaaaaagcagaaggctctgagcgcatgcgcatcaaagacgataccgatgtgaaaaaagcggccgccgagctgtatgatttgcttgaaaaaatcggagaggcgctcgtttttgagggcgagctgtacacgatcgaccagtacgctttaactgttgtcgaagagtatttagaacagatggcttactccctttcgctctacaggaaaaatgcgatcagctggcttgaacaaaaagagcttgagtcgacattcgtcgtcatgccgagaaccgtctctgaagttctcggagaaaaggtgttctccaagcagattccgtttattttctcatcggcgacattatcggaaaacggatcgttcgattatttggcgaccagcctcgggatccgcgattacttatcatttaccgtcgattcgccgtacgattatgaagagcagatgaaagtgtacatccatcaaatcgaggaaaaagaagcgaaagaaaaagcggcaatccgtgcaatcaaagaatctggagggaagacgctgatcctgtttccgtcttttgaagagcttctgtccttcaagcgccggactgcacaggaatcattttcgtttcccgtttactttgaaggggatgaagaaatcagtacaatcgttgaaaagtttcaaacggtagaagaatccgtcttgtgctctgtccatctatgggaagggctcgatattcccggagacccgcttcaaaatgtcatcatctggtcgctcccatttccgccgcatgatcccgtgtttgaagcgaagcggagcggcgtggaaaacgcctttcgcgaagtagaccttccttacatgctgctaagacttcgccaagggatcggacgtctgatcagatcaaacagcgacagcggcacgatcagcatttttgcgggcgatgaaaaagaatggaatgtgataaaagaagtcgaatctgttcttcctgttcagccagtctatgtataa

SEQ ID NO: 2765 - DNA, 177 bp, Bacillus licheniformis
atgttgaacagcgatcatattcaaatgattcaaaaagcgctggagacgtcagaaagccagctcgaggacattggcgaagagcgccttacatatgcaaaggaagaattgaaaaacgcgatcagccatatggaatcgacagatcatccgtttttgacgcattcgatttaccggaaatag

SEQ ID NO: 2766 - DNA, 411 bp, Bacillus licheniformis
atgtattattatgaaccggcaaagaaagattattgggattatgattatgatccttacaagaaggatcacgactattgcaaaaaggacttttactatcatgagccttgcaagaagaattactactatcacgagccttgcaaaaaagacttctattaccatgaaccttgcaagaaggattacgattattgcaaaaaggattatgactaccatgaggattacaaaaaagactacgattaccacaagccttgcaaaaaggattacgattactgcaaaaaggacttctactaccatgagccttgtaaaaaagactatgattaccacaagccttgcaaaaaagactgctattatgagccgcgcaaaaaatgctatgattcgtcttataaaaagaaaaatgattcatggatttattag

SEQ ID NO: 2767 - DNA, 1152 bp, Bacillus licheniformis
atgaaaacctatacattaatcgcaacagcgccgatgggaattgaagcgatcgtcgccaaagaggtgcgcgaccttggatatgattgtacagttgacaacggtaaagtcgtgtttgaaggcgatgccctcgccatctgcagagccaatctgtggctgagaaccgctgacagggtgaaagtgcaggctgccgaatttacagccaagacctttgacgagctatttgagaagacaaaagcgatcgactggagcgcctatcttcctgaacacgcgtcattccccgtgacgggaaagtctgttaaatcagtgctcgcaagcgtgccggactgccagcgcatcgtcaaaaaagcgatcgccgagaagctgaaatcagaatatcagacacagggcgagtggcttgaggaaacagggccggtatacaaaattgaagtctctcttttaaaagacaaagcggtcataacgcttgattcatccggagccgggcttcataaacggggatatcgaaccggccaaggggaagcgccgctgaaagaaacccttgctgcagctttgattctattgacaaattggacgcctgacaggcctttcgtcgatccgttttgcggttcgggtacgataccgatcgaagccgctttgatcggccaaaatatcgccccgggtttcaacagggattttgcatctgaaagatgggaatggatcggtaaagaagtgtgggatcaagcgaggctggaagtcgaagaaaaagcgaattatgatcagccgctttcaatctcggggtatgacctggatcatcgcatgatcgaaatcgccaaggcaaacgccgaggaagctggactcgccgatttcatcgaatttaagcaaatgcaggtaaaggattttcggacgaaagaggaatacggcgtaattgtcggaaatccgccgtacggggaacgcctcggtgaaaagaaagcagtcgaagccatgtataaggatatgggcaaagcatttgccgagcttgatacatggtctgtctacatgctgacatcaaacgagcgttttgaagagtgctacgggaaaaaagcaacgaaaaaacggaagctctttaacggttttattaagacggactattaccagtattgggggaaaaggccgccaaaaccgaacaaagaaaagtga

SEQ ID NO: 2768 - DNA, 297 bp, Bacillus licheniformis
atgcttgctgataaagtgaagctttctgctaaagaaattttggaaaaagaattcaaaacaggagtcagaggctacaagcaggaagacgttgacaaattcttggacatggttattaaggactatgaagccttccatcaggaaatcgaagaattgcagcaggaaaacctgcagttgaaaaaacagcttgaagaagccaacaagcgacagccggctcaatcaaatacgaccaattttgatattctaaaacgactttccaatttggaaaaacatgtatttggaagcaaattatacgattga

SEQ ID NO: 2769 - DNA, 552 bp, Bacillus licheniformis
atgaaagtattggccgttacagggtacaagccgtttgaactcgggattttcaaacacgatgacaaggccctgttctacataaaaaaagcgcttgaaaaccggatgatcgctctccttgaggaaggcctggaatgggtccttatctcgggccagctcgggactgaactatgggcggcggaagtcgcgttttcgctgcaggaagaatatcccgacttgaaagtggcggtcatcactccgtttttggaacaggaaaagaagtggagcgagaaaaatcaagagcagtatgaagccgtgctcgcagccagcgatttcactgaaagcttgacacacaggccgtacgaaagcccggtgcaattcaaacaaaaaaaccggttcttcatcgaaaaggcggatggcttattgattctgtacgatgaagaaatcgaaggctcgcctgtgtatatgctgaatgaagcaaaaaaggctcaggaaaaacgcgattttccgatctacacgattacgatggatgacttgagagtcactgttgaagaatgcagcttttacgaagagtaa

SEQ ID NO: 2770 - DNA, 270 bp, Bacillus licheniformis
atgcactgtaaaccgcatgtaatggcgccgattgttcatcctactcaatgctgctacaaccatacgcacagcaaaaccgtcgtaccgcacattcacccgcagcacacaacgaatgtcaaccatcagcattttcagcatgttcattactacccgcaaactcaatcagctgtcaacaaggcgtcacatcagcacttcgtgagccctggagcaggaatgatgcctgggcctggagggatgccgggacctggaatgggcatggggccttactaa

SEQ ID NO: 2771 - DNA, 93 bp, Bacillus licheniformis
atgtataaggggctgttttatctgttttttgtcgtcgtattgtttatcgtattgatcatgacgaatttcaaggaaagctttatggcttacttt

SEQ ID NO: 2772 - DNA, 1314 bp, Bacillus licheniformis
atgtctttaaaacgaaaacttaatcgctataagcatcacctgggaaatcaagcgaaagaagaaaaaacggaacctcccgcagataagctgacttccttgtccgtcagttttgaaaaagaatgggccgaactcggtgttaaaccatatgtgtttgaggaatgctattgcctgatcagggaagtcgtttacccgttgactcatgttcatggtcattacgcgttttctgagctgcatgagacggttaggcgatggaacaacagcgccgtttcccattcgctttcaagcaaagggtacacaccgagccagctcttcttctttgatacggaaacgaccggtctcggaggcggggccggcaatgcgatctttttgctcggccatgcaagggtgtatgacgaccgcgtagtcgtcaaacagcatctgctgccaaagccggggtacgaagccgccctctatcacagctttctgagtgaagtcgatattcagtctcttgtcacctataacggcaaagcgttcgactggccccaggtgaaaacgaggcacacgctgatccgcgacagggtcccaaagcttccggatttcggccactttgacctgctgcacggatcccgccgcctttggaagcataaatttgaccgcgtttccttagggacggtggaaaaggaagagctgggcgttgtaagaactgaagatacgccgggctatctggcgccgatgatgtattttcattttttaaaggaggaacggccggaaatcattgaaggcgttttgcgccataatgagcttgacgtgctttctttaatcactctttacatccatttatcgaagaaaatcctcactccggagcagacagcggaagcaaacgaaaagtacgcgatggcaaaatggctcctcgccaaccgggagacagagcttgcgacagcgcaattgcaagagcttgaaaaaaaaccttttgaacagtctgaacgcgcatcattcgatttatccatgcagtataaaaaacaaggcatgctaaaagaagccgcagccctttggctgaagctccaaaatggagaagacggaaaaaccgcctggcgcgcaggcatcgaacttgccaaatactttgaacatcgaaagcgggatattcgggccgctcttgaggtagcggaaaacctgctggagcagcacggttcacaaaagtttgagctgaccgaaaaagaaatggccggcctcttgagaaggcgcgagcggctggaaaggaaatacggacgaaatattccccgggcaagcgcagaaaacgacgatcttcgaaagccaaacatttcaagcacgttatga

SEQ ID NO: 2773 - DNA, 2268 bp, Bacillus licheniformis
ttgtttcaaaaacgaaatttgacagatatgattcagcttctgaaagaagaccaagctttcagcaggcaaattgttcattggcatacaatcgaggaaaaagaagcggattactgcgattttcctgaaggtttagataagagaatcgtgcatgctttacagcaaagagggatagaaaagctgtattcccatcaggccgacgcatttctgcacagcgccgccggcaaaaacgtgacgcttgtgacgccgacggcatctgggaagacgctttgctacaatctgcccgttattcagaggatcacagaagaccaagatgcgcgcagcttatacctttttcctactaaagcattgtcgcaggaccaaaaaagcgaactgaatgaattaatcgatgaaatcggtgcgtcgatcaactgttatacatatgacggagatacgtcgccttcgatcaggcagaaagtcagaaaagcgggccatatcgtgattacaaatccagatatgctgcattcggcgatcttgcctcaccatacaaaatgggtgtcattgtttgaaaatctgaaatacatcgtcatcgatgagcttcacgtatacaggggagtctttggcagccatgtagccaatgtcatcagacggctgatgcggattgctgaattttatggaagcaagccgcagtttatctgtacatccgcgacgatcgccaatccattggagctcgctgagacgctcacggggcagccgatgcacctgatttcaaacaacggcgccccgtcgggaagaaagcacttcttattttacaacccgccgatggtcaaccgttcccttaacatcagaaaaagcgcgacccttgaagtgagaaagctcgcatccgaatttctaaaaaacggcattcagacgattgtgtttgcaagaagcagagttcgggtggaaattatattgacatacttgcaggaagtgatgaagccgattgtcggcccgcattcgattcaggggtacaggggcggctatctgccgaacgagcggcgcgtcattgaaaaaggccttcgcagcggggacatcaaaggcgttgtcagcacgaatgcactcgaactgggcgttgacatcggacagctgcagacatgcatcatgaccggttatcctggaacgatctcaagcgcctggcagcaggccggccgcgccggaagaaggcacaacgaagcgctgattgtcatggtggcaagttccgccccgctcgatcagtacatcgtacagaatccggactatttctttaaacaaaatcccgagactgccgtcattaacccggacaacctggtcattctcgtcgatcatatcaaatgcgcggcctttgaactgccattcaaaagaacggacacattcggcggtatcgaaattgaggatattcttgactacttggcagaagaaagggtcctccacttaaccgggaatacgtaccactggatgaatgacgcttttcccgcgcacggcatcagcttaagatcggcttctcaggaaaatgttgtgattattgatcagtcaagacgcgagaaggcgaaagtaatcggggaaatggacaggttcagcgccatgacgcttcttcacgatgaagccatttatttgcatcaaggcatccaataccaggtggaaaagcttgactgggaggagaaaaaggcgtttgtccgcgaggttcaagttgattactataccgatgccaatcttgccgtcttgctgagagttctcgaggttgacaaggagaaaaagacggaaaccgcagcgttcggttttggggatgtgaccgttcaggcaaaagcgacgatttttaagaaaataaaatttgagacgcatgaaaatatcggttcaggaccgattcatctgcctgaagaggagctgcataccaatgcggcttgggtgcaggtgaacgatagtgagcggcaaaattggaatgacatcaaattggaagaggctttgcttgggactgcaaacgttcttgggcatgtagccgccttaaaagtgatgtgcgatccatctgatctgcatgtttttccgcaaatcaaagccgttcataacgaaaagccgacgatctttttgtatgatcgctatcccggcggagtgggtctttcacaaaaagtgtatgaacaaatgcccgagatcatcagtgaagcgcatcggctgatttcaagatgtccgtgtgagtcaggatgcccttcctgcataggagtgagcggcggcgatcagacaaaaaacaatgctctgcgccttttaaaaggctggaaaggttga

SEQ ID NO: 2774 - DNA, 507 bp, Bacillus licheniformis
ttgctgaaaaaattattcggtattggtcaaaaacaagatgaagtgaaagaagaaaccgttttttcaccggttgacggacaagttttggaactttcaaaagttcctgaccccgttttctctcaaaagatgatgggtgacggaatggctgtcgagccttccgcgggcgagatcgtatcgcctgtcgacggggaagtgatccagctgttccacacaaaacacgccatcggcattcgttcattgtccggcgtggagctcttgattcacatcggtctggaaaccgtagcaatggaaggcgaaggtttcacagcccatgtcaaagaaggagacaaagtaaaagtcggcgatcctttaataacatgcgatttggaactgatcaaggaaaaagcgagcagcacaattacgccgatcgtcattatgaacggcgatgtgttggaacgcgttacaaaacatgaagaggcagcagcgaaaaaaagcgagacaaagctcatggagcttaaagtaaagtaa

SEQ ID NO: 2775 - DNA, 420 bp, Bacillus licheniformis
atggattttaaggaaaacgacaatcactcgctcagcaaaaaggacgaaattcaagaagctgttgaacagttgttttacaactcgcctttccacgatattttaaattcattccaaaaactcatatcagaccagcttcagaattccacgatttccatgaatatcagagaggatgatggggcgctttacgtcgatatcgccgttcctgaatcgtttcaaaatggagatattatgattgaagcgaaatcacggtatcttcatatcgccttgaaggagaaacaagaaagcggcggttcttcatcatttacaagcctgtccagaaccgttctgctcccataccctgtccgtgaagaaacaatgaagacgtcgtggaaccgaaatgtcctcacggtctcattttcggagcaaaaaaagcatgaatga

SEQ ID NO: 2776 - DNA, 444 bp, Bacillus licheniformis
atggaagagaggagatccgccgtatatccttattccggccctggtgcgcatattcaagcctatcagcaaaaccatcaggcctatcatcccgttcagccgtacttcagccaggaaaccgttccgtacgcccatcctgctcagcggccgcagccatatcagcagccgattgagcagaatttggacccgttttcagtctatcatcagcctgttcagcagcaaatgcagccgcttccgccgtttcagggatttccttatcagcatccatacccttcgccgcggcctaatctccatcagccgtcacagtttcaaagctttctgtcgcaattcaaaaaaaagaacgggcagattgatttcagcaaaatgatggacaccgcaggccagatggtgagcacggtcaatcaggtcggagcgcttgccaaagggtttatgggattcttcaaataa

SEQ ID NO: 2777 - DNA, 201 bp, Bacillus licheniformis
atgaacgtatcatacttaagaaattgttttgccgagatgaaacagtatgagacagactgcatgaacaaactgatggatttcgctaagtttttgtatatccagggacatctgacattaaacgaatttcgcacaagtatgaaagttcttgaagcgaatggcgcacagcaccctgcttatgatatgaatacggacgccagctaa

SEQ ID NO: 2778 - DNA, 372 bp, Bacillus licheniformis
ttggatacacaatctcttcttatacagacacaggatttaatccgccttgtaaaagaagcggaagaacgatatagaaagggaaaagaggaagggacggaatacgattttttcgaggttgtcaaaccttctgtcgagaggttcgaacaaacagtgaaaagctggctggcggaaagcctgtcttatatcaaggccaatcggccaaaatacatttacgaagaacagctcaactcggttgaggaaaatgcgaatgaaattttcatgcagtcctatttctgcaaaattcataaaaaacgctttaaagatctgacggaatccgtcctctacacgctcaaaaacgtagaagacgatatattaaaagaagaccgggcctaa

SEQ ID NO: 2779 - DNA, 228 bp, Bacillus licheniformis
atgaacggatttgcaagcaaagactcggtccttcaaatgcttttggaaacggaatcagacatgtcgtctgcggagaaggctttgacagaagccgtacgccggacggagcaggaaaagcagtctgcctggaacgaacggctcgatctgattgaaaaagagctggcagaactcagctcatgtttaaacagcacgttaatgggagtggagcccggggtagagacggcttaa

SEQ ID NO: 2780 - DNA, 105 bp, Bacillus licheniformis
gtggaaaacaataaaaagaaatcacctgcgaaaacaaaaccagatgctaaacaaacagacacactggataagaaattaggcggacctaaccgcccgtctacttaa

SEQ ID NO: 2781 - DNA, 960 bp, Bacillus licheniformis
ttgcacaacactttttccgcggcggagctgacgagccgcattcaagagctgaccgcaaaactgaacaaggacaatatctcacggacaaatgcctacaaacgctactttgaccgccatcctgaaatcaagtggtcgcttttggcttcatttgtttcccggaatgccggctggtcgatgaccgatttaaaagggcgcttattcgagctcggacttacggcttttcagcagaaatggctgtttttagcgtatgagagagcgaactggctgatcttttcagacgcctatccgcagctcctgctataccattggtccaagcagcttggccagccgctgtttcatttgctctcctcatttggcgtgtcttcatttatgaaaacggagtgggagcggttctggcatgagcgcgatcaaaagcggctcatgtacgctctcattataaatgaacaaaacactatccaaactcctattatacaaaatcctttgtttaaaaagaatgtttttcagacgattccttttcagctgtgtgaatggtttcacttcaacacggtcattttcccgacggttgaaggcgttttttacggtgtgtctgtcaaacgcttcaccagtttaaaggaaaggatcaagctcggcaagcaattaagcgagctgctgttttcgcctgagcttttccccggtttttttcattttacatcatgtgttccgcataccgggtcgcgctttgatatggagcgctgggcaggggttaaaatcagaacctcgccgtttttgagaacgtgttatcccgttgttgcccattcattagacggattaaaatgcgattggtttcgcggaggaaagagggaggcgatgttcaaagatgaaaaactgccgaaaacgatcgaaatcaccgattggtattttcaaaaaagaaggcagctgcaggcattgttttcgctggagcattggctgaataagaggtga

SEQ ID NO: 2782 - DNA, 597 bp, Bacillus licheniformis
gtgattcgttacccgaacggcaaatcctatcagccgaaaacagctgcctcatccttgcaaaagaagccgtcgtattccaatcgcggcatgaccctcgaagatgacctgaatgaaacgaatatgtattatcaatctcattcgattgcggtcatccataaaaaaccgacacctgtacagattgtccaggtcgattatccgaagcgaagcgctgcggttatcaaagaagcatatttcaagcagtcgtcaactactgattataatggggtttataaaggccgctacatcgattttgaagcgaaagaaacaaagagccgaacctcgttcccgcttcagaatttccacgatcatcagatcgagcatatgaagcaggttgtggcgcaagacggcatttgttttgttatcatatccgcttttgaagaaatttattttttggaagcagaaaaattattttatttctgggagcggaaaaagcaaaacggcagaaaatcgatccgaaaagacgagcttcaggaagccgctcaccccatttcacttggatactcgccaagaattgattatattaagattattgatcagttgtatttttcgccatcataa

SEQ ID NO: 2783 - DNA, 2688 bp, Bacillus licheniformis
atgtcagatcaatttaacagccgccaggaacggcgaaaagcccagcagggcaaaagcaggtctaatactcattctaaacccaagaaaaagaaaaaagcaggattgtttaagaaaattcttttatccattttaatcatcggtgttatcggcttgattgccgggggcgtcacttttgcggtgatggtagcggactcgccgtcccttgatgaagcaaaactgaagacaccgtactcttctaccatctatgacaaaaacggaaaagaaatcgccgaaatcggttcggaaaaacggacgtacgtgtcgattaaagacatcccggattccgtcaaaaacgcatttcttgcaacggaagacgcccgtttctatgaccaccacggcgtcgacccgatccggatcggaggagcgcttctggcaaacttcgaaggcggatttggttctgaaggcggaagtacgatcacacagcaggtcgtcaaaaactcccttctgtcacatgaaaaaacgctgaaacggaaagtccaggaagtctggctgtctttccagctggaaagaaaatactcaaaagacgaaattcttgaaatgtatttaaatcggatttacttctcgccgcaggcctacggtgtcggaaaagcggctgagcagttctacggggttacagatctaaacgacttaacggtcgagcaggccgcaacgcttgccggcatgccgcaaagcccgaataactacaacccgatcaaacatccggaaaaagccgagaaacggcgcaatgtcgtgctgagcctgatgaataaacacggctttatctctgacgcagagtacaacaaagcgaaaaaagtagccgtcacaaaaggccttgtatctccgaaagagtacgcaaaaacaacgtccaacaaatacagcgcgtttatcgagcaggccgtcgccgaagtgaaagaaaaagcgaacgtcactccgggaacggacggactgaagatttacacgacgattgatacagacgcacagaattatgtggatgagctgatggacggcgattctattcagtataccgaaaaaatgcaggccggcctcaccctgctcgatacgaaaaccggagagatccgcgcgctcggcggcggacgcgaccggaaagcaggcgactttaactatgcagtagatactaaacgtcaacccggttcaacgattaagccaatccttgactacggccctgtcattgagaacaagaaatggtcgacgtatgaacagattaaagatgaagcatacacgtattcaactggagatccgattaacaactatgacagaagctacagaggctggatatcgatgagagaggcgctggtcgattctcgaaacatcccggctttaaaagcgttccaggcagccggcaaagacaatattgtaaaatttgcaggcaaccttggccttaacataaattcagatgacttagtggaagcttatgcaatcggcggcttcggaaatggtgtgtcgcctctgcaaatggccggagcgtacagcgccttcggcaacaacggctactacaatgagccgcatactgttaccgcggtggaattcaatgacggcactaagcttgatttgacgcctgaatcaaaggctgccatgagcgattataccgcatttatgataacggatatgctgaaaagcgctgttcagcgaggaacaggaacagcggctcaagtccccggcgtcactgtagcaggtaaaacgggtacgacgaactttaccgaggacgacattagaaaacacggcataaatcgaaacggagcgagagattcatggttcgtcggctatacgccgcaatataccgcagcggtctggaccggtaaagaaggctttaattcgctgagccagagcgaacagcaagtcgccaagctcctattcaaaaaactgattgccaaggtggacaacggcagcggctcatttgaaaagcctgacagcgtcgttgaagcgaccgttctaaaaggctcgaacccgccggtgctcgccagcagcaacacgcctagcgataaaaaagtcactgagtactttgtaaaaggcacacagccgacgaccgtttcgaaaaaatatgaagaaaaagaaaatgccgacaagccgtcaggtttgagcgcagagtatgatgaagcatcaaagagcattaagctttcatggtcatattccggagacggtgatgtatcctttaaagtcaaacagtctgttgacggaggcggatacagcgaaattcaaaacagcagtgcgaaagaagccgtcataccgaatgcaaaagaaggatccgtttacagattccaagtcactgccgttaccgaagatggtgaaagcgaccctgcttctgtaacgcttaaagtcaacgcggctgatgaggatgagtcaaaaacggacgatgaaaagaaagacgatgacgagaagaagcaggatgctgatgatgatcaggacaaaaacaaacaaaataacggcaattcaaatcagccgaatgatcaaaatccaggaaattccgatcaaaacaatcaaaatccgggaaattcagaccaaaacaacggcagaaaagatgatgacgccgatgatcaagacaacgatcaaaataaagataaagataaagacaaaaacaaaaacccggatcaaggcgccaacacaggtgatcaacaaacaaattccaacggtcaatcaaccggcaccaattga

SEQ ID NO: 2784 - DNA, 504 bp, Bacillus licheniformis
gtgacaagcgtttcactgttggacgaatacgaaaaaacgctgcggaagaaaaggccggaatccggcgaaaggcttgcggtactttctgaaaatccgctctgctatgatttttttcaagacgcaggagaggacaagccttgggagcatgcggaagaatgggtcccgcttctgtttgcagaatgggaacgcacaaaagaaaagcttctgcccgtctttaaaacgagaaaatcaaggtgcagccaggatgacatgctcaacggggtgtgctgcttgatcgcaagccttcactggacgatgggggagcctgtcaaaagtctcaactgggagatcatcacccggaaggattttggagcaaagccgatgaactggacggaacggctcgagttcatcctgctgaaaccgacgcagtaccattgttttatccagcttgacgaattgtttacggaaatgaaaaagcaattttataaatatgttgccatgaatcataaaaaagccactcactaa

SEQ ID NO: 2785 - DNA, 663 bp, Bacillus licheniformis
atgctaacaaaaaaacagatcgagttttgtttagacacaatcggtgaaatgtttccggatgcagagtgcgaattagtccatgacaatccgtttgaacttgtcatcgctgtcgctttatcggcccagtgcacagacgcgcttgtcaataaagtgacgaaaacgcttttccaaaaatacaaaaaacctgaagattatcttgcagttccgcttgaagagctgcagcaggacatcaaatcgatcggcttataccgcaacaaagctaaaaatattcaaaagctgtgcaaaatgctgctggaagactacggaggtgaagtgccgagagaccgcgatgagctggtgaaacttccgggtgtcggaagaaagaccgctaatgtcgtcgtttccgtggcattcggcgttcctgccattgccgtcgacacccatgtggaaagagtttcaaaaaggctcggcatttgcagatggaaggattcggtcatggaagttgaaaagacgctgatgaaaaaagtgcctgaatcagagtggtccgtcactcatcaccgcttgatttttttcggccgctatcactgtaaggcgcaaagaccgaaatgcgaagaatgcccgttgttttctctgtgcagggaagggcaaaaacgatataaaaaagggctggtgaagctgctgtga

SEQ ID NO: 2786 - DNA, 699 bp, Bacillus licheniformis
atgaaaaaacagcactttattaagatgcaggatatgggagctgtcaccattccgaatctgctctttatgaactatcgggagcttggcttaaacgagacagaattcatgctgctcttaaacattaaaatgcatgttgaaagaggttctttttttccgacgccggaggaattaagcaagacgatgtcgattgaaaccgaagaatgcatgaatatgctgagaatgttcattcaaaaaggcttcatctatatagaagaatgcgaagaccagaacggcattaaatttgaaaaatattcgctcgaacctctctggggcaagctgtttgagcttttagaaatggccgagcagaaaaaactcgccgaacagaatgaaggcgaacagaagagcctttatacaatctttgaagaagagtttgcacgaccgctttctccgctggaatgcgagacgctcagcatctggcttgaccaggatcatcacgatgcacagctgatcaaacaagctctcaaagaagccgtcatatcaggaaaattaaatttccgctacattgaccggattctgtttgagtggaagaaaaacggcgtttcaacagtcgaacaagccgtaaactacagccaaagattcaggcggaagactgctccgcggcaaaatgagcaaaaggagtatacaagacaggttcctttttacaattggcttgaacaataa

SEQ ID NO: 2787 - DNA, 1293 bp, Bacillus licheniformis
gtgaaaacaacaataaaccaagtgtacaagcatgttggtgaagaagtaacaatcggcgcttggatcgccaacaaacgttcaagcggcaaaattgcgtttttgcagcttagagacgggacaggctttatccaaggagtcgtcgtcaaagcggaagtggacgaagaaacatttcaaaccgctaagtctgtaacacaggaaacatcattatatgtaaaaggcgtcgtcaaagaagacgagcgttcgcctctcggctacgagcttgctgtgacgtcgcttgaagtcatccatgaagcgacagattatccgattacacctaaagaacacggaacagaatttttgatggatcacagacatttgtggctccgttcaaaacggcagcatgcaacgatgaaaatccgcaacgagattattcgcgctacatacgaatttttcaataaggaaggctttgttaaagtcgatcctccgattttgacgggaagcgcacccgaaggaacgacagagctttttgcgacaaagtattttgacgaagatgcctacctttcgcaaagcggccagctttacatggaagctgctgcaatggctttaggaaaagtcttttcattcggaccgactttcagagctgagaaatcaaaaacgaagcgccatctgatcgaattctggatgatcgagccggaaatggcttttgtcgaattcaacgaaaaccttgaagttcaagagaactatgtctcttttatcgtccaaagcgtgcttgaaaactgcaaaatagaactgaatacgctcggcagagacacttccaagctggagcttatcaaagcgcctttcccaagaatcacgtatgatgaagcaattcagttcttaaaagagaaaggctttgacgatattgaatggggcgatgacttcggcgctcctcacgaaacggcgattgctgaaagctatgacaagccggtatttattacacactatccgacatcattaaagccgttttatatgcagcctgcacctgacagggaagatgtcgtattgtgcgctgacttgattgcgcctgaaggctacggcgagattatcggcggatctgaacggattcatgatctcgagcttctcgaagcgcgcctgaaagagcacggtttagaatcggacgcttatcaatggtatgcagagctgagaaaatacggctcagttccgcattcagggttcggactcggacttgaacggacggttgcctggatctgcggctctccgcacgtccgcgaaacgattccgttcccaagactgttaaatcgcttatatccttaa

SEQ ID NO: 2788 - DNA, 1185 bp, Bacillus licheniformis
ttgaatctagctaaaagagtatcagcgttaacaccatctgcaacattggcaatcactgcaaaagcaaaagaattaaaagcggcagggcacgacgtcatcggtcttggggcaggtgagccggattttaatacgcctgagcacatcattgaagcggctgtccgttcgatgaacgaaggacataccaaatacacgccttccggcggtcttgcggcgctgaaagacagcatccgcgataaattcaagcgcgatcagggaattgaatacagccaatcggaagttattgtgtgcacaggtgcaaagcatgctctttacaccctatttcaagtgctcctcgacgaaggggacgaagtgattattccgactccgtactgggtcagctatcctgaacaagtcaagcttgcaggcggcaaacctgtgtttgtggaaggccttgaggaaaacagcttcaagatttctccggagcagctcgaaaaagccgtcacagaaaaaacgaaggctgtgatcatcaattccccaagcaatccgacagggatgatgtatacggaagaagagctcaaagctctcggtgaagtatgccttcgacgcaacgttttaatcgtatctgatgaaatatatgaaaagctgatttacggcggaaaaaaacatgtatccattgcacagctttctccagaacttaaaaaccaaaccgtgatcatcaacggggtttccaagtcacacagcatgaccggctggagaatcggttatgcagcaggcagcgaaccgatcattaaagcgatgacgaacctagccagccacagcacgtcaaatccgacatctgtcgctcaatatggagccattgccgcttacaatgggccaaacgagcctgttgaggagatgagaaaagcttttgaagaacggctgaacaaggtgtatgaactgcttgttgacattccgggattaacatgcctgaagcctgaaggagccttctacttgttcccgaatgcaaaaaaagcggcagaatcgtgcggcttttcaagcgttgatgaattcgccgaagcgcttttggatgaagaaaaggttgcgatcgttcctggttcagggttcggcgcaccggacaacatccgtctgtcgtatgcgacatccctgtcacttttggaagaagcggttgaacgcatccgccgctttgtcgtgaatcgcagccgctag

SEQ ID NO: 2789 - DNA, 486 bp, Bacillus licheniformis
atgggcaaaaaaacattaattttcatactgatatttggtattatctttttaacagcacttcttgcgggagcgaatgtctaccgtacggcaatggatcagaaagaaaacggccacgagcaggctgccgaaacagccaggcaggaagccggcttaaaacaagttgacagcgtggagacgtttgtcggtaaagaaaagcagtacattgttacaggggcagacaaaaaaggcgacaaaatgtatgtttgggtgcctgctgacaaaaagcagaaaacgctttacaaaaaagcatcagccggcattaccggccgccaggctgcaaaagctgttcaggatgagggcctgatgtctgagcttaaagaggtgcaccttgcaagggaaggcaatgttctattgtgggaagttacatacttaaataaagatgggcagtacagtttaagctatgtggactttataaacggaaaaattcacaaaaatattacgccttag

SEQ ID NO: 2790 - DNA, 171 bp, Bacillus licheniformis
atggaaaacaaaatcgaaattctatctactgtaagcgtcgagcactcagaagacctgtataaaatcgttgatcttttgaaccgtacgctcaaacgcgatgatctcatgttcggcctcgctctcgatgaagaagaccaaaaacaggccatttttacgatttatcgtacttag

SEQ ID NO: 2791 - DNA, 2793 bp, Bacillus licheniformis
atgaacaatcaacgatatgtggtcattgatgtggaaacgacagggaattcgccgaaaaaaggcgacagaatcattcaaattgcagcggttgtgattgaaaatggacagataaccgaacgtttctccaaatatgtgaatcccaatcagccgattcccgcttttattgagcagctgacgggaatttcgaatgaaatggttgaaaatgaagaaccattttcggcgattgccgaagatatttttgagctgcttcatgacagcttttttatcgctcataacattcattttgatcttgcttttgtcaagcatgagctgcagctggccggctttggtgagattgaatgcagcgttctcgatacggtggagctttcgagaatcgtctttccgggttttgacggctataaattgacagagctgagcgaagagcttcagattcgccatgaaaacccgcacagggctgacagcgatgcggaagtgaccgctttgatctttttacatatgatggacagactgaaaaggctgccgattcccgttttgaaatctatcagacgtctatcctggcatttgatcagcgacgcgcaggagctttttgacggcttgattgctgaaaaaggcgccgatgctgaacttgaggccggctttacgaaggtcggttcttttgtgatcaggactcctgaagtcgaggatgaagaggccggccataagagccggattccgcagacagagccgctcatttgggaaagagacggcgggctttcttcattggacgaccggtttgacaagagagaaggtcagacaaaaatgatgcgggaggtctggaccgcttttcaaaatcatgagcatgcgttaatagaagccgctactggaatcggaaaatcgctcggatatctcgtgccggctgcaattcacgccaagcaaacaggcaaaccggtcgtgatcagcacatatacgacattgcttcagcagcaaatgataaaccgcgatatcccgcttttggaaaagatttttccatttccggtaaaagccgcggttttaaagggccgctcccattacttatccattcgcaagttcaagcatattttacaggaagatgatgacaattatgatagcgtcctagcaaaagcgcagattctcgtctggctgacagacacggaaacgggcgatttatccgaaattaatctcccgtcaggcggaaagcttttatgggacagactggcatatgattcgcattcatatgcagaaagcagcaacatgaggaaattgtgtttttatgaaagagccaaagcgagggcccagaaggctgatatgatcattaccaatcatgcgcttctgttgactgacgaaaccaatcagcgaatccataccggagatgccgatatgttcattattgatgaagcccatcattttgagcgcgcggcgggcgagcagtatggagctagagcagactatgtctttctccacaaaagattgatgaggctcggcaccctcaagcagaggggtattttgaaaaaagccgaacggctctaccggtcggcaggcatttcatcagaatcctttttccaaatggacgaatggctcgctcagcttcttgaagaaagcgatctattctttacggctgttcattcttttgtcaagaggaggaaaccaagaaacgatctaaaccgtctcttatataagatcggcgaaatcggtgaaagcagagcatggagcaggcttgaagaaggcgcacgaagactgtgttccatgctgtatgacatgcatcggctgtttatggatcaaaagaaaagcctcgctgaaaaacaggcttctttcacaagccgtcaggcgtttttgttagaggaatacgattcgtgcatgaacgaccttgaagaatatcgaaagacgctctgccgcttgatgtttgaccctgttgaagatgaggtcgtctggattgaaattgacgcgaagggcgcaaaaaacgccgctgctatttacgctcagccgcttgatacaagcgaaattctggccgaccggtttttcaccgagaaaaaaagcgttgtcctcacatcggggacgcttgtcgtcgagaactcttttgactatatgatcaaaaagcttggtttaagcgatttctatccgaggaccttgcaaatcgagtcgcctttttcttatgataaacatatgaatatcatgattccgacggatgtcagcccgattcaaaacgatccgggagactatattcaggatgtctcgcgttacgtcaaggcgcttgcaaaacagaaagatgccaaagtgctcgtcctgtttacgtctcatgatatgctgcgagacgtctaccatacattgaaaaatgaggaagactttccttgtcagctccttgcacaggggatttccggcggaagtcccgttaaggtcatgaagttgtttaaatcgtatcctcatgcggttcttctcggaacgaaccatttttgggagggcgttgactttccgggtgatgagctgacgacgctgatcatcgcaaggcttccgttcagaccgcctgaccatccggttgaatcagcaaagtgcgaccgggcaaagagaaggggagaaagtccgtttcaagcggtatctctgccggaagctgtcctggccttcaggcagggaatcggcaggctgctccgctcagagaaagacagcggaacggtcgttattcttgaccgccgcatccgaacctcttcctacggcacggtgtttatgaaggctctgccccctgcaaaagtcatggagcctactttccttgagcttgaagcctacatagccgggaaaaacggctaa

SEQ ID NO: 2792 - DNA, 384 bp, Bacillus licheniformis
atgtaccgtacgttaatgagcgcaaaacttcacagagcgagagtgacggaagccaatttgaactacgtcggcagcgtgacaattgatgaagatttgctggatgctgtcggaatgatggcaaatgaaaaagtgcaaattgtgaataataataacggggcccggctggaaacgtacattattcccggtgaaaggggcagcggcgtcgtttgtttaaacggagctgccgcccgccttgtccaggttggagatgtcgtcatcatcgtgtcttatgcgatgatgtctgaagaggaagcaaagacccataagccgaaggttgccgttttgaacgagagaaacgaaatcgaggaaatgctgggtcaggagccagcccgtaccattctgtag

SEQ ID NO: 2793 - DNA, 867 bp, Bacillus licheniformis
atgattcagatctatacagcaaaagatatacaaaacttaacgaaaaattaccgcaaggaaggcaaaaccatcggttttgtgccgacaatgggcttccttcatgaaggtcatatgtcgctagtagaaaaagcgcgaaaagacaacgatattgtcgtgatgagcatttttgtcaatcctatgcagttcggtccgggagaagactatgaagcgtatccgagagatattgaaagagaccgtcagcttgcggccggctcaggagtggacgtcttgttcactcctgagcctgaagaaatgtacggccaggagccgacggttaccgcaagcgtgaaaaagcggacggatgtcctttgcggccgttcaagagaagggcattttgacggtgtcgcaacagtgctcacaaagctgttcaatctcacgtctccgacaagggtttatttcggcatgaaggatgcccagcaggttgccgtcgtcgacgggctgatcaacgactttttcatggatatcgagctgatccctgtcgaaacaaaacgggaagaagacgggcttgccaaaagctcaagaaatgtcaatctgcgagctgaagaacggcaggaagcaaccgctctttaccgagctcttcagcgcggcgccgagctgatccgcaatggagagagagacccggaggccgttaagcgggagattcggagcattctggaaaaaacgagcggtgttattgattatgccgatatttattcatatcccgatctggagatcagggatccattgactggaaaagtcatcatagcggttgccgttcagttttccaaagcccgcttaattgacaatatcatcgtcgatatcccggcagatcaaaaggaggatttgtga

SEQ ID NO: 2794 - DNA, 834 bp, Bacillus licheniformis
atgaagacaaaaactgactttctaaaaatgaaacaagagggagagccgatcgtcatgctgactgcctacgattatccggcggcaaagcttgccgaacaggccggcgtcgatatgatccttgtcggcgattcactcggcatggttgtactcggccttgactcgaccgtatctgttacggttgctgatatgatccaccatacaaaagctgtcaaacgcggggcaaaagatacgtttgttgtgacggatatgccttttatgtcatatcactgctctttggaaagcgctctgaaaaatgccgcggcgatcgttcaagaaagcggggcagatgctttgaagcttgaaggcggcgacggtgtgtttgagacgatcacggctttaacacgcggcggaatacctgttgtcagccatttaggcttgactcctcaatccgtcggtgttttgggaggctataaagttcaagggaaagatgaagaaagcgccggcaagctgattgaagacagcaggcgctgtgaagaagcaggcgcgatggcgctcgttctggaatgcgtcccggcagcgctcgctgaacggatttcaaaggagctcacaattcctgtcatcggcattggagcaggtgctggcacggacggacaggttctcgtttaccacgatgttgtcggacacggagtaagccggacgcctaaatttgtcaagcagtatgcacaaatcgaccagccgcttgaacaagcgcttcggggatatgttgaggatgtcagaagccgcgtgtttcctgaagatgctcattcgttccgtatagatcagcaagttcttgaaggattatacggagggaaatag

SEQ ID NO: 2795 - DNA, 141 bp, Bacillus licheniformis
atgattcttgccgaacacggacgatacgaaatccttctccttgccggaaggtttttttgctgtccgaaaagatgcagatgcaagcacggcagctcatctcctctgaaaaagaggaggagaaaacatgaagacaaaaactga

SEQ ID NO: 2796 - DNA, 984 bp, Bacillus licheniformis
atgcagtcaaatttaagaaagaaactcattcaattgtttaccgaggcagacggcgaattcatttctggccagaaaatcagcgaagagctcggatgctcaagaaccgccgtttggaagcatatcgaagatctgagaaaatcgggatatgaacttgaagcggtccgaaagctcggctataaaatgataaaaaaacccgacaagatcactgaagatgaaatcaggctcgggttaaaaacgaaaaaaatgggacagacgatccattttcaggatgtcgtttcatcaactcaaaaaatcgcccacgaacttgcaaacaacggtgcgcccgaaggaacgatcatcgttgccgacaagcagactgaaggaagaggaagaatggcgagagcatggcattccccggaaggaaacggcatttggatgagcatcattttaaggcctgaaattcccgtgcaaaaaacgccgcagctgacgcttttagccgctgtagcgatcgttcaggcaatcgaagagcaaaccggcatcgcagccgaaattaaatggccgaacgatattttgatcaacggcaaaaaagtggtcgggatcttaacggaactgcaggcggaagctgatcaggtccattccgttattgtcggaacggggatcaacgtcaatcagcttgcagccgactttccggaggaattacaagaaacagcgacaagccttcgtctcgcaagcggtgaaaaaatcgacagagcggctttggtccaaacaataatgtcgacgtttgaaaaaaggtatgaagactatctcgcctacggttttgaaccgatcaagcttttgtgggaaagctatgctttgaccctgaaccgcgaattgacggcccggacgctgaacggaacgtttcacggcaaagcgctcggaatcaacgaagaaggcgtattgatcctggaaacgagtgacggcatcaaaaaaatatactccgctgatatcgatattaatccgtcatag

SEQ ID NO: 2797 - DNA, 1194 bp, Bacillus licheniformis
atggaggatctctttttgaaggctcttcctctccttcgtgagctgaaaaaacacggctggcaggcctactttgtaggcggagccgtcagggatgcccaaatgaacagagatgtcggcgatattgatatcgctacagatgcatccccggaagaaatcgaagccatttttccgaaaaccgttgatgtcggaaaggaacacggaaccatcatcgtcctctttgagggagaatcctacgaggtgacgacctttcgcgcagagcttgaatatgaggattacagaaggccgagcggcgttcagtttatcaaatcgctgaaggaagacctgaagaggcgggatctgacgattaatgcgatggcgatggatgaagaaggcagactgatcgactatttcggcgggctccgcgacatacgggaaagattgattcaaacggtcggcgacccggcggagcgttttcacgaagatgcgcttcgcatgctgcgggcgctccgttttatgagtcagctcgagtttgagctttctccaaatacaaaaaaagcgatttgcgaaaaccgtccgctcctggcccatatttctacagagcggaaaacggttgaattcgaaaaacttttaaaaggaaaagcagcaggccgggctctggaagcagcggctgaaacagggctttacaaggagcttccggggctggacggcaaaaaggagcgcgttctggctgcccgagcttttcctttttatcaacttcaaaaaagtgccgatatatgggcggctttcattcacatgatatcgatcaatcccgctgaagcgcaccggtttttaaaagggtggaagcttccggggaaagtcatcagacaggcgctccatacggctgaacggatcgatcaaaaatgggatgccgtctcgatgtatgaggcgggggaagagacgctgctggccgcatctgccattcgcagcttgagggacaagcaggcaatcgatgaagagcagctggctgaaatcagacagtcgtaccaggcgcttccgattaaaagcctgaaagacctggcggtatctggaagcgatctgctgaatttcagaaagaagccggccggaaaatgggtgtccgatgatttgaaacggattgagcgggccgtgttaaacggggagcttgccaatcaaaaaaaagccatagaggagtggctggattcatgcagtcaaatttaa

SEQ ID NO: 2798 - DNA, 1182 bp, Bacillus licheniformis
atgaaacagttaaaaatcggaatcacatgttatccgagtgtcggcggatcaggaattatcgccaccgagctcggcaagctgcttgcggaaaaaggacatgaaattcattttattacatcaagtgttccgtacaggctcaataaagtgtattccaacatctattttcacgaagtcgaagtcaatcaatatgccgtttttaagtacccgccgtatgatttggctttggccagcaaaatggcggaggtggcaaagcgggaacagcttgatgttctgcatgcccactacgcggtgcctcacgcgatttccgcttttttagcgaagcaaatgctgaacggaaacattaaaacggtcacaacgctgcacggcacagatataaccgtgctcggctatgatccgtctttaaaagacctgatcaagtttgcgatcgaatcgtctgaccgcgttaccgcggtttcttcggctcttgccgcgcaaacgtatgatttgatcaaaccgaacaaaaaaattgaaacgatctataattttgtggatgagcgcgtgtatttaaaaaaacaggagcatcattcgctgaaagagcagtacggcattgcacctgatgaaaaagtgatcatccacgtatccaatttcagacaggtgaagcgcgtacaggatgtcatccatgtattcagccgcattgtcaaacaaatgaaatcgaagctgattctcgtcggcgacgggccggaaatgaccgtgatctgccagcttgtcagacagctcggattaaaagacgacgttcttttccttggcaaacaagacagcgtagaagagctttacgccatcagcgatttaaagctgcttttgtccgagaaggaaagcttcggtttagtgctgcttgaagcgatggcctgcggcgttccgtgcatcggcacaaatatcggggggattcccgaggtgatcaaaaacggagtatccggttacttggtcgatgtcggagatattgaaggtgcagctagtaaggcgcttcatttactgactgatgaaagcctgcagcgccagtttgcggaagcggcgctgcaaagcatcaaggaacgcttttcttccaacaaaatcatcgcgcaatatgaagaaatttatcaacaattaacagactgggagtgtgacaatggaggatctctttttgaaggctcttcctctccttcgtga

SEQ ID NO: 2799 - DNA, 702 bp, Bacillus licheniformis
atgcttgatatacttgctttcggtgcacacagcgatgatgtagaaatcggcatgggaggaaccattgccaaatatactaaaaaaggctttcaaattggaatctgcgatttaacccaggctgaactgtcttcaaacggaacagtcgaaacgagaaaaagcgaagcggcgctggcggccgaaattctcggcgccagtccgcggatttccctcacgctgccggacagggggctgtttcccagccaggcggcgatcagggacgttgttgccgtcattcggaaacataaaccgaagcttgtctttgtcccttatccaaaggaccggcatcccgatcacgggcacgcagcggaaatcgtcgaagaagcggtcttttccgctggtatacataaatacgaagatgcagaaaaacagccggcccataaagtccaaaacgtgtactactatatgatcaacggttttcacaaacctgagtttgtcatcgacatttctgaaacgatcaatcaaaaaaaggatggccttgctgcttatcagagccagttcacccgttcccggcagtcggttgaaacaccgctgacaaacggatatattgaaacggtcgaagccagggaaaagcttttgggaaaagaggtcggcgtcgcatacgcggaagggtttttttcaaagcggactcttctgttaaacaacgatttatttgggggcggatga

SEQ ID NO: 2800 - DNA, 414 bp, Bacillus licheniformis
ttgaaaatcgccttaattgcccatgaccgaaaaaaacaggatatgattcagctgacgaccgcttataaagacattttaaaaaagcatgagctgtttgcgacaggaacgaccggtttaaaaatcactgaagcgacagggctgcccgtcgtgcgctttcaatcggggccgcttggcggtgaccagcagatcggcgctttgatcgcgaaaaatgacatcgatcttgtgatttttctgagagacccgctgacggcccagccgcacgaacctgacgtgtcagcgcttatccgcttgtctgacgtttatgccattccgctcgccaccaacatgggaactgcggaaatcttgatccgttctgtcgaggaaggcgcgtttgagttcagaaacattgtccacggcagggatcgcgatgcttga

SEQ ID NO: 2801 - DNA, 804 bp, Bacillus licheniformis
atgcaaaaggataccattaaaatcgcaatagcaggaccgcgcggaagaatgggaagcgaagcggtcaaacttgttgaagataccgcacattttgaacttgtcggtgcaatcgaccgtacatataaccgtgaaaagctgtcagatgtgatgacgtcaagttcagatgctgtcatttacaccgatatcacggaatgcttttcagaaacgtctccggatgttctgattgatttgacaacgccggaaatcggcaagctacatacaaaaatcgcgttggagcacggcgtccgtcctgttgtgggaacgacaggattttctgagagcgacttgaacgagcttatggaactgaccgatgagaagggaatcggagctatcatcgcgccaaacttcgcgctcggagccgtgctgatgatgaagttttcgcaaatggctgccaactattttaccgatgttgaaatcattgaacagcaccatgatcaaaaacttgacgcgccaagcggaacggccttgaaaacggcggaaatgatttcggctgttcgcgaagcgaaaacgcaggggcacccggatgaaaaggaaattctgccgggagcaagaggcgccgatcaaaacggaatccgtctccacagcgttcgtctgccgggattgattgcccatcaggaagtgatgttcggcggagacggccaaaccctgaaaatccgtcacgattcatacaatcgcgcatcttttatgtctggtgtgaaactggctgttgaacaagtgatgaaaatcgatcagcttgtctacggccttgaaaatatcatagagtaa

SEQ ID NO: 2802 - DNA, 339 bp, Bacillus licheniformis
atgacgaaagaaaaaacgatgaaagatatacagcgtgaagtcgacgaatatatcggccagtttaaagaaggctatttcagtccgcttgccatgatggccagactgacggaagagcttggcgaactggcgagggaaatcaaccatcattacggagaaaaaccaaagaaaaaaaccgaatcggaaaaaaagatcgaagaagaaatcggcgacgtattgttcgttttagtttgtcttgcgaattcgcttcatatatcattggatgaagcgcatgatatggtcatggagaagttcaacacccgtgataaagatcgctggacaagaaaagaagaaggaaagtag

SEQ ID NO: 2803 - DNA, 873 bp, Bacillus licheniformis
atgttcggagacatcagaatgaagaacgtcctgtttattttagcaggcgccgctgttttttcctttggactcgttcattttaatatgcagaacaacttgtcggaaggcggttttaccggcattaccctgctgctttatttcctgtttaatatcgatccttccatatccaatctggtgctgaacatcccggtcttcttcatcggctggaaactcctcggcagaacggtcttctcatacaccattctcggcacagtcagcctgtcggtgtttttatggatttttcagcgcttccagattcatatgccgcttcaaaacgatcttgcgctcgcggcactttttgcaggcgtgtttatcggcaccggattgggcattattttcagatacggcggaacaacgggcggcgttgatattatcgtgcggctgatcaacaaatattttcaagtgccgatgggcaaagccatgtttgtgtttgacgcctgcgtcattacattatcccttattttttacctttcctataaggaagcaatgtacacgcttgttgccgtatttgtcgcctcaaaggtcatcgactttatgcaggaaggcggttatgccgcaaaaggcgccaccatcatctctgaaaagaacgaccagattcagcgcaaaatcattgaagaaatggaaagaggcgtcacagttttaaaaggtcaagggtcttatacgaagacggagcgggacattttatactgcgtcgttccgaaaaatgaggttttccagctgaaaaatgtgattacttcggtcgacccgcacgcttttgtagccgtaagcgacgtacacgacgtgctgggagagggttttacgcttgatgagaacaaaaatcccatcacccgctga

SEQ ID NO: 2804 - DNA, 801 bp, Bacillus licheniformis
atgatacgaaaggtgatcctttgcatgatgcttgcgcttgtttttcctgcggccggtttgaaagcgaaagaatcatcggctttgcaggaattgacggaactgtcggatacggtattccagctaacaaggcagtctcaatatgaggaagcggtacaaattcttcaatactttgaaaaaaggctgaaagctgcggagaaagacgggacagaggatatgatgacaggctcggaaatccgccaggtcagtctggcctatcatgatacgctgaaaagtctggaaagcgaagaggtcgcacaccaggagaaatttaaagccgccgcccagtttagaatgctgatggacgccattgaatcagatcatgatccgctgtggagcagtttgaaaaagccgatcatggattctttcagcgctttgaaagccgggattcagaaagaagacaacttgacattcagggaaaagtggaatcattttttatccttgtatgatacgatttatccaagcttaacgatcgatgtttcgccaaagcagttaaaaagcgtctccaaccatattgcagtcgtggaaaacggaggcttccagcaaatgacggaaagcagcaagctggaaaggctgacgcttttggaaaaagatttggaagatgtgtttgatcaagtagaagaagatgatgcagacccttccctgctatgggtcatcctgacgacgggaagcattatcctctcgacgctgacatacgtcggtttcagaaagtataaagccgaagaggacaggcgcagaaaaagagaaaaagattggccgaaataa

SEQ ID NO: 2805 - DNA, 585 bp, Bacillus licheniformis
ttgaaactgatttcctacatgctcgctcaaaagccgatgcttctgctgcttttgatcattaatttcttcggtacggtttacgggtattattggtaccttccgcagctgacgaatacgccagcgaagtttctgatcttcgttcccgacagcccgacggcgaccttgttctttttattcgttctcatcggacttttattgggaaggaatgctccgctttttgaggcgcttgcgcttgttacgcttgtcaaatacgggctgtgggcggttgtaatgaatgttctcgtgcttgtggtgaccggaagccttcattggacggggtatatgctgatcgcgtcgcacttcgcaatggctgtgcaaggcgtgctgtacgccccgcatttccggttcaaagggtggcatttggcgcttgcggctgtttggacgctgcataacgatgccattgattacttgtttggaatgatgccgaattattctatgctcgatcaatatatgccgcagatcggctattttacattttggctcagcatcgcttcgatcggtttggcctactaccttgtcttgtcccgaaaagcttttaagctgtaa

SEQ ID NO: 2806 - DNA, 150 bp, Bacillus licheniformis
ttgatagagctgaagctgacggcaagtcagcctctcgggctgtcgacaatgtcgatggccttttcaattttgaccgctgctgacagtgaaccggcacggaagctggaaaggccgccgcttctcgacaggtgttctgcggtcaatctgtga

SEQ ID NO: 2807 - DNA, 768 bp, Bacillus licheniformis
atgaaaaggggaaaagggatgaagtttgtcggtgattcacggatcccggcggaaagaaaaccgaatattccaaaagattattccgaatttccagggaaaacggaagcgttctggccgaatttcctgctgaaagaatggatggtcggagcggttttccttgtcggttttctcgtgctgaccatcgtgcatgagcctccgctcgagcggatggcagatccgaccgataccggctacatacctttgccagactggtattttctatttctttaccaattgctgaaatacgaatatgctgccggaccgtatacggttgtcggcgcgattattatcccgacaattgcgttcggagcgcttttattggcgccgtttcttgacagaggccctgaaagaaggccgtttaaacgcccggttgccgtagggttgatgcttttggcgatttcagcgacggttttcttaacgtggcagtccgttgtcactcacgactgggccgctgctgaagagcagggtaaaatcaaggaagaggccgatattgatacgagtgcggaaggctataagatttatcaggagcagggctgtatctcgtgccacggagacaacatgcaaggaggagcggcaggcccgtctctcgttgacaacggcttgtctcctgaagagattgcgaaaatcgccaaggaaggaaaaggcgaaatgcctgccggcgtttttaaaggatctgacaaagagcttaaagaactgtctaaattcatctccgaaacaacggcgaaataa

SEQ ID NO: 2808 - DNA, 675 bp, Bacillus licheniformis
atgctaaacaaaatttatgactgggtggatgaaagacttgatattacgccgctctggcgggacatcgccgaccatgaagttcctgaacacgtaaacccggctcaccatttttcagctttcgtgtactgcttcgggggattgacgtttttcgtgacggtgattcaggtgctgtccggcatgtttttgacgatgtactacgttccggatattaaaaatgcctgggaatctgtttattatttgcaaaatgaagtggcgttcggacagattgtaaggggaatgcaccactggggtgcaagcttggtcatcgtgatgatgtttcttcatacgctcagggttttcttccagggggcttataagaagccgagagagctgaactggattgtcggcgttttaatcttctttgtcatgcttggtttaggttttacaggctaccttttgccttgggatatgaaagctctgtttgcgacaaaagtaggtttgcagattgctgaggcgacgccgctgatcggctcggaaattaaaacattgcttgccggtcatccggatattgtcggcgctcagacgttgacgcgcttttttgccatacacgtctttttcctgccagccgctctgttcggactgatggctgcacactttatcatgattcgcaaacaaggaatttctgggccgctgtaa

SEQ ID NO: 2809 - DNA, 507 bp, Bacillus licheniformis
atgagcgaaaaaagacatcgggtatccagacgtcagtttttaaactatacgctgaccggagtcggcggctttatggcggcggggatgctcatgcctatggttcgcttcgcgctcgatccggttttaaggccgactgaagatcaggacatggttcaggttgtcagcgttgatgaattgacaaatgaaccgcagcgcttcgattttaaaatcaaacaagtggatgcctggtacgaatcggaagaatcgagatcggcgtgggttttcaaaagtggggacgaaattgtagctttatcaccggtttgtaaacatttggggtgtacggtcaactggaacagcgatcctaaaaatccgaataagttcttttgtccgtgccattacggactttatgaaaaggatggtaccaacgtgcccggaactccgccgcttgctcctttggaccgctatgagcaagaggttaaagacggctacctttacttagggaaagccaagccgaggaaggatgggtga

SEQ ID NO: 2810 - DNA, 447 bp, Bacillus licheniformis
gtgaaatggaatacgcacgatgcggatgtttacttgaacgcgaaagaatacatcgatacagctgtcatccctttaatatcggttgatcttggagatcagtttaaatcggccgtatcaaaaggggaatttacgtctatacttgcagaagaactcgaaaggcagctgaagggcagaatctacctgtttccgccctgtacatatttagaagcggatgaaaaatcggcgcagcatatcgccgatttaaaagaaatggccgaaaaacattttcgccacatcgtttttttaacgacggatgaacgctggaagcagatgctcgacagcgagcaaaagctgctgtgggttccggcgattcctctcgaacatatgaaggattcgttaaagcagaagctgctggaagatcaaattgagcaaatattgaacattttgttacaatattggaactcttaa

SEQ ID NO: 2811 - DNA, 540 bp, Bacillus licheniformis
atgcagacccctgtttctgtcaatgaaaaaaaagattttatccgctggtttctcaaccattatcagctgaaacgaagagagtgtgtatggattctgaattatttaatgagccatgactcgctgatggaaaaagtgcattttgtcgagcaggccgaattttgtccgaggggcattatcatgtctacccactgcgttgaggaagtgccttttcgtttttataaagaaaatgtcatgacgaccgatgcagaaaaatcatttcatgatatcaggctgaataagcagcaggatctctttatccagctgaacttccgctcagcctataattctccggaatatgcggctgtactcgaagccaatccgcatattccgaaagacctatatgaaaatgaaaaagataaaattgtcgctgaacagattttggagcattccattgccacttttcagagacaaaagctactgcgggaaatcgacgaagcgcttgaccgccaggataaagaaagcttcgaaaaactagctaaacaactgagccagctgcgataa

SEQ ID NO: 2812 - DNA, 1275 bp, Bacillus licheniformis
ttgaatacttctattcaagaagccataaaattagttgaagcaggccacccggaaagcggattgaaaaaacttgctgatatcgagtctgaccttcatgatgaagacaaagccatagtagcccagctgtattacgaatggggaattgtcgataaggctatcgccatcgtgactgacctccatgaactgtatccggatgaaacagaactgacatgcttttatgccgaactcctcatcgaaaccgatcaggaagaaaaagcgctcagcgtgctcgaaacgattccggaaacagacgaggcgtacccgcagtgcctgcttttaatggctgatctctatcagatgcagggtctgtttgaagtcagcgagcaaaagctgttaaaggcgcaagccattttgccggatgagccggttatcgattttgctttgggagagctgtattttactcagggagcttacggcaaagcggtccgtcaattcaaaaaagcggccgaagaagaagccgtcatcggcggcgtcaatgtgtaccaaaggctggcggaatcattaagttcatccggagcgtttgaagaagcgcttgaatggtatgaaaaagccgtcaaggagaaccccgagcccaacacactgttcggctttggttttacggcactgaaagcggggtatcctaaaactgcgattaaacagctgacagagctgaaggaaatggatcccgcttattcttcgctttacaagcctctggccaacagctttgaaacagaagggctttatgaggaagcattcgaaacggcaaaagaaggaatccgtgtcgatgaattcaacaaagagctttatctttctgctgcaaaagcagccttaaaaacgaaaaggcattcggaagcgaaggagctgcttcgtgaagcgctggcgctggatcccggatatctggaagccgttcatacactgcttgccctgtttcttgaagaagaagacgatgagagcatcattgaactcgttcgggaagtgcgcaaatacggagaggatgatccgaagttcagctggcatctggcatcggcgttcgcccggaccgaagcgtacgacaaagcccgcgaggaatatgagaacgcatttttgcactatcgggatgacgccgatttcctttacgaatattccatgtttctgcttgaagaaggacggcggaaagaagcgctgcctctgctgaaaaaactggcagagctcgacccggcaaacgaggaagtccaggagacgattttcagaatcgaagatgaaaattcctttgaataa

SEQ ID NO: 2813 - DNA, 165 bp, Bacillus licheniformis
ttgtgctcaggctttttctgcccggaaaatcatgaaagccgggcatttgctcataaaacgaatgttttcggcatagcttgtcttaacagaatcaatctgcttccatacagctgtgcgggcaacatatttgccggaaaccgccgcgtgaattatgatagtaagtaa

SEQ ID NO: 2814 - DNA, 1287 bp, Bacillus licheniformis
atgaaaagaggaaaaatcagttcactaaagggagagcttcatattccgggagataaatccatctcccatcgttctgttatgttcggagccatggcagaagggaaaacggtcatcaaaaactttttgccaggagccgactgcttgagcacgatcgcctgctttcggaaaatgggtgtcgaaatcgaacagaatggcagtgatgtcaccgtccgcggcaaagggctcgatcagctcgctgagcctgccgagctcctcgatgtggggaattccggaacgacgatcaggctgatgctcggcattttggcggggcgtccgtttcacagtacggttgccggcgatgagagcatcgccaaaaggccgatgaagcgtgttacagaaccgcttcgaaaaatgggggcgaaaatcgacggccgcgccggaggggaatacacaccgctttctgtccgcggcggacatctgaaggcgatcgattttcagtcgcctgttgcaagtgcgcagatcaaatcggccgttctgcttgcgggtctgcaggccgaaggcaccacaacggtgacggagcctcataaatcaagagaccatacggaacggatgctgtctatgttcggcgtcagccttcgggaagatgaaacgagcgtgtccattgagggcgggcagcagctgaaagcagcagaagtctttgtgccgggtgatatttcatcagctgcgtttttcctggcagcagcatcgcttgttcctggcagtgaagtcgtgcttcgcaatgtcggactcaatccgaccaggacgggaatcatcgatgtcttgaaagaaatgggagccgatcttgaaatcgaagaaaaggacacaggaaataccgagccgtacggcgatctgagaatcaaaacgtcctctttgaaggcagccgaaatttcgggcgatttgatcccgcgcctcatcgatgaaataccgatcatcgcgcttctagcaacacaggctgaagggacgacggtcattaaagatgcggctgaactcaaagtaaaagaaacgaaccggatcgataccgtcgcctcagagctgaaaaaaatcggtgcgaacatcgaaccgacggaagacgggatgaagattcacggcaagacgcctcttacaggcggcgcgaaggtctcaagccatggggaccaccggatcggaatgatgctggggatcgccgcctgcatctgcgagcagccgatcgacatattacagcccgaagctgtgagcgtctcatatccttcattttttgaacatatcgaaaagcttgcagaaaaagcctga

SEQ ID NO: 2815 - DNA, 1116 bp, Bacillus licheniformis
atgactcaaccgaatgaaacgattttgttggccggtttgggcttaatcggcggttcgatcgccctggccatcaaaaaggaacacccgggcaaacggattatcgggtttgacgtgtcagaagagcaggcaagggctgcacaaaagcttggcgtaattgatgctccggccgcttcttttttagaaggggtgaaagaagcgtcgactgttttcttagcggcgccggtcgaacagacgcttcacatgcttgatgagcttgccgcttcaggcatcaagaaaaagctgctcattacagatgtcggcagcacgaaacaaaaggtcgtcagccatgccgaaaaagtgctgccggatgactacaggtttatcggaggccatccgatggcaggctcgcataaatcgggcgtcgctgccgccaaagacttccttttcgagaacgcgttttatattttgacgccatccggctccgccggcaaagaagcggttgcttctttaaaagatctgctcaaaggaacaaatgcaaagtttgtggaaatgtctcctgctgaacatgacgctgttacaagcgtgatcagccattttccgcatatcgtggcggcgagtctcgtccaccagaccgtcaaattcgaagatcagtacccgctcgtcaagcgttttgccgcaggaggcttccgcgatatcacgaggattgcctcaagcagcccggcgatgtggcgcgatattctcttgcacaataaagataaaatattggagcggtttgacgaatggaaacaagagctggacagaatccagtcttttgtcgaaaatgaagatgcagacgggctgtttgaattttttcggcaagccaaggaataccgcgacggtctgcctttgcggcaaaaaggcgcgattccttccttttacgatctttatgtcgatgtcccggaccatccgggggttatttcggaaattacggcgatcctcgccgacgcgcaaatcagcattacgaacatccggattatcgaaacaagggaagacataaacggtgttctcagaatcagctttcaatccgatgaagatcgaaaacgcgccgaaaaatgcatccaaacccgcgcaaaatacgaaacattttatgctgattga

SEQ ID NO: 2816 - DNA, 1086 bp, Bacillus licheniformis
atgttgcaaattaaagaacagttaaaacaattaacgccttaccagccgggcaaaccgattgaagaggtcaaaaaagagttcaacctcgaccgggtcgtcaagctcgcttcaaatgagaatccttacggctgttcagaagcggcaaaggaagccctccagattgaggtgcagcaaatggctctctatcctgacggctatagtgcggcattgagaacaaagcttgcctcccatctcggcgtaaatgaaacgaacatcatcctgggaaacggaacggacgaagtcattcaaattatttcccgttctttgttggaccctgcctcaaacactgtaatggcgaatccgacattttcacaatacaagcacaacgctgtcatcgaaggagcggaagtcagagaagtcggcctgctcgaaaacggctgccacgaccttgatgcaatgctgaaggcgatcgatgaacagacgaaggttgtctgggtttgcagcccgaacaatccgaccggaacgtatgaatccggccgcaacttgatccgtttccttgaaaaagtgccggaacatgtccttgctgtcgttgatgaagcttattacgaatacgtaacggctgaagactaccccgagaccatcccgcttctggagcgctttccgaacctgatgattctcaggacgttctcaaaagcctacggtttggcgtctttaagggtgggctacgggattgcttctgaacagctgattcaggcgattgagccggcgagacagccgtttaatacaaaccggctcggccaggcggccgcgcttgccgccctcggcgatcaggcatttatccacgactgtgtgagaaaaaacaatgaagggctcaaacagtactacgatttctgtgatgagcacgggctaaattactatccttcacaaacgaactttgtgctgattgattttaaacgggatgcagacgaacttttctcagagctgctgaaaaaaggctatatcgtcagatccgggaatgcgctcggctttccgacgttccttagaatatcggtcggtacgaaggaacagaacgaaggctttttgaaaacgttagccggcatgttgtaa

SEQ ID NO: 2817 - DNA, 804 bp, Bacillus licheniformis
atgttcaatctgaaaaaacagccgtccgataagctatttgttccgtttattacagcgggagacccgctgccagaaatctcgatcgagctggcaaaatctcttcaagaggcgggagcgtccgcccttgaactcggggttccgtattctgatccgctcgctgacggcccggtgattcagcgcgcatcaaaaagggcgcttgacaacgatatgaacatcgtaaaagcgatcaggcttggcggtgaaatgaaaaaaaacggcgtccatattccgattattctctttacgtattataatcctgtgttacaattagatacagatcactttttcgctttactgcgacaaaatcagctagacggactccttgtaccggaccttccttttgaggaaagcgtatatttgcagcaacagtgtaaaaaacacgggattacctatatttcgctggtcgcgccgacaagcgaatcgcgcattcaaaaaataacgcagcaggcggaaggttttgtgtattgcgtttcttcgctcggtgtcacaggtgtgcgcaatgaattcgaagattctgtttcttcatttatcaggtctgttaaaggaatgagctccgtcccggttgccgtcgggtttgggatttccagctccaaacaagtggagatgatgaatgaactggcggacggcgttgtcgtgggaagcgcccttgtcagaaagatcgaggagctgaaagacgaactcgtcgcccctgagacaagggaacaagccttaaaggcgtttgaggcatacgctaagacatttagcggatcgtacatggtaaaatga

SEQ ID NO: 2818 - DNA, 1227 bp, Bacillus licheniformis
atgtattcatatccgaatgaacaaggcaggtttggtgattttggcgggaaattcgtcccggaaacactcatgcagcctttggaagaaatcgaaaaagcgtttcttgaactgaaagacgacccttcatttcaaaaggattatcaaaagcttttaaatgactactcaggcaggccgacggctttgacgttcgcagaccagctcactaagcagctgggcggagcgaagatttacttaaaaagagaagatttaaaccatacaggcgcccacaaaatcaacaatgccctcggccaggcgctcctggccaagaaaatgggaaaaacaaagctcattgctgaaaccggtgcaggccagcacggtgtggcggcggcgactgtcgccgcgaagttcggcttatcatgcatcgtcttcatgggggaggaagatgttgccagacaatcgctgaacgtgttccggatgaagctcttgggagcggaggtcgtcccggtgtcaagcggaaacgggacattaaaagatgctacaaacgaagcgatccgctactgggttcagcattgccaggaccatttttacatgatcggttccgtcgtcgggccgcatccgtatccttatatcgtccgcgaatttcaacggatgatcggcgaagaggcgaaagcgcagttttatcaattggagcaaagcctccccgataaagttgtcgcctgtgtcggaggcggaagcaatgcgatcgggatgttcagcgcgttcattgaagaaactgttgaactgatcggagtcgaagctgcgggaaaaggtgttgacacacctcttcatgcggccacgatcacaaagggtacaaaaggcgtcatccacggttctttgacctacttgattcaagacgagtacggacagatcatcgagccttattccatctcagccggacttgattatccgggagtcggccccgagcacgcccatcttcatcaaacagggcgcgtcacgtatgaatctgtcacagatgatgaagcggtctcggcattaaggctgatgacagagactgagggcattttgccggctattgaatccgcccatgcattggcaaaagcatttgaaatcgctaaagaactgccgagagagaaaagcgttctcgtctgcctttcaggcaggggagacaaagacgtccataccttgatgaaggtgttggaagaagaggtgaatcaagatgttcaatctgaaaaaacagccgtccgataa

SEQ ID NO: 2819 - DNA, 657 bp, Bacillus licheniformis
atgaagaaaccgagtctaaaatattgcgggattcattcattggaagatttaaaggtgacagcccgctcgaaagccgattatctcggatttattttcgccgaaagcaaacggtcggtagacccggcggatgtgaaacggtggtgcggcgaaacggatacgccaggtaaaaagcttgtcggcgtttttgttaatgaaaacatgagccgaatggctgaaatcgtaaaagatgcaggcttggacgtgatccagcttcacggagatgaaacggcggcagacatcaagcggcttaaaagcatgacagactgcgagatatggaaggcgctccctcacgggaatgataccgtacagagcatggcttctttcgcaccttacatcgacgggtatgtcatcgactcgtctgtcaaagggatgagagggggaacgggtgtttcgttttcgtgggacagcgtcccgctgtatatagatgcagcccaaagagaaggcaagcgcctgtttatcgccggaggcgtgaacccggacacaatcgcagatcttttaaagcggcgtccgccgggaatcgacttggcaagcggaatcgaagaaagaggcagaaaaagcgaaaagctgatcagccttttagaagaaaggatgttcgaacatgtattcatatccgaatga

SEQ ID NO: 2820 - DNA, 759 bp, Bacillus licheniformis
atgcttaatcaaattattgatagaaaacgagaagacatcctaaagatcaagctgccggaagatttaaaactgccaaagcggtcatttaaaaaagcgctcctttctccgaaccggtttgtcgctttaattgcggaggtgaaaaaagcttctccgtcaaaaggcgtgattcaggaggattttgagcccgtcaagatcgcaaaacaatacgaacaggctaaagccgattgtttgtctgttctgacagatacacctttttttcaagggaagaacagttatttgtcagatgtgaaacgctcggtttccctgcctgtgctgcgcaaggattttatcattgattccattcaggttgaagaagcggaccgcatcggagcggatgcgatcctgctgatcggtgaagtgcttgaaccgcaaaagctgtttgaactctatcagcaagccgttgaaaaaggcatggatgtgctcgtcgaagtacatggcgaagagacgcttgagggcattttaaatgtctttacacccgaaatcatcggcgtaaacaatcgaaatctaaaaaactttgaaacgaccgtcggacaaacggagcgaatggcgaaactcgttccgccggggaccgttctcatcagcgaaagcggcatcggaaaatcggaagacctgacttttgtaaaaacgtgcggagcccaagccgtgcttgtcggcgaatcgctgatgagagagacgtcacagctgaaggctgtctatgcgttattcggagaggacggctga

SEQ ID NO: 2821 - DNA, 1017 bp, Bacillus licheniformis
atgaacgaactgctgaaatcatgcgttaacggacggacactgaatgaaaccgaggcacacagcatcatgcgcgacatgatgaccggctcgctgagcgctgcggaaatcggaggcctcctgtccgttctcgcctacaggggagaaacggctgaagagattacgggatttgtcagagccatgcgggagcaggcgcatacaatagacggaccggagcatgttgttgatacgtgcggaaccggaggagacggaagctccaccttcaacatttccacagcggctgcgatcatcgcttcatcagccggggcaaaaatcgcaaaacacggtaatcgatccgtttcttcaaaaagcgggagcgctgacgttctcgaatatctcggcgtttctattcagacgtcgcctgaagaaacgattaagagcattgaacgccgaaatatgggattcctgtatgcgccaagctatcactcttccatgaagcacgtggcaggcgcgaggaaggatctggcttttagaaccgtattcaatctgctcggcccgctcagcaacccgatgaaggccaaacgccaggtgatcggcgtctactcgatcgaaaaagcaaagcttatggcccgcgctcttgaagcgtttgaaccggagcacgtattgtttgtttcgagccgggacggtcttgatgaactgtcgatcacatcgccgacagatgtaattgaactgaaaggcggcaaaacatacgaatacaccgtcgagccgggcgatgttggactgcctctcggaaggctgagagacattcaggtggcgacgcctgaagaaagcggccgtctgatcgtcgatattttgaaaaaccgcggtccggactcggctgttcatatcgcagcgtttaatgccggagccgctttatacgtcgcagaacaggcagcggatttaaaagagggcgttgcgctcgctttagaagctgttgctggcggtgaagcgctcaatcagctggagcgattaaaacagaaagaggaagagttgtatgcttaa

SEQ ID NO: 2822 - DNA, 1548 bp, Bacillus licheniformis
ttgagtctgcaaaccgattttgcctctttttcagaggatacttcacactttaaaacgataccgattattgagagtttttccgtcgatacgctgacgcccgttcaattggtcgagaagctgcaggaagacatcgtctatttgctggaaagccaggatgaaacctctgcatggtcaagatattctttcatcggccttgacccctttttgacgatcaaagaagaacgcggccggtttcacgcctgcgatcaaaagcagaagaagctttattcggcttcacagttaaaagacgttctcgaatggatgtcggagacgtattcgatcaaagcgcctgagctcgacatcccgtttacagggggagcggtcggctatttaagctatgatttaatgccgctcattgaaccgtccatcaaagggcacagcaaagaaacggaaatggcaaaatgcctcctgtttgtctgccggacgatgatcgcttatgatcacgaactgaaaaagctgcatttcatccactatacaaggcttgaaggcagtgaaaatagggaggaaaagcgccgcattttcaaaaaggggaaagaagagctcaagcagcttacacaaaggctgtcagaccggaaaacgccgaaagagctgtttctcccgcaaggacggcacacggcccccagctttgaagggattcaatcaacatatgagaaatcccggtttttggccgatgtcgatcgcttgaaagaatacattaaagcgggagacatttttcaaggcgtcctttcgcaaaggttcgacattccggtgaaggtcggttcttttgagttatacagagtgctgagaatgatcaacccgtccccgtacatgtactacatgaggcttcctgaccgcgatctcgtcggaagctcgcccgaacgtctgatccatgttcaaaacggccatcttgaaatccatccgatcgccggcacaaggaaaaggggcggtgatcaggctgaggataagcggcttgaaagagaactattggctgatgagaaagaaaaagcggagcattacatgcttgtcgatttggcgagaaatgatatcggcagagtagctgagtacgggtctgtccaagtgcccgagtttacgaaaattgtttccttttcgcacgtcatgcacatcatttcgatcgtaaccggcactttaaaagcgggtgtccacccggttgacgctttaatgagcgcatttccggccggaactttgaccggcgctccgaaaatccgcgcgattcagcttttaaatgagcttgagcccgaaccgagggaaacatacggaggatgcattgcttatatcggatttgacggaaatatcgattcgtgcatcacgatccggacgatgagcgtgaaaaacggagtggcgtccattcaggccggggcgggcatcgtagccgactccgtgcctgaaaaagaatgggaagagacctgcaataaagcaggggctctgttaaaaacgattcaaatcgcagaagaaacgtttctcgaaaagggggaggacggcaatgaacgaactgctgaaatcatgcgttaa

SEQ ID NO: 2823 - DNA, 384 bp, Bacillus licheniformis
atgatgatgcgcgggattcggggagcgacgaccattgaccgggatacagaaaaagacattacggagcggacgaagcagctgatcggaaaaatgatcgatgaaaatcgactcaaacctgaacaagtcgtacagatcttaatttctgctacttccgatatacacgctgcttttcccgcgaaggtcgtcagaacgtttgacggctggcagcatgtgcccgtcatgtgcatgcaggaaatggatgttgaacacggccttaaaaaatgcatcagagtgatgatgacggttcagacggatatgcggcaggatgaagtccgccatgtttatttggaaaatgcagtaacgctcagacctgatttatcattgacaaaaaatactgaattgtaa

SEQ ID NO: 2824 - DNA, 1089 bp, Bacillus licheniformis
atgaaatcacttcaaatcgaaaccgcttctttgtcctacccggtattcatcgggggaggcattagaaaaaacgcggcagagcttttgtcatccttgaaccttccgatgacgaaactgcttttgatcactgacgaagaagttgataaacgctatggagaagagctgttcagtcttctccgcagcaaatggcccgtcaaaaaggttgcggtgccaagcggcgagcaggccaaatccatcgatatgtttatgaagctccagacggaagccattcaatttcaccttgaccgctcgtcatgcattgtggcgctgggcggaggtgttgtcggcgatcttgcaggattcgtcgcttcaacttttatgaggggcatcgattatgtgcaattcccaacgactctgctgtctcatgacagcgcagtcggagggaaagtggccattaatcacccgctcggaaaaaacttaatcggcgcttttcatcagccgaaggcggtggtatatgacaccgaatgcctgagcacgcttccggaaaaagaaatgcgttcaggtcttgcggaagtcattaagcacgcatttatccgtgatgaatctttcttgaacgaattgcttaaacttgattcaatagaagcgattacgaccggccagctcagtgaaatggtttacaaaggcatttcgattaaagcggaagttgtctcacaagacgaacgcgaacagggaatcagggcctatttgaacttcgggcatacgcttggccacgccgttgaagccgaatacggctacggagagatcacccatggcgatgccgtcgctttaggcatgcaatttgctttgtttgtcagcgagaaggtgctgaattgtcctgttgaccgtacgaaaatcgccgcctggctgaaaaatctcggctatccggaaagcgtgaaacgcgaagtttcaacagaagcccttatcaatcgaatgatgaacgataaaaaaacacgcggaggcatcattcagtttgtccttctggataagatcggcagtgtgcggctgcactcctttaaagccgaagaaatcgaacgatggctgaatatgtggagattggagggagacaaatga

SEQ ID NO: 2825 - DNA, 1173 bp, Bacillus licheniformis
atgaggtatttaacagccggtgaatctcacggtccgcagcttacgacaattatcgaaggagtcccagcggggctttatatcacaaaagaagacatcgattacgagcttcaaagacgtcaaaaaggccacggccgcggacgccggatgcaaatcgaaaaagaccaggcgcggatcacaagcggtgtaagacacgggcgttctcttggatcgccgatcgctctcgtcgtcgaaaacaatgactggaaacactggacgaaaatcatgggttcagagccgatcacggctgaagaagaaagcgaaatgaaacgacagatttcaaggccgagaccggggcacgccgatttgaacggcgcgatcaaatacgggcacagagacatgcgcaacgtgcttgaacgttcatctgccagagaaacgaccgtccgtgtagcggcaggagccgtcgccaaaaagatcctttcccagctcggcattcaagtggccggccacgtgctggagatcggcggagtaaaagctgaaaaaacaaattacgaatctatcgaaaacttgaaaaaagtaaccgaagagtcccctgtcagatgctatgacgaagaagcgggcaggaaaatgatggacgcgatcgatgaagcaaaagcaaatggggattcgatcggcggaatcgtcgaggtgatagttgaaggggtgccggtaggagtcggcagctatgtccattacgaccgaaaactcgacagcaagcttgcagccgccgtactgagcatcaatgcttttaaaggggttgaattcggcatcggctttgaagccgcacgcaaaaacggcagtgaagtccatgacgaaatcatctgggacgaagaaaaaggctatacgcgggcaacaaaccgtctcggcggtctagaaggcggaatgacaacgggaatgccgattgtcgtcagaggtgtgatgaagccgattccaacgttatacaaaccgcttaaaagcgttgatatcgagacaaaagagccgtttacagcgagcatcgagcgttccgactcctgcgctgtccctgccgcaagcgtggtggctgaagcggttgttgcatgggaaatcgcaaatgcgatcgtcgagcagtttggcgttgaccaaatggaccggatcgctgaaaatgttgagaaaatgagaaagcttgcgagggagttttaa

SEQ ID NO: 2826 - DNA, 768 bp, Bacillus licheniformis
atggacaattacagtttcttcgttgataaatggaaaaaaatgactggtgtggatttggcattgtacaaagaggcgcaaatgaaaagaagactgacgtctctatatgagaaaaaaggatacggcgatttccgcgagtttgcgctcgctttagaaaagaatgaagctcttctgcaggaaacattggacagaatgacaatcaatgtttcagaattttacagaaactataagaggtgggaggttctcgaaaaaacgatcctgccgcttttaaagcctgcgaaaacgctgaaagtttggagcgcggcttgttcaaccggggaagagccttatacattatcaatgattttaagcagacagaaaggcctcacagactatcagattatcgcaacagatatcgatgacaaagtccttcagaaagcgaaagaaggcgtatatcaggaaaggtccctgcaggaagtgccgaaagagatgaaagaactttattttacgcaagacggaaaccgctttaaagtcaaagacgagatcaggaaaaacatccgctttcaaaagcacaatttactggctgatccgtatgagaaagattttgatatcatcgtatgccgcaatgtgctcatttattttacggaggaagcaaaagagaagatctatcataagttcagcggcagcctgaagaataagggggttttgtttgtcggaagcacggaacagatcttcaatccggaaaaatacggttttcaatcgacagatacgtttttctatcaaaaaagttag

SEQ ID NO: 2827 - DNA, 447 bp, Bacillus licheniformis
atggaaaaaacctttgtgatggtaaaacctgacggcgttcagcgtcagctgatcggcgaaattttgttaagattcgaacgtaagggcttacaattaatcggagccaagctgatgaaggtctcagaagagacggcaggcgagcattataaagaacataacgggaaaccgtttttcggcgaacttgtcgactttattacttcaggcccggtattcgccatggtatgggaaggcgaggacgcaatcgcggtcgccagacagctgatcgggaagacgaaccctaaggaagcgcttccaggtacaatccgcggagacttcggcatgtttgtcggaaaaaatatcattcacggttcagattctcctgaaagtgcagcacgcgaaatcaacttgttttttaaagaggacgaacttgttgaagacgagaaattaatgaatcaatggatttactaa

SEQ ID NO: 2828 - DNA, 963 bp, Bacillus licheniformis
atgaaattgacaacgttttattcttttttgaatgacgatattgaattaatagaaaaagagcttgaaaagaccgtgcactccgactatccattgctcagtgaagcgagcctgcatttgctgcaggccggaggcaagaggattcgtcccgtgtttgtcctgctttccggcatgttcggcgaatacgacatcagcaaaattaaaaatgttgccgtttcgttggaattgatacatatggcttcgctcgtacacgacgatgtcatcgatgatgcggagctgagaagaggacagccgacaatcaaagcgaagtgggataaccggattgcgatgtatacaggtgattatttgttcgctcgctcacttgaagcgatgacaaaaataaacgaaccgaaagcccatgaaatcttgtccaaggcgattgtcgaagtctgtcttggagaaattgaacaaattaaagataaatataatatggagcaaaatctcagaacctatttgagaagaatcaggcgcaagacagcacttctaatcgcgtcgagctgccagcttggggccattgctgctggtgcgggtgaaaacattcataaaacgttgtactggtttggctattatgtcggcatgtcctatcaaattattgatgacatcctcgatttcacctcaagcgaaaaagagcttggcaagcctgtgggcagcgatctgcttcaggggaatgtcacgcttcccgtattatatgcacggaaatcgcctgagctaaaagcgcgcctgatgctggtcaacagtgaaaccactccagaacagatcaagccagtgatcgaagagctgaagaaaacggatgccattgaacaatcgttcagggtcagtgaaatgtatttaaacaaggctttcgaactgcttgaaacgctcccgaaaaaccgggcgcggacggcactgggccaaattgcgaaatacatcggtaagcgaaagttctaa

SEQ ID NO: 2829 - DNA, 699 bp, Bacillus licheniformis
atggtgcagtcaaaagaacagcgcgtacatggcgtgtttgaaaagatttataaaaattatgaccagatgaactccgtcatcagctttaaacagcataaaaaatggcgcgacaaaacgatgcagctcatgaacgttccaaaaggagccacagcgcttgacgtctgctgcgggacgggagactggacgatcgcgctcgctgatgcggcaggagagacaggggaaatcaagggccttgatttcagcaaaaacatgctgagcatcgccgaacaaaaaacggaaagctacagccagatcgaattgatccacggcaatgcgatggaactgcccttcccggataatacattcgactatgtcaccatcggcttcgggcttcgcaatgttcccgactatttaaccgtattaaaagagatggcgcgcgtggtaaaacccggcggccaggttgtatgccttgagacgtcccagcctgaaatgttcgggttcaaacagctatacttcctgtacttccgcttcattatgcctatgtttggaaagctctttgccaaaagctttaaggagtattcatggcttcaggaatcggccagggaatttcctggtatgaaagagcttgccgcgttgtttgaagaggctggattaaaaaatgttcaatatcatccgttcacaggcggcgtagcggcaacacatgtcggctggaagcgatga

SEQ ID NO: 2830 - DNA, 777 bp, Bacillus licheniformis
ttgcaagacatctacggacaattatcttatttgaaaatcaagctgaatcaaaagctttcacatccatatttggcgaagcatctgactgcgccgaaagttgatgaggataagctgtttcttttctacgctctgtttgaggaaacggatttaaaagaagctgacaaggaaagttacatcttaacggcgatgcttgttcaaacagcccttgatacccatgatgaagtcacgaccgcagcttcaattaaacaggacgattataaaaaccgccagctgaccgtattggccggtgattacttcagcggcatgtactactcgctgttatcgggtatgaaggatatttatatgattcggacgctcgctgcggccatcaaagaaataaacgaacacaaaatcaggctttacgaccattccgcaaaagatgcagacagcctgaaaaaaagcgtcagcatagtggaagctgcactttttcaccatctcgccgaccacttttacctgcctcactggaaaacagccgccaatgactttcttgtctttaaaaggtttgcggccgaagaaaaagcttcagattcccggctgctggagacgatcatacagaaagagtttccggaaggacaggcttcatgcggacagctggctgctgcggcttataaagaagccaagcttgcgatcaaccagtcgcttgccaaaaagcccgccgtccaaaaatggcttctgaaacgcctgcaggaaattcggcctgaaaaacgaacttatcatcagaaagtggaagaagggtaa

SEQ ID NO: 2831 - DNA, 231 bp, Bacillus licheniformis
atgaccaataatcaatcgaatgattttgtcgttatcaaagccgttgaagacggcgtcaatgtgatcggactgacaagggggacggacacgagatttcatcattcagaaaagcttgataaaggagaagtgatgatctgccagtttaccgagcatacctccgcgatcaaggtccggggcgaggcccttattcagacggcaaacggcgagatgaagagcgaatcgaaaaaatag

SEQ ID NO: 2832 - DNA, 570 bp, Bacillus licheniformis
atgagagaaatcaacaaagaccaaattgaacaagccgtccggcaaatattggaggcgatcggagaagatccgaaccgcgaaggccttcttgatacaccgaaaagagtcgcaaagatgtacgctgaagtatttgcgggtttaaacgaagatccgaaagagcatttcaaaacgattttcggcgaggatcacgaagagcttgttcttgttaaagatattcctttttattcaatgtgtgagcaccatttagttcctttctacgggaaagcccatgtagcctatatccctaaaggcggaaaagtgacaggactcagcaagttggcgagagccgttgaagcggtggcaaaacgtccgcagcttcaggagcggattacgtcaacaattgccgacagcattgttgaaacgctgactccgcacggtgtaatggtggttgttgaagccgagcatatgtgcatgacgatgcgcggcgtgaaaaagccgggttcaaaaactgtcacttcagctgtaaggggaacgtttagacaggatgtggctgctcgctctgaggtgttggagcttatcaaaacatcatga

SEQ ID NO: 2833 - DNA, 279 bp, Bacillus licheniformis
atgaacaagacagaactaatcaatgcggttgcagaagcaagcgaactatctaaaaaagacgctactaaagcagttgattctgtttttgatacaattttagatgcacttaaaaacggtgaaaaaattcaattgatcggttttggtaactttgaggttcgtgagcgctcagctcgtaaaggacgcaatcctcaaacaggtgaagaaatcgaaatccctgcaagcaaagtacctgctttcaaaccaggtaaagcgcttaaagacgctgtagcaggaaaataa

SEQ ID NO: 2834 - DNA, 138 bp, Bacillus licheniformis
gtgttaatctacaaacagaaaatcttcactttactggacaaacgttcctctcaaagtgaaattttcgctggaagccgtgaaatgccttttctatatttatttgaaatttctgttcaaacaggtatagaaacaggttga

SEQ ID NO: 2835 - DNA, 195 bp, Bacillus licheniformis
atgatcccttattcgtcaaggtttaagcagaataaaacgaacaaatattcctgttttttcttttttaatcataatctttcctatatttccagccgcaagcccttgccgtccaaccccctttcaccgcgcccgttcagcctgttttcaggcataaaaaaagacctcccgtatgataagaggccttcccttttataa

SEQ ID NO: 2836 - DNA, 1479 bp, Bacillus licheniformis
ttggaaaaggtcgatattttcaaggatatcgctgaacgaacaggaggcgatatatacttaggtgtcgtaggagctgtacgtacaggaaaatctacgtttatcaaaaaatttatggagctagtggtgctcccgaatatcaacaatgaagcagaccgggcgcgcgcacaagatgagctcccccaaagtgccgctggcaaaaccattatgacaactgaaccgaagtttgttccgaatcaggcaatgtcagttcatgtcagtgacggactcgatgtgaatataaggcttgtcgactgcgtcggctatactgtacccggggcaaagggatacgaggatgaaaacgggccgagaatgatcaatactccttggtatgaagagccgattccgtttcacgaagctgccgaaatcggcacgagaaaagtcatccaagagcactcaacaatcggtgttgtgattacgactgacggcacgattggagaaatcgccagacaggattatgtcgaggctgaagaacgggtgatcgacgagttgaaagaggttggaaaaccgtttatcatggtcatcaattccgtaaggccgtatcatccggaaacagaagcgctcaggcaagaattgatggaaaagtacgacattccggtgctggcgatgagcgttgaaagcatgagggaagcggacgttctgagcgttctcagagaagcgctttacgaattccctgtgctcgaagtcaacgtcaatcttccaagctgggtgatggtattaaaagagaatcattggctcagggaaaactatcaagattccgttaaagaaaccgtcaaagatattaaaagactgagagatgtcgaccgcgtcgtcggacacttcagcgaatttgatttcatcgagcgcgcaagcctcgccggaattgaaatgggccaggggatcgcggaaatcgatttatacgcgccggattacctgtacgatgaaattttgagggaagtcgtcggcgttgaaatcagaggaaaagatcacctccttcagctcatgcaggattttgcccatgccaagaccgaatatgatcaagtctcagatgcattgaaaatggtgaaacaaaccggctatggaatcgcagctcccgcattaaccgatatgagcctggatgaaccggaaatcatcaggcagggttcaagattcggagtccggctgaaggcggtggcgccgtcgattcatatgatcaaagtcgatgtggaaagcgagtttgcgccgatcatcggaacagagaagcagagcgaagagcttgtccgctatttaatgcaggactttgaggacgatccgctgtcaatctggaattccgacatattcggaagaagcttgagctcgatcgtcagagaagggattcaggcgaagctgtcactcatgcctgaaaatgcgagatataagctgaaggagacgctggagcgcattatcaatgaaggctcaggcggcttgattgcgatcatcttataa

SEQ ID NO: 2837 - DNA, 717 bp, Bacillus licheniformis
atgaaaatcgtaaacgttctgctcgctattttattgaccgcaatcatgttaagcggttgtttgtaccctgaagaaagaaaggcgaaaaacagcgcaccgcatcagcaccagctcaaagaagtgcaggcggccgttgatgaattcagggaggcgacgggagggcttctgccgattaagacaagggatatgggcgtgccaatctatcaaaaataccctatcgattttaacaggctgtccccccggtatatggctgagccgccgggcacatcctatgaaaacggcggagagtacttgtacgttcttgtcgatgtggaaaaaaagccgacggtcaagctcattgatgtaaaaatgtcggaaatgatcagggagttaaagcttcgggtcgaaatgtataaagatcagcacaagtatccgccgtataaaaaagtcgtatccaagaacttattcatgcttgaccatgaaaagctcggactgaaagaggcgccttctgtcacgagtccgctttcgggcacctcgctgccgcttctcgtcgatgaaaaaggcgacattaaagtggattaccggatggatttggccaagctgatgaagaagtcgaaaaaaacggtaaagccgggcgaggaagtccaagatttgatgtgggaagagacgcctttcgttccggcgttttcggtaaagtacacagtgaatgacaaacaggaacctgtttttctcgaatag

SEQ ID NO: 2838 - DNA, 204 bp, Bacillus licheniformis
gtgaatgtcggtctgttaaaaatgtggtttgccttgggatcaatgggcctgatgttcttagcggtgattgccatatacataagcagatataaatttaaaaaccgttttttaaaaattatcacgtcgtttgtcgcctacacatgtatgctcatctccggcgtgatcgtcttttttgtcgtcttcagcggccccgtcaacgaataa

SEQ ID NO: 2839 - DNA, 1041 bp, Bacillus licheniformis
atgacaaaagtatcgattttgggagccggaagctggggaacagccttggcgctcgttttggcggacaaccagtacgatgtgtgcatatggggccatcgtgaagaactgattcagcaaatcaatgaacatcatgaaaacaaagattatctgccgggtgtcaaactttctgaaaacgtgcgtgccacaacagatcttgaagctgcagtggctgatgtcaagacgatcattgtcgccgttccgacaaaagcgatccgcgaagttttggcacaggctgtttccttcatcaaccaaaaggcgatttttgtacatgtttcaaaaggaattgagcctgacacactgcttcgaatttctgaaatgatgaaagaagaaattccggctgaattaagggaggacatcgtcgttctgtccggaccgagccatgcggaagaagtcggtttaaggcatccgacgacagtaacggtatctgccgacagcagcattgaatcggcccaggcgatccaggatatgtttatgaaccagaatttccgcgtgtatacgaatccggatatgatcggcgtagagatcggcggcgcgctgaaaaacgtcattgcgcttgccgcgggcattacagacggtttgggatacggagataatgcgaaagccgcgctgattacaaggggcttggcagaaatcgcccggctcggcacaaaaatgggcggaaatccgctgacattctcgggtcttactggaatcggggacttgatcgtcacctgcacaagcgtccattcacgaaattggcgagccggtaatatgctgggtaaaggcttcaagctggatgaagttctggaagaaatggggatggtcgtcgagggggtccgcacgacaaaagccgcttatcagctttcaaagaaatttgatgtaaaaatgccgatcaccgaagcactgcacaaagtattgtttgacggcgaaaaagttgagacggcagtcgaatcattgatggcaagagtcaaaacacacgagatggaagatcttgtgaacacattcgaaaatcaaatgaaatga

SEQ ID NO: 2840 - DNA, 1311 bp, Bacillus licheniformis
atgggaaaacctgtcgtagccatagttggaagacccaatgtggggaagtccacgatctttaacaggatcgcgggcgaaagaatttcgattgtggaagatacacctggcgtgacgcgggatcggatatacagctctgccgagtggctgaatcacgacttcaacctgattgatacaggcggaatcgaagtcggcgatgagccgtttttggcgcagattcgccatcaggccgagatcgccatggaagaagcagatgtgattattttcatgacgaacggccgcgaaggcgtcacagccgctgatgaagaagtggcaaaaattttataccgtacaaaaaaacccgtcgttctggcggttaataaagtggataatcctgaaatgagagcaaacatttacgatttttatgccctcggctttggcgagccgttcccgatttcagggacgcacggccttggtctcggcgatctgcttgacgcggtcagcgaacattttaaaaacatacccgagacgaagtatgaggatgaagtcgttcaattttgcctcatcggccggccgaacgtcggaaaatcctcccttgtaaacgccatgcttggagaagagcgcgttatcgtcagcaatattgcgggaacgacgcgcgacgccattgacacgaggtttacatacaatcaaagagactttgtcatcgtggatacagccgggatgagaaaaaaggggaaagtgtatgaggcaactgaaaaatacagcgtcctccgagctttaaaggcgatcgaccgttcagaagtcgtctgcgtcgtcttggacggcgaagaaggcattattgagcaggacaagcggattgccggctatgcgcatgaagcaggaaaagctgttgtcatcgtcgtaaacaaatgggatgcagtcgaaaaagacgagcggacgatgaaagaatttgaagaaaaggttagagaccactttcaatttttggactacgcgcctgttttgtttatgtccgctttgacgaaaaagcgcatccatacgctgatgcctgcggtcatgacggcgagcgaaaaccattcgatgagggtgcagaccaatattcttaatgatatcattatggatgcggtggctatgaacccgacgccgacgcataatggaaaccggttaaaaatttattatgcgacacaagtggctgtgaagccgccgacatttgtcgtatttgtcaatgaccctgagctgatgcatttttcttacgaacgctttttggaaaaccggatacgcgacgccttcggatttgaaggaacaccaatcaggattttcgcaagagcaagaaaataa

SEQ ID NO: 2841 - DNA, 141 bp, Bacillus licheniformis
gtgatctctttagaaattgatataatatatgagttaagcccttctgtatggaataagaagggtttctttcttcaaactgattttttgaaaagagaaacaaatgatcattcatttaaagatggaaaagctttactgaattga

SEQ ID NO: 2842 - DNA, 194 bp, Bacillus licheniformis
atgagcgaatcaatcgaaaaattcattctcgccgtcgtcaccacaaggcgagacagagtgatcggcgggacggctgcatttttctgcgacacccccgaggaaatgaacacgtacgccaaaaccttgaagccattctcgacggaatcgcccacggaataggagatgacctttatttgattgtgaaacatttttaa

SEQ ID NO: 2843 - DNA, 900 bp, Bacillus licheniformis
atgagccaatatacttatccgatcatcttgggaattgtcgcaggtattgttgtcagagtatatatgctccgaaccgactaccgccagtaccccacttatcttcatgggaaaacgatacatattgcgctggctttgatcgctgccagcattggcgcgatcattattccgtcaatcttgaaatcggattatacagcgattacgtttttaacgctggctgcaacccaattcagggatgtccggaacatggaacgggaaacattgacgcagcttgacggctatgaactcgtttcaagaggcagcacgtatatcgaaggaatcgcgatcgcctttgaaagcaggaattacattgtcatttttacatcgctcctgacgaccctcgcatacattctgttttcatcggtatgggcaggccttgctgctgctttgatctgttttatcgcgggcagaatcttaatgtccggaagctttattaaggatatcgccgatatagagtataaaaagcctcattttgaaggggccggactttatgtcgacaatatttacattatgaatatcgggcttcccgaaaagcggaagctgattttggaacacggcatggggtttattttgaagccgaaaaattttaattccgcagtaacgattgccaatctcgggcaaagacaagcgattttatttgacgtttcaaatgtgctcggcgtgtatcgagattctggagaaccctctctttcgccgcttgcgaaaagggatttgaatgacgggcgggtcgcggtttttgtccttccggtcatcaaggacaaagagacggcgatcagggtcatcggcgatgttccgacgctggaaaacgccatccgcgtaccgatggaattcattaaagaaaagcacagcaaggtgataaaatga

SEQ ID NO: 2844 - DNA, 603 bp, Bacillus licheniformis
atggaagaattctattattattggtcaatgtggtttttatgggtgctgacgacttttatcctcgagaaaaacaggtttcgcttttatgcgtcagcatttattttgctcaatatcattttaagtatgtatcaggtcaggctctttatgtattttaatgccgcctatttgtcgttttatatcggagccttcatgctgtgcggttttttgaggcttcataaaagtgtcaagcggctgctgcttcatctctcgatggtgtccgcctacggttttttgtttctgtttgcattatatgaccctgtttggtttatcctaaagcctgaatggctgatcatcatcttgtttgtcatcatgacagcagcttttgaaagaagcttcgccgtccgtctcggggtgtttgtgctcgggatgtgccagggggagctcttgtatacattcgtcatcagaaagctctatggagacattgcagcgggcggttattcatggctgtcaatgtgcgctgcggggatcgttctcgtttacggaatatcccagtatgaacagctgatgcatcaagtctattataaattgaagcgattgaataaaggagcagcaaaaatgtcatga

SEQ ID NO: 2845 - DNA, 132 bp, Bacillus licheniformis
ttgggaaaagacagacaggaaaagaagctgaaacagcagaagcgaaccgaatcggaccgtgaccagtcgatcagctacaatggcgccgcctctctcgaaagtgcggaggacgcgcgcaagcgaaacccgtaa

SEQ ID NO: 2846 - DNA, 1050 bp, Bacillus licheniformis
gtgacgcgagcaaaaagaaaaaaagaacacattgatcatgccctgtccaccggacagaaacgtcagaccgggcttgatgatatcacatttgttcacgtcagccttccggaaacggaattgtcacaagttgatacttcaaccaaaataggcgaactgtttttaagttcgcctatttttatcaatgcgatgacaggcggaggcgggaaggcgacgtttgagatcaacagggctttggcgagggcggctgcacaaacaggcataccggtcgctgtcggctcgcaaatgtccgctttgaaagatcccgatgagcgaccttcatacgagatcgtcagaaaagaaaatatgaaggggcttgtattcgccaatttggggagcgaagcgacagtggaacaggccaagcgggcggtcgacatgattgaagccgatatgcttcaaattcacctcaatgtgattcaggaaatcgtcatgcctgaaggcgaccgcaattttacaggacgcctgcgccggattgaagacatctgccggagtgtcagcgtaccagtcgccgtaaaagaggttggctttgggatgagcagggataccgcggcccggctttttaacgtcggcgttcaggcgatcgatgtcggcggattcgggggaacgaatttttcgaaaatcgaaaatttgcgcagggataaagcagttgagtttttcgatcaatggggcatatcgacagcagccagcctggccgaagtcagctcgatatccggcgatcggccgattatcgcatccggcggcatacaagatgcccttgatttggccaaatcgatagcgctgggcgcgtctgcggctgggatggcaggctattttctcaaggtgctgacagcttcgggagaagaggcgttagccgccgaaatcgagagcctgatagaagatttcaaaagaattatgaccgtcttgggttgcaggacgattgaacagttgaaaaaagcgccgctcgtcatcaagggcgatacatatcattggctgaaagcgaggggtgttgacccctttgtttacagcatgcgttaa

SEQ ID NO: 2847 - DNA, 1149 bp, Bacillus licheniformis
atgacagaggaaatgaatcaaattgatgttcaagtaccagaggttggagatgtggtgaaaggtattgtaacgaaagttgaggacaagcatgtcgatgttgacatccccaactgcaagcaaaccggaattatcccaatcagtgaattatcaagtcttcatgttgaaaaagcatcagatgtcgtcaatgttgacgatgagcttgaattaaaagtgacaaaagtggaagacgatgcattgattttatcaaaacgtgctgttgatgcagaccgcgcttgggaagacctagagaaaaagtttgagtcaaaagaagtgtttgaagccgaagtaaaagacgtcgttaaaggcggtctggtcgtcgatatcggcgtgcgcggattcattcccgcatcgcttgtagaggcgcattttgtcgaagattttacagattataaaggaaagacgcttactttaatcgtcgttgaacttgacagagataaaaaccgcgtgattttatcacaccgtgcggttgtagaaaaagagcagtcagaaagaaaacaagaatttcttcaaacgctggaagcaggacaggtgcttgaaggaaaagtacagcgcctgacagacttcggtgctttcgttgacatcggcggcattgacggtcttgttcacatctcccagctctcgcattcacacgttgaaaaaccgtcggacgtcgtcgaagaaggccaggatgtcaaagtcaaagtgctgtccgtcgaccgcgacaatgaacgaatttcgctatcgatcaaagaaacgcttcctggaccttggtccaacatcggtgaaaaggtgaagcctggagaggtattggacggaaaagttcagcgcttggtgagcttcggtgcatttgtcgaagtgcttcctggagttgaaggcctcgtccacatttcgcaaatctccaacaaacacatcggaacgcctcatgaagtgcttgaggaaggccaggacgtaaaagtgaaagtgcttgatgtcaatgaagaggaagagcgcatttctttaagcatgaaagagcttgaagaaaacaccgataaagcagagcaggaagattaccgtcagtaccaggcgaaggaagagtcttcagggttccagctcggtgaaatgatcggagacaaactgaataaattaaagtaa

SEQ ID NO: 2848 - DNA, 681 bp, Bacillus licheniformis
atggaaaagaaattatgcattgcaatagacggccctgcggcagccggaaaaagcaccgtggcgaaaatcgtggccagaaaaaagtcgtatatttatattgatacgggtgccatgtacagggcgattacgtatctagcgctggaaaagggcgttgatttaaacgacgaagcggcgctgacggccttgttaaaagaatctgccatcgatctcacggtttcgcctgaaggagagcagaaggtttatatcgcaggtgaagatgtaacagaggcgatccgcacggatagcgtgagcaaccaagtctccatcgtcgccaaatacgccgggatccgcgaagaaatgacgaaaaggcagcagcagctggctgaaaaaggcggagtcgtcatggacggccgcgacatcggaacccacgttctcccgaatgcggaagtgaaaatatttctcttggcgtccgtcgaggagcgggcaaaacgccgctttgaagaaaacgtcaaaaaagggtacaatgtaaattatgaaacgcttgcagaagaaatcaggcgccgtgacaaactcgattcagagcgcgagatttcgccgttgaaaaaagcggacgatgcgcttgaaatcgacacgacttcattgacgatcgatgaagtggccgaaaaaattctgcagattgtagacaaaaaggctcaaaaataa

SEQ ID NO: 2849 - DNA, 177 bp, Bacillus licheniformis
atgaaaacaatcgaacggttattatttaagatactcgtcgtacagacggtcattttaatcagcgtgcagcttctttttcatttctccaaggctgagccttatctgtcaaaggtcgtgcagtatgaaggcgtgaacaacatgaaaatcggcgaatggatcgagacatttaagccgtaa

SEQ ID NO: 2850 - DNA, 126 bp, Bacillus licheniformis
ttgttttcatattattcctccgctgcccggaaaatttacggcgccgggcattttcaatttaccggcggacgttccgcccatatgttcagtatggaaatgtttagggcgaattattccgaatgctaa

SEQ ID NO: 2851 - DNA, 1353 bp, Bacillus licheniformis
atgatcagaggaattttaatcgcccttttaggtgtcgccatcgtaggaacaagctattggggctataaagaacatcaggagaaagacgccgttttgcttcatgccgaaaacaactatcaaagggcatttcacgacttaacttatcaggtggatcagctgcatgataaaatcgggagcacgcttgcgatgaacagcaaaaaaacgctgtctcccgctttggcggaagtctggaaaacgacttctgaagcgcataacaatgtcagccagctgccgctgaccttaatgccgtttaacaagaccgaagagtttttggcaaaggtcggagatttcagctacaaagcagccgtgcgcgatcttgacaaagagccgctcaataaaaaagagtacgcttctttaaatcagctatatgaaaattcaaaggatatacaaaatgaactgcgtaatgtccagcatttgattattgacaaaaatttgagatggatggatgtagaactggcgctcgcgtccggccaaaaacaaagcgacaatacgattattaatggatttaaaaccgttgaaaaaagcgcaagtgcattttcggatacggatttaggcgcgacagagatgacgaacacgaaaaaagagcagcaagggtacgaccatttacaaggcaaaagaataaccgaaaaagaagcgcgcaagattgcccaaaaattcgcccaggacaaaaattacaatatcaaagtatcgaaaagcggcaagaaaacgaacagggatgtatacagcatcagtatgcaggaccctgatcaaaaagcggatatttatatggacattaccgaaaaaggcggatatccggtttatctgattcaaaacaaaaaaattaaagatgaaaaaatcagcttaaacgatgcgtcaaacaaagcccttcaatttttgaaaaaaaacggctataaaacagaagacctgaagatggatgaaagctcgcaatacgacggcgtcggggtgttttcatttgttccggtccaggacgatgtctggctctatccggacagcatccgcatcaaggtcgcacttgacgacggcgagattaccgggtttaatgcaaaggatttcttaatctcccataaaaaaagagacttgccgaagcctaaactaacgcctgaaaaagcgaaagcaagcctgaatcccaacgtaaaagttcaggagacgcgcattgctttagtcacgaacgagctttcgcaagaagtgctctgctacgaaattctcggcacgattgaaaacgatacattccgcatgttcatcaatgccaatgacggcacggaagagaaggttcagaaaatgaaaagcgcagaaccgatatacaacgacttgtaa

SEQ ID NO: 2852 - DNA, 966 bp, Bacillus licheniformis
atgaagtcgaaaggttctttttgtttgaatgtcattttatgtaccattatggcaaccagtctttcacttccattcagtcaaaaaagcgctgccttttctgaacaggtaatacagcggggggcgacaggggatgatgtgattgaactgcaggcaagacttcaatacaatggctattacaatggcagaattgacggagtatacgggtgggcgacatactgggccgtccgcaatttccaaaatcagttcggcttaagggatacagacggcctggtcgggccgaaaacaaaacgattattaatcaatcatactaaatattacagcgactacgtgcacagacagcttcgaaaaggaaaccaatttacacattacggcgggctgccgctgaagtatcagacgaagccttcaaaagaagtgcagcagcaggcgagaaaaaaggcggaagcaagacagcggcagggcgcacaacagcagggtaccgcccaaaaacagccgcagcaaaagcagcaggccgctcctgcacagccgaaaaaacaagcacagccaaaggctgcacctaaacaagccgcgcctaaaaaacaggatgccgttgcagccaatatgccgggcggattttcgaacaacgacattaatctgttggcccaagcggtttacggtgaagcgcgcggagaaccgtatgacggccaggttgccgttgcagctgttatattaaacaggctcgatagccctacgttcccgaatacggtggcgggcgttatctttgaaccgcttgcatttacagctgtcgcggacggacagatttatatgacgccggatgaaacggcgaaaaaagccgttcttgacgccatcaacggctgggatccatcagaaaatgccacttactattttaaccctgacacggccactagctcatggatttggggcagacctcaaattaaaaggatcggtaaacacattttctgtgaataa

SEQ ID NO: 2853 - DNA, 669 bp, Bacillus licheniformis
atgttcggaattatctcagcaggcctagctcccggaatcgcactgttaatgtatttttacttaaaggaaaaatatgaatccgagcccattcatatggtcatccgcctctttatactgggggttttgctcgtttttccgacgatgttcatccagtatgtattggaaaaagaacacatttctgagggcagttttgtcgtttcgtttttaacttccggctttttggaagaatttttaaaatggtttttgctgatggtcagcacctttcagcatatcgactttgatgaacactatgacggaatcgtatacgggacaagcctttcattggggtttgcgacgcttgaaaatatattgtacctcatcggaaacggggtggagtacgcctttatgcgcgctttgcttccggtttccagccatgctttattcggagtgatcatgggcttttacatcggcaaagcccgtttttcggatagcaaaacaaagatgaaatggctgctatgctcgctttttattccggctttgcttcacggtctatacgattatattctgctcgccttaaaaaactggatctattttatgctgccctttatggcgtttctttggtggttcggcttgcgcaaagcaaaaaaagcccgttccgtcaaaaccggcgggcagcctcttcagcaatag

SEQ ID NO: 2854 - DNA, 969 bp, Bacillus licheniformis
atgaataaaaaagtagctctcattacaacgggaggaacgatcgccagccggaaaaccgaaagcggccggcttgcggcaggggcgatcagcggccctgaattagccgaaatgtgcagcctgccggaagatgtacagatcgatgtctacccggcgtttcagcttccaagtatgcatattacatttgagcatttattagagctcaagcaaaccatcgaacgcgtgtttcagaacggcggctatgacggcgcggttgtaacgcatggtacggacacgcttgaagaaaccgcctattttttggatttaacaatagaggatgagaggccggtcgttgtcacaggttcacagcgagcaccggaacagcaaggcacagatgcatatacaaatatcaggcatgccgtatatacagcttgcagtccggatataaaaggagccggcacggttgttgtttttaacgaaaggatctttaacgcgcgctacgttaaaaaagtgcacgcttcgaatctgcagggttttgacgtattcggtttcggctacttagggatcattgataacgacaaagtatacgtttatcaaaagccgttaaagcgggatgttcaccagctgcaaaggccgcttcctgcagtggacatcgtcaaatgctatcttgatggagacggcaagtttatcagagccgccgtccgcgagggtgtcgaagggatcgtccttgagggagtcggaagggggcaggtgccgccgaatatgatggctgatatcgaacaagctttaaatcagggcgtttatatcgtcatcacgacgagcgcagaggaaggcgaagtttatacgacctatgactatgcaggcagcagctatgacctcgcgaaaaaaggggtcattttaggcaaggattatgacagcaaaaaagcgagaatgaaactcgccgtccttcttgcaagctataaagaaggcataaaagacaaattctgctattag

SEQ ID NO: 2855 - DNA, 966 bp, Bacillus licheniformis
atgaaagaagaaaaagtgatcattatcggcggcggcccctgcgggctttcagcagctattcacatgcaagagatcggaatagatgcactcgtcattgagaaaggaaacatcgtcaacagcatttatcaatatcctactcaccaaacctttttcagctcaagcgaaaaactggagattggggatgtggcttttattactgaaaatcacaagccggtcagaaatcaggcgctttcttattacagggaagtcgccaaacgaaaaaatctgcggatcaacgcgtttgagaaagttcaatccgtaacaaaaacagagaataaccaatttatcgtggaaacatcaaaggacacgtatttgtcttctttttgcattgtcgcaacgggatattatgacaatccgaactatatgaatgtaccgggagaagaccttccaaaagtatttcattattttaaagaggctcatccgtactttgataaagatgttgcagttatcgggggcaaaaactcaagcgtcgacgcggcaatggagctcgttaaggcgggcgcaagagtgaccgtattgtacagagggaacgaatattcctccagcatcaaaccgtggatccttccggaattcctttcgcttgtcaagcacggaaaaatcagaatggaattccgggcggtcgtcaaagaaattacggaagacgagctgattttttctgtcgacggaaaagaaaccaggatcaaaaatgattttgtatttgccatgaccggctatcatccagatcatagctttcttcaaaaaatgggagtcaaaatcgacgcagagtcgggccgtcctttctttaatgaagaaacgatggagacgaacgaagaaggcatctttatcgccggcgttattgcggccgggaacaacgcaaatgaaatctttattgaaaacggccgttttcacggcggcttaatcgcagctgaaattgctaaacggatataa

SEQ ID NO: 2856 - DNA, 1275 bp, Bacillus licheniformis
atggtagccgatcaaaacaccggtcatactgaagaaaacacacatgacgttttgaaatcaacgcaaacggtgatacataaggcgcttgaaaaattgggatatcctgaagaggtgtatgaattactaaaagaaccgattcgttttttaacggtgaaaattccggttcgcatggacgatggatctgttaagattttcacgggctaccgagcccagcacaatgatgcagtagggccgacaaaaggcggcatccgttttcatccgggagttacagaaaaagaagttaaagcgctttctatttggatgagtctgaaatgcggcatcatcgaccttccatatggaggcggaaagggcgggatcatctgtgatccgcgggatatgtcctttcctgaactggaacgtttaagcagagggtacgttcgggcgatcagccaaattgtcggaccgacaaaagacgtaccggctcccgatgtatttaccaattctcaaatcatggcatggatgatggacgaatattcaagaatcgacgaattcaactcgccgggcttcattaccggcaaaccgctcgttttaggtggttctcacggcagagaatctgcgacagcaaaaggggttacaatctgcattaaagaggcggcgaaaaagaaaaacatcgacattgagggagcttctgtcgtcgtgcaggggttcggaaatgcgggaagctaccttgcgaaattcatgtatgacgcaggtgcaaaggttgtcggcatttctgatgcatacggcggcctgtacgatcctgaagggcttgacatcgattacctgcttgaccgccgagacagcttcggaacggtcacaaagctgtttaatgacaccattacaaacaaagaactgctggagctggagtgcgacattcttgtgccggctgccatagaaaatcaaattaccgcggaaaacgcccataacatcaaggcgaaaatcgttgtcgaagctgccaacggcccgacgacgctcgaagcgacgaaaattctttccgaccgcgacattcttcttgtaccggacgtgctggcaagcgccggcggtgtaacggtatcctattttgagtgggtgcaaaacaaccagggattctactggactgaagaagaagttgaagaacgtttggaaaaaatgatggtcaaatcgttcaacaacatttacgaaatggcgcacaaccgcagaattgacatgaggcttgcagcctatatggtgggcgtccgcaagatggcggaagcatcccgcttcagaggctggatatag

SEQ ID NO: 2857 - DNA, 585 bp, Bacillus licheniformis
atgcggcttgagcgtctaaattataataagatcaaaatctttctgacacttgacgatctgacagaccgggggctgacgaaagaagacctttggaaagactcatttaaagttcagcagctgtttaaggacatgatgaacgaagcgaatacagagctcgggttcgaagcgaatggcccaatcgctgttgaagtgtattctcttcaagcacaaggaatggtcatcattgtcacaaaaaatcaggaaacagatgaagacgataatgagtatgatgaggactatattgaaatgcaagtcaaacttggcgaaagtgttgacattatatatgaatttcaaacgtttgagcatctgattgaactttccaaaaatctggaccgcatcggtattcaaggcgggacagtctaccactatgagggcaggtatttcttaagtctcgacgattttgactcccttgaggttgacggcgtgatttcgattttagccgaatatgggaatccgacgactttaacgatttacaggcttcaggaatacggaaagaaaatcatggagaacaatgccgttcagaccattcagacatactttaaatag

SEQ ID NO: 2858 - DNA, 786 bp, Bacillus licheniformis
atgatctattggctcagtctggcttcggccgctttcatcggccttgctgctttagtgtggaaaatgtcagccatcgcgcgcgaaaaccgggtgttgaaggctgaattttcactcgggcgcctgaaaaaggaattgaatgtcttttttatttcagatattcataggcggacagtcagcgaagacattatttgtgaagtgaaagaacgcggggttcagctcgtcatcatcggcggcgacttagcagagggcggcgtcccttatacgagaattgaagaaaatatcaaaaggctttcaagtttgggaaaaacgtattttgtatggggaaataacgattatgaagttgatcaggaaaggctgctggaaatattcaagacatacggtgtaacgcctttgcgcaatgcttcggtattgcatgaccatcaaggacaaactgtcaatatttgcggagtggatgacatcagactcgaattggatgattacccggcagctctcggcggcgtgcagccgggttttccgactgtccttgtgtcacataatccggagattcatcatcaaatacaggaggcggacggtattgacctgatattgagcggtcatacccacggaggacagattcgcttcggcagattcgggctctgtgaaatcggaggaaccggcactgttttcaaggctccgtacttgatcagcaacggctatggaacgtcgaagcttcctctgcggctcggagcgaggccggaaacccatctgatcaagctggttccgggcccccgtatggaaggaaactga

SEQ ID NO: 2859 - DNA, 444 bp, Bacillus licheniformis
gtgggaagcgagcttgaagagctggaccgttttacggacgaaccgacgaaacaaatgctccgcgccttaattaaaaggaagaaaaagtacgaaaactatgccagacagacattcaggtggcaggcggtggcggcgatatgcgcggtttcgttttgtgtgtttgcagcgtcaaaggggattgggcaaaacggcttcctttccggcttgctgaatgactccgtctatctgctgtggatcttgtcggccgcttttgcatacagcaccgcttactattttaaaaagaaggaagaaaaagcagaaggggaatatcataagctgagatgcgagattattcagaaaagcacggatctatggccccagcctgaagagtggaaatcaagggaaacggtttttaagatcatgaaacagcagtatgacattaatctttatttcgaaagcaaataa

SEQ ID NO: 2860 - DNA, 780 bp, Bacillus licheniformis
atgacggagatgtcaagaatagagaggaagaagagggaacaggagaaggccagcgctgaaatgaaccgggaggcggccgcggctgttgaactggagacacttgatgaggagattccttccagacggacttatcataaaaaaaagaagtccagcaaaaaaaagaataaagacagaaatccactattcacgtctcttgcagtcatgtttgttttcattccgatcatcgtcttcgtggtgttcatgtacatgctgaatcaaggaggcgataccgaccctgatcaatatgataatgtgttttatgaaaacaaaggtgaaacgggaatgacgaatgaaaatcaaaacggtgaacaagaagcggatcaaaaggcggcttcgcagcatacagccgccgcccttcaagaagaaaagctgaaagagagcaaacagccggaaaataaagaggatgaaccgtcaaaaaaagacgagcaaaagcaaaaagagcggcctaaagaggcaaaaaaagcagatgagcagcctgtcgctgcaaagaagcccgccgcatcgaagcagcctgcggaacaagagaagaaaacggcaaacgcgcctcaaacgccgccagttcagcaagcaccgcagcccaaaaaggtgctgaagcacacggttggcgaaaaagagacgcttttccggatttcgatgaaatattataagaaccggtcaggagaggaaaaaatccgcaactacaatcaattatcaggcaacaatgtctacgccggccaggtcctgaatatcccgatttattaa

SEQ ID NO: 2861 - DNA, 645 bp, Bacillus licheniformis
atgctgaaaaaacagtcggaaatcatacgtcgcctgtcagacggggaaatgctgaaacagctctatttttcccagacgctgatgctttttaccgcattattgatgggcatctttttatttgatgatgcagacgcttttctatcgctttggaatccatcggacttgagcatcctgaagtacggggcgccgctcgcggctctcgtgatcatcgccgacctgatggtgatgaaatgggctcccaagcatatgtatgacgatgaagggataaatgaaaagctctttcgtgaacgctcgtatccgcatatcgtgattcttacccttttcattgcatttgcagaggaaatattgttcaggggcgttatccagacgcatttcggtctctgggcggcgagcattattttcgcgatattgcattttcgttatttaaaaaaatggctgctgtttgtaatggtggtgtccatcagctttttgctcggattgagctttgaacggacagggaatttatttgttcctgtcacggcacattttttgatcgatgttgtatttgcgtgccagattcgttttcaacacgtaaggaggagttcacatgacggagatgtcaagaatagagaggaagaagagggaacaggagaaggccagcgctga

SEQ ID NO: 2862 - DNA, 1497 bp, Bacillus licheniformis
atggataaacttcatcaggcgctccgcaggtattttggttatcatgcttttaaaaaaggccaggaaacgatcatcaaaagcgtgctggagggacgggacacggtggcgatgcttccgacaggaggcgggaaatcgctgtgctatcagctcccagggcttttgttagacggcaccgtcctgatcgtctcgccgcttttgtctttaatggaagaccaggtgcagcaattgaagatgcgcggagagaagagagctgccgccttgaacagcgctttgacacaccaagaaaaaaatgacgtattaaaccggcttcaccgcctcaaatatctgtacatttcaccagaagcgcttcagtccggccaaatgctgaaaaagcttcaattgctcaatgtcagcctttttgtcgttgatgaagcccactgcatctcacaatgggggcatgatttcaggcctgattattcgaagcttggagacatcaaggcgctcctcggtcatcccgtcactctggcgcttacagcaacggcaaccgaagcgacattaaaggacatttcggaaatcctggggcttaaagccgccaattatttgattcattcggtcgaccgtccgaacattgcgcttcatattgaaaagctgagggatactgctgagaagacggagcggctgacagggctggttcaaaagctgcaaggtcctggccttgtttattgcccgacgagaaaatgggctgaagaactggctgacaagctccgtaaagaagcaaacttgagaacgggattttatcatggcgggatggaggcaagcgacaggatgctgatccagcagcagtttatccgcaatcagcttgatgtggtctgctgtacaaacgccttcggtatgggagtggacaagccggatatcagatatgtgatccactttagcctcccgcagacgattgaggcgtatctgcaggaaatcggacgtgccggcagggatggaaagcggagcgtcagcattttgctgaaggctccgggagacgaggaaatccaggagcagctgattcaaatggaagccctctcccaaagcgatatcggctttttatacgaaaagcttgcaggagtgaaagatgaacgctgccggcgggaagctctgcagctggccggtttatcggaaacgcaagcccgccattttctccatctttatgagaaggtgcatcatctgggcggcgatggccgggcggtcattcagagggagatggacagccgcaggcagctcaaattgaaaaaagcggcgggattcgccgccgtcaccgaaacagaagggtgtttcagggaaagcttgctcgcttattttaatgaacaaaaaaagccgccgaaaacggatgaaacagcgtgctgcacatcctgcggtttaagtcttgaagcatacgaagtcaaaggagaccgtccgtctatgaacaaattgacagcgtgggaagaagaattggataccatatttgccgccagctgtgatcgtgtatgctga

SEQ ID NO: 2863 - DNA, 1059 bp, Bacillus licheniformis
atgccggttcatttttttgacgcgattgtgcttgacattctgtcatccatgaagggtgagcgttctccaagcgcggtctatcatttattaaaaggaaaaaggtcgtcacagacgatacaggacgccggtttatttgccgtttcaaaatacttcggcttttgttcggctctgtcgagagagcaggtggcagccagcgttcaacgattgaagcaggagtctttggtcagagaaaaagcggaaagcggcgcttacaccgtcaccgaaaaaggagaagcggaacttgccggcttttttgccctttatccgtggccccgccattttcacggcggctattatcaggcggcagccaaagtgatgtgggcaaggatgtcgcttttgatccaagtgctctccaacaagctttaccgcgaacgcgtgtatttgccgatcgtaaaagattatcagattcagaactgggttaaacagtatttaagaaaccggaatgctgctgaaacagcggcccagtttcaccaagagctgaaagagaagctgtctgttttaaatcatgatgaacaggccgctatttttgttcactccctgacatccagaacaaaagcgggctatacattcagacagctttccgaaaaaatgaaccttgatgagtggtacatatatgcactgttttgggatgttctgcaccattttattcaatccgcccaaaatggtgaaagtccgctttttcaaacgctcattcatgacattcctttgaatgatggtctgacacaatcgacgagaaaaacgctctttcttataaaagaagggtatacaatagaccggatcgcaaaaattagaaagctgaaattggcgacgatcgaggatcacattgtggaaatcgccattcatgatccgtctttttccatcgatcagtacgtgtcgaaagaggaacagaaaattattgccgattatgcgatagcgaaccaaaccaataaaatcagacaaattaaagagggactcggcggccgatacagttattttaaaatccgcctggccctgtcgaaaacggtgatcaggaatggataa

SEQ ID NO: 2864 - DNA, 249 bp, Bacillus licheniformis
atgccaaaatatacaattgtagacaaagatacgtgcatcgcatgcggagcttgtggtgctgcggctcctgatatttatgattacgacgatgagggaatcgcatttgtcacccttgacgacaatcagggtgtcgtcgaagtccctgacgtcttagaagaagacatgatggacgcgtttgaaggctgtcctacagattcgatcaaagttgcggatgagccgttcgaaggcgacccgcttaaacacgaataa

SEQ ID NO: 2865 - DNA, 579 bp, Bacillus licheniformis
atgaaacacaacaaggtgagacgtctcgtctctatcagcatgctgagcagcatcgcatttattttaatgatgctgagctttccgatcctgggggcattcccgtatttaaaaatcgatttcagtgatatcccggcattgctcgctgttattttgtacggtccgggagccgggattgccgttgaagcgatcaaaaacgtgctgaattactttattgcaggaagcgcctcgggcgttccgattgatcaggcggctaacttcattgccggaacattgtttatcctgccggcagctgtactgctgaaaaaatcaagttctgccaaagggtttgtcacagctcttttcgcagggacgcttgtgatggccgtttcgatgagcattttaaattatctgctgtttctgcctgcctacacttggtttttaaatgctccagcgctgaatggagaggcgctcaaaacaacagttctggccggaatcctgccttttaatttcattaaaggcatcgctgtggccctcgtgtccacgccgattttcctttcgctgaaaccgcggctgaaggaaaacgtccgcatggccaaataa

SEQ ID NO: 2866 - DNA, 129 bp, Bacillus licheniformis
gtgtttcattttgtcactctctccttttcgatcacatctcacgaaaagaggaatggttctttcccctgtcctaaacaaaaaacccgctttattgaaaaagcggggctgttttacagacaggtcaaataa

SEQ ID NO: 2867 - DNA, 150 bp, Bacillus licheniformis
gtgaaaaaatgtacaggtgcaaagcttattgcgctgttttgggacatcctgcacgatatttcggtaaactcactttttccgcatactaaaaaccgcacattcacagttatttcatttttaattttcgtctttccgcgtgaaactcattga

SEQ ID NO: 2868 - DNA, 1578 bp, Bacillus licheniformis
atgtttcgagtattggtctcagataaaatgtccagcgacggcctcaaaccattaatggaagcagattttattgaaattgtagaaaagaatgttgcggaagcggaagacgagcttcatacgtttgacgcgctcttggtgcggagcgccacgaaggtaaccgaagagctgtttaaaaagatgacttcgctgaaaatcgtcgccagagcaggtgtcggcgtcgacaatatcgatattgacgaggcgacaaaacacggtgttatcgtcgtaaacgcgccaaacgggaatacaatttcaaccgctgaacatacctttgcaatgttttcagcgttaatgagacatattccgcaggcaaacatctccgtgaaatcaagggagtggaatcgttcggcttacgtcggttcagagctttacggaaaaacgctcggcatcatcggaatgggccgcatcggaagcgaaatcgcgagccgcgcaaaagcattcggtatgaccgttcatgtatttgacccgttcctgacccaagaaagggcaagcaagctcggcgttaacgcgaacagctttgaagaagttctggcatgcgccgacatcattacggttcataccccgctcacgaaagaaacgaagggacttttgaacaaagaaaccatcgcaaaaacgaaaaaaggcgttcgtctcgttaactgtgcaagaggcggcatcatcgatgaagcagcgcttttggaagctctggaaagcggacatgtcgctggcgctgccttggatgtattcgaagtcgagcctccggtcgattcaaaactgatcgatcatccgcttgtagtcgcgactcctcacttgggcgcctcaacaaaagaagcccagctgaatgtcgctgcacaagtgtccgaagaagtccttcagtatgcgcaaggaaaccctgtgatgtccgcgatcaaccttccggccatgacaaaggattcattcgaaaaaatccagccttatcatcagtttgccaatacgatcggaaaccttgtgtctcagtgcatgaatgagcctgttcaagatgtagccatccaatatgaaggctccatcgccaaacttgaaacgtcatttattacgaaaagccttttggccggatttctgaagccgagggtcgcggctaccgttaacgaagtgaatgccggcaccgttgcgaaagagcgcggcatcagcttcagcgaaaaaatttcttccaatgagtcaggctatgaaaactgcatctctgtgactgtcacgggagatgtaacaacattctctttaagagcgacgtacattccgcacttcggcggacgcatcgttgccttaaacggctttgatattgatttttatccggctggacaccttgtctacattcaccaccaggataaaccaggggctatcggccatgtcggacgaattttaggagaccatgacatcaatatcgccactatgcaggtaggccgaaaagaaaaaggcggagaagcgatcatgatgctttcctttgaccgccaccttgaggacgatattttagctgagctgaaaaacatcccggatatcgtgtctgttaaagccatcgaccttccttaa

SEQ ID NO: 2869 - DNA, 825 bp, Bacillus licheniformis
ttgaagaaactcagacatcaaaacttcctgttcgcgatcgcatggctttcgggattggcgcttttcgtcaatggcccgggggcggaagcctcagagtggattgaaccgattaaaggagagatcacagatcaattcggtacgagaggcggaaagcataaggggcttgacatcgctgctcccgaaggggaagcagtagcggcagccgcagacggaacgataagcaaatcgtatcaatccgactcctacggccaagtgatatttattaaacatgacaacggatatgaaaccgtttatgcccacttaagcaaacgcctgaaaaaggaaaaggagcgggtgaaaaaaggcgagcaaatcggaatcatcggcaatacgggaatatcgaccggaacccacctgcattttgaaatgcatcacggttcatggactgaagataaaagatatgcaatcaatccgctgacggtgcttcgtgaggaggcgttccggcaaaattctatccacgttcatcaaaacgccgggacaatgagcggtgcggtgaccgttcaaaaaggggacacgctctggagaatcagcaaggatagcggtatatccatcgaggagatcatgagaataaacgggttgaaacattcaaatctcaaggccggccaaacactccgccttcatgacgatgaatcgaagaccggtacatatgtagtgcggaaaggggatacgcttcatcatatcgccgaaaaaatgggcgtaactgtacagcgcctcaaagaatggaacgatttgaaaggagagcggatttatccccgccagatgcttgagatcagggagaattcctaa

SEQ ID NO: 2870 - DNA, 1107 bp, Bacillus licheniformis
atgaagaagtcagaatggaacgaagaacggctgaaggcgttactaagccaacttccaacggttaaggataatcgttcggcaaatcagatctatcaaaagctgattctcgcaccaaagcgtaaatcaccgaaaaaacgggtcggcgcatttgctgctacagttttggttctctttcttctgatgctgatcactccccagttaatcgaacagatcagatctcaaaacagcgccgacgccaacatttcttctgacggaaaattggtgcagacggaggctgatgctgccaagtctgaacctgcaaatacgtttgtcgtctcacagaatcaaaaagacgactatatcaccttcgctttccttgacgagtccaagtctgtcgttgtcccggtaagcctcgagaaaagcactggcatgacaaatcttgaagatgcgcttcacgcatacagccggcttggagtggaccagtttacatcatttgacacagcttaccttgataaggtgaagttcaaagagcagaaaaacaataaaaaactgaagattcaagttgatgagaaaataccggagctatcagtcgaagatttcgaacggctgaaaaatgtgatcaacgaaacctttaaatggggatcgtatgattctgttctgtttatttccaatgataaatcgggtgttgaatttgaaacattcggaatgctcgccgatatggcgattatgcaccagacgcaaaaatgctactatttatatgaaagctcagacgggcgccggttccttgcaccttcaagcgaatcttacgaatcggtgcaggaagcgattaagatgatgaaaaacgaagaaagcggcactcatttaaaacccattttatccgatgatacgccgattgaagatattcaaaagaatggaaaagaactgatcattcaattttcttcctccgcgaatattgaaaataaacccgaagatgtcttgatggtggaaggccttctattgaccgcgaaagatttcggcttcacaaaagtgaaatttaaaaacgcatccataaccaaggtcggcgcctatgacctgtcgaaatctgtacaggttccgtacgcaccgaatccgatgacgatagaaaactaa

SEQ ID NO: 2871 - DNA, 585 bp, Bacillus licheniformis
gtggaagaaacctttcagaaaatatatgatcagtatcatcaggatttatttcagtttttattttatatggtaaaagacaaaaatcaggcggaagacttagttcaggaagtatacatccgcgtcctgcattcttacgaaacatttgaaggcaggagcagcgaaaaaacctggcttctttcgattgcgcggcacgttgcgatcgactggttcagaaagcagcagacgatccgccagcggattttggggacgtttgactgggagaaacaagatgtaaaagaccgcaagcctctgcctgaggacatcgtgatgcaaaatgaaaacctaaaggaaattttcgaggccctagacaagtgtacgcttgaccaaagatcagttatcgtcttgcgttttattcaaggatattcgatcagtgaaacagcaaaagccttgaatttttccgaaagcaaggtaaaaaccactcagcaccgcggtctgaaagtgcttcgtaaacagatggagcttttgaaggaggatccaaagaatgaagaagtcagaatggaacgaagaacggctgaaggcgttactaagccaacttccaacggttaa

SEQ ID NO: 2872 - DNA, 885 bp, Bacillus licheniformis
atgaaaaatgtgatattgtttgtcctcgcgctagtgataacgatcggcagtgtggtgtcatactggatttaccgtacagtcgccaaatcaataaatggaatgtacgaacctcttcatcgggatgccgagcagaaggatactgctccgcacgatcctatatccattcttttattggggatagatgagcgccccggtgataaaggacgcccggattctatgattgtaatgactgttaacccgaagacaaagaaaacgacaatgaccagtattccgcgtgatacaagggtgtttatcaaatcaaaaaataaattttcgaaaatgaattcggcttatacgtatggcggaattgaaggaaccgttgaaactgtagaacaatttttgaacattccaatcaattattatatcaaaatcaatatggatgggtttaaagatatagtagatgcgattggcggcgtaacggtggataatcggattgatttcacccttgaaggcgtgcatctgtcaaaagggaagcagcatcttgacggcaaaacagcattgacatatgcccggatgagaaaagacgatccccgcggtgattttgggcgtcaagagcgtcagcgtgagattatcaacgaaattattcatgaaggtgcacaattaaaatcattaacaaactatcaggagattttggcagcattagaaaaaaacatcaaaacaaacttaacactggacaagatgatcgatattcaaagttcttataaagaagctgctaaagatattaagcaggtagaaattgaaggtgaagacaaaaaagttgacagcttatggtatcacctagtgactgacgaaaagagaatggagatttccaaaaagcttcgccaacaattggacttaaagtcataa

SEQ ID NO: 2873 - DNA, 831 bp, Bacillus licheniformis
gtgtcaaattcaccaaaagaagatcataaattgagcgcactaggaaaattagtgctaggtatgttgattgtattcggtgtgactttgttatgcatttcttggaatgcgcttgccggcccaaagcaggaaccgataaaagaaaattccgcggcttcagcatcggtgccgggaggcaaacataaagcagagaaaaaagaaagtaagcaaacagcgccggaaatcggaaaggtcgtctatttgtcatttgatgacggtccgaatcctgcggcttcagataaaatcttaagtttgctcgataagtatcatgcgaaagctacatttttcatgttaaaaccgaatattgaacaaaatcccgatattgtgaagaaaatggttgaaaacggccattctgtcggctctcacggagtgacgcatcaagtatcgaaaatctataaatctcctgaaagcttcgcggcagaaatgaatgatacgcttaaagccatcaaagaaacgaccaacgttgacacacatttgatcagatcgccttacggatcaaagccctatatcaccggtccatttcaagaagtcattaagcgcgaccattttaacctttgggactggactgttgattcagaggactggaaatctgcaaatacaaacggtcaattcgtgaataatgtgattcagcaagtcaataacctttccggtgttgagccgctagttgtattgatgcatgaaaaaccgacaactgcggcccatttagagaaactattgaaatacttccaagaaaacggatatgaaatgaagcccattcatgattcgataaaaccggttcatttcagatggaattaa

SEQ ID NO: 2874 - DNA, 168 bp, Bacillus licheniformis
atgctctttaaatataagaggaagatatcgcagaagttcgaccaacttgtaaacaaaatgtcacaaaaagaagaaaaacatcattttttgaggaatgataatcaggctaattaccctgcaaaaaaagtgaaagaagtctttacaaaagaaaaaccttatttcggttaa

SEQ ID NO: 2875 - DNA, 1131 bp, Bacillus licheniformis
atgaaaaacaaaccgtttattatatgggcaggagtgctgctgtttctgatcattatcgtgtccagttataatgtcggaaaaagatcggaaacgattattatcccaagcggggaagaaaatcatatctatgaccagaagacccgcccttttcaagtcaatacgatctatcgtcttccaaaagtcgggcagctgctcgggtggtcttcaccggattccgttgtcggttttttcaagggagaagggacatccgaacgtacagcgcacagtcttcagcgcctttcctccccctatgaaaaagctgaaatcgtaaaaggcattgaaagcaacacgtccaacctaaaaatgtctccagacggaaagcgtatcgccggagtcactttgtcattaagtaaggcatcaatgcagctgttttcgccggcgagcgggaaaaaaacagaaatcgccagcacctccgccagcaatgaggtctatgtccaagatgtttcatggtcaaataatagcagatacgtttgctatcttgttttagatgtcgggcagggggatgagaccggccttcgtgtttatgatacggcttccggaacgcttaaaacgtattcattgaatgattttgcggagaaggattcgcttaccggagttaacatctccgataatggacgagatttgctgtttaccgtgttgcagcgttccgacgagtacgggatcagaatgggaaccattgacggcagccgcattaaaatcgaggacaagcgtctggacagccgcggcgggcctgtttggttaaacaatgatcaatttgtattcctggacaccggggaaaccctgtgcgaatatgatcgcagaaacggagagctttctgctctgctcgataaagtaactgtttttaaattctcaaacgactttaagaaaatcgcttactctttaaaggatgaagacaatatctatgcaggtaagcttcaggggaaaaatatcctctatgaagaaccgatataccacggcaccatcccttcggaaatattttggagtccggacggcaacagcctgcttgttaacgctcaataccagtaccctgccatggagagtgcatccgtgcgatttttagaagagcaagcttatatcatcacatttaaataa

SEQ ID NO: 2876 - DNA, 1452 bp, Bacillus licheniformis
gtgttacggaccatcaagggcaagtttattgttggcttttttctgattttttctctctctttccttgtgctcaatcacacggttaagaacgtcatttggtcgagtaacgaaaaaattgtaacatcggatttagtcgaactgaaaaaaaacagtaccgtctatgtaaaccaagcatttttaatcaatcactataaaaacaatgaactttatttcggtgatatggccgatgaaatggtagataatttaaatcactccacaggaagcaatgtcggtgtttatacagtagatggcgcattgttgtcttcttctgatcagaaggtgttttccagagggagtgatgaagatcttcaacaggcgatcaaaggaaagactgcctatcatatcacctataaccggaataaagcaaaagtgtttttctcatatccggttgtcattgaaggcacaaaagtaggcatattacgcttttcgaaaaatttcgacctgctgtataagcagagcggagagattctggatattgttttttatatcgcgcttgcaatatttgtggcggcgttccttttctcctatatcctgtccagacatatcacgattccgctcgtcaagctgacagatgccacctcacaagtcaagaagggtaagctggatatggatatccactttaatagaaaagatgagattggccagcttgccgtcaactttaacgatatgatcagcaggattcgggaacaaattttaaccatcgaaagggatcgcgaccgtctaaaagaacttaacgaacaagaaaaacggttttttgataatatgacgcatgagctgaaaacacctctgacttccatccaaggatatgctgagatcataaaagataaaggggaagcggaccggaaattttttgataaaggaatgaaccacattgtcgaagaaagccggcgcctgcataatttggtgatcaagcttcttgaagtatcccgggaaacgtccaagagtgctcaatttgacaggatcgacgcaggcgaaattttaaaagatgtttgcgagtcgatgaaatttcgggcagaacggtataagaaaaggatcacctgtgacattgaagatggcctgtacgttcttggtgaggtgagcaggctgcgccagctttttatcaatctgctggacaacgccatcaaatacagcttatctcattcggaaatcatcattaaggccgaaatcgttggagaaaacattctttttacattcaagaatccaagcgatccattggaaaatgaccaacacaccaaaatgttccaacctttttattcagtcaatcagaagattaaggaagaaggaagtgtaggtttgggattaagcattgtgaaaacaattgttgacgaacacggaggaacaatcgagatgttctacaaagaaaaccacacagtgattcaagttgaattagcttacgcaaaggttgagaaatga

SEQ ID NO: 2877 - DNA, 702 bp, Bacillus licheniformis
atggaaaaaacaaaaatactgattattgaagatgatgaggcaattgctgatttgctttcatacgggctgacgtccgaaggctttgaaacgtgcacggtcaataacggttcttcaggaatgaggaaactagatcagttcaaacctgaccttctgctcctcgattggatgctgccggactgcagcggattggatatttgcaaaaaagtgaccgaaagctgtaatattccaatactgatgattaccgcaaaatcagatatcacggataaaatactggggttggaattcggggccgatgactatattacaaagccgtttgatctgcgcgaagttgtcgcgagaatacgcacgatccttcggcgtctggaacaagcccatcatgtgaacgaacgggaaacggaaaaagtggatgagatccggtttaaaaatattgtgatcgttccgggcgaaagactggtgaaaaaagacggggcagccgtcgaattaactcctaaagaatatgatctgctaatgactttggttgaccatcggggaaaagtttttacccgttcagagcttttggaattcatctggggatacgattttttcggtgacacccgtacagtcgatacccatattcaaagactccgcaaaaagcttgatgcaagcgacttgattaaaacagtgttcggcatcggatataaattcgagaagcaggaggagtag

SEQ ID NO: 2878 - DNA, 132 bp, Bacillus licheniformis
ttgacgaagaatcttgttccatacgaaacaaagagcacctgttcatacagaacaggtgctcagttatttgagggcaaaatgtatccaatttgtaaaatttctgtatatcctgaaacgtttatgcctttgtag

SEQ ID NO: 2879 - DNA, 1782 bp, Bacillus licheniformis
atgaagttttggaagagcgtagtcggtaaactgtggtttaccatactgcttttggtttcatttgtcttatttatccttacgttctttctgctcgagtttattgaaaactaccatgtagatgaagcggaagctgatttgacaaagctcgccagcaaggtggccgtcatcatggaaaaccaaaaagaccaggagacagccagatcgattacatgggagcttgccgatgaactgacgagcatcgccgtcatcaaaaatgagaatgaatattggtattcaccgcgggaacatcaaaaagtggcttccatcacattaaaagatattaaaaacgatccagatctgaacgaagcgcttcgcaagcatcaaaaagtgcagaagaggacggttatctccaatcaaaagaacgatcagctgattgtcggcgtaccctacgggaaaggcgaagatgaaggcatggtgtttctttctcaatcgcttcttgccgtcaaggatacgacacagcatacgacgaggtatatcctctttgccgctgcgattgcgattgtgttaacgacgattttcgctttcttcctctcaagccggattacctacccgctcagaaaaatgcggcagggtgcccaggacttggcgaaagggaagtttgatacgaagattccgattctgacccaggatgaaatcggcgagctggcgattgcctttaaccaaatggggcgccagctgaagtttcacattacggcactcaatcaggaaaaggagcatttgtcgaatatcttaagcagtatggccgacggcgtgatcaccattaatatcgacgggacaatccttgtgacaaaccctccggctgaacgctttttacaggcttggtattatgagcagaacatgaatgtaaaagaaggccatgaactgcctcccgaagcgcgagagctttttcaaaacaccgtcagcacggagaaagagcagatgattgaaatgaccctgcaaggcagaacatgggtgctgctcatgagtccgctgtacaatcagtcccatgtacgcggagcggttgccgtgttgagggatatgacggaggaaagacggcttgataagctgagaaaagattttatcgccaatgtcagccatgagctgagaacaccgatttcgatgcttcaagggtacagtgaagcgatcgttgacgacatcgcaagctctgaggaagaaaaaaaggaaatcgcccaggtcatctatgacgagtctttaagaatgggaaggcttgtgaatgatttgctggaccttgccagaatggaggcggggcatatttccttaaacgttgaaccggtggagctccgcgagttttttgagagagtgttcagaaagttttacggagtggccggggacaaaaatattacgctttctcacaatcttgatctgcatgaagcaaaatttgtgtttgatccggacaaaatggagcaggttttaaccaacctgattgacaacgcgatccgccatacaaatgccgggggcaccgttcatgtcgatgtgcagtctgctgaaagcgggctgaagattgccgtgaaagactccggcagcgggattcccgaagaggatctgccgtttatttttgaacgcttttataaggccgataaagcaaggacgagaggaaaaggcgggactggcctcgggcttgcgatcgtcaaaaacatcgtcgatgcacacaacggatcgatcaccgtccacagcatgctgaacgaaggtacttccttcacgttctacattccaagaaataagcaggatgatggccaaatttga

SEQ ID NO: 2880 - DNA, 723 bp, Bacillus licheniformis
atggaacagacgaaagagacaaaaatattagtagtagatgatgaggcaagaatcagacgacttttaaaaatgtaccttgaaagggaaaactacaagatcgaagaagccgagaatggcgatgaagccatcgacaaagccctcggcaacgattacgatttaatcctgctcgatttgatgatgccgggaaccgacggcattgaagtatgccgccaagtacgcgataaaaaagccactccgatcatcatgctgacggcgaaaggcgaagaagcgaaccgggtgcagggctttgaagtcggaaccgatgactacattgtgaaacctttcagtccgagggaagtggtgctgagagtcaaggcgctcctaagaagatcatcgcaaacctcttacctgaatacggatacaacggcaaaaaatgtgcttgttttttctcacttatccattgatcacgatgctcacagagtcatggcggacggaacggaagtcagcctgacgccgaaagaatacgaactgctttactttctggccaaaacccctgataaagtatacgatcgtgaaaagctgctgaaggaagtatggcaatacgagtttttcggcgacttgagaacggtcgatacccatgttaaacgtttacgtgaaaaattgaacaaagtctcgccgaaagctgcgaaaaaaatcgtaacagtatggggcgtcgggtataaatttgaggtcggaaacgaatga

SEQ ID NO: 2881 - DNA, 1176 bp, Bacillus licheniformis
atggcagagttaagcggcaatttattgtacgcggcatttctcttgtatctctcagcggtcttcttttttggcggctccatcaggagcaaggcttcagaccggaagaagaagaaccgctgggcatcgatcgcagtgttgatcacgatcatcggatttgtatgccagtttggatattttattgcgagatggatcgtttccggacacgcgccggtcagcaatctctttgaatttacaactgctttcagcatgatgctcgtcctggcgttcatcatcatctactttatttacaagctgtccgcattgggactgtttacgcttcccgttgtcctgcttttgatcgcatatgccagcatgtttccgaccgatatcacaccgctgattccgtcgcttcaaagcaactggctgtatattcatgtcacgactgcagccctcgggcaggcgattctcgccatcagctttgtcgccggcgtgatctttctgctcaagcatgtggatcattcaaagccgggcaaaaaaacgttctggctcgaatgtgtcatgtttatgcttgtgacaacgctcgcgtttatccttgtgacgacctcattccgcattgggggctatgaggcgcagtttaagtggattgataaagacaaccaggaagacgtcatgatttacgagcttcccgctcttatcggcccgaataaaggagaacttttaacggaggagagaatggagccgcttgtcaatgtgccgcccattttttcaggccggaagctgaataccgttctctggtcgtttggaaccggcgccttgctttacggtgtcatcaggctgatcatcagaaaacgcatcagtcagcttcttcagccgctcgtgaaaaatgtgaaccttgaccttgtcgatgaaatcggctatcgctccgtttcgatcggctttccggtttttacgcttggcgcgcttattttcgcgatgatatgggcacagctggcgtggagcagattctggggctgggatccgaaagaagtctgggcgctgattacatttttgttttatgcagcttatctgcatctcaggctttcgagaggctggcacggcgaaaaatcggcgtggctcgccgtcatcggttttgccattattatgtttaatcttatttttgtaaaccttgtcatcgccgggcttcactcttatgcatga

SEQ ID NO: 2882 - DNA, 1632 bp, Bacillus licheniformis
atgatgaaagaaatcaaatgcgaatgcggccatgtgaatccggcgggtaccgttttgtgtgaatcgtgcggaaagccgctggtcaaacaggatgccaaactccttgacatgcggtatgacggaagtgcgagacgctctcaaacctataataaaacgatcgtagataaaatatggaatttcttttcgtctgtaaaggtcggcgtctggctgatcgtcattacgctgacagcatccgcttttggaacgatatttccgcaggaaatgttcctgccgccgggtgcgcaggctgatacatactacagcgaacaatacgggcttctcggacaaatctattatgctctcggttttcacaatctctacggttcatggtggtttattattctggttgcctcaatcggcatttcgcttgtcatctgcagccttgaccgggtcgttcctttgtacagggctctgaaaaaccagggcgtcacgcgaaatccgaactttatggagaggcagcgcctattcagccggacggaagcggacatgtctgaggacacaaaatcgcaaatcatcggtaagctgaagaaaaaacgataccgcgtcaaggaagaaaacggcaacctatttgccgaaaaaggccgtttttcaaggtggggcccatatgttaaccatatcggactgattatattcctcatcggggtcatgctcagatttgtcccgggcatgtatgtcgacgaaaccctttggatcagggaaggggaaacggtgccaattccgggaactgacggccattactatttgaaaaacaaccggtttataaaagaaatgtacgacagtgaaaaagaaaaagaagtattttcagaggcgatcaccaaagctggtgacgggactgtcgcaaaaacatatcaaaccgatgttgaactgtatgaaagaaaaaatgacagcctgccgggcgaagcgcctgaattgaagaaagtgaaaaacggcaagatcaaggtcaatgacccgttgaaattcggttcatatgcactctatcagctgacatacaaggaaggcgagctcgacaaaatggtgtttcagctgattgaaaaagacagcgggaaatccttcggcaaagtggcaatcgacctcttggagccgaaaccggaatatgatcttggtaacggttacaaagttcatatagcaagctacctgccggacttttattttaacaaagacggggaaccgagcacgaaaacgaggaatccgaacaatccggcatttgtattccagatcaccgcaccggataagcctaaaggagaaaaaagtttcgtggcgattcaggaaacaatcgaaggttctgacgacaataaatacaaaatgaagtttgaccatgtcgaaacgaagaatctctcaggcctcacaattagaaaagatttgactttgtgggtgctcatggtcggcggtgccatctttatgatcggcgtcattcaggggatgtactggcaccatagaaggatctggctcagaacgctggacgggcatgtgctcgtcgccggacatacgaacaaaaactggtacgggctgaagcaggacttgaaggccgcgctcgcggatacggggatatccgaaccggccgatcaaaaagaactgtcaaaggaaaaaaaataa

SEQ ID NO: 2883 - DNA, 550 bp, Bacillus licheniformis
atgagggggcggattatagaaaaaaaagcgtttttacattcggacaggcatcctccttgtgctgcttgcagcgcttggctacacgctgtacagcgccgtgtttcaaaacacggagagtgtggcggtgggggaaaaagctcccaatttttcgctggaggatgttgacggcaaccgtctcaaactggacgaactaaaaggcaaaggggtatttttaaacttttggggaacatggtgcgaaccatgcaaaagagaatttccttatatggcgaatcaatacaaggtgtttaaggataaaggggtggaaatcgtcgccgtcaatgtcggcgaatcgaacctcgccgtccgaaactttatgaaagaccacggcgtcaattttccggttgtgcttgataaagacaggcaggtccttaacgcatatgatgtcacaccgctgccgaccacgtttttgatcaaccctgacggagagattgtcaaggtcgtgacgggcgagatgacagaacggatgatccacgattatatgaatatgatcaaaccagagggatcgtcatga

SEQ ID NO: 2884 - DNA, 735 bp, Bacillus licheniformis
atggaacgacttcaaaaagtaatcgcccacgccggtatcgcatcgaggcggaaggcggaggagcttataaaagaagggagagtcacggtcaacggcaaaaccgtcagagagcttggcgttaaagtatcaagctccgatcggattgaggtaaacggcatccagcttgaaagcgaagaacccgtttattttctcctgtataaaccgagaggggttatatcagcagttaaagacgacaaaggccggaaagttgtgaccgactttttcaccgaggtggaggagcggatttatccgatcggaaggcttgattatgatacgagcggcctcttattgctaacgaatgacggggacttcgccaataaattgatgcacccgaaatacgaaattaataaaacgtatgtagcaaagctgaaaggcattcctttaaaggagaatttaaaaaaacttgagcggggcgtgcgccttgaggatggaaagacagctcctgcaaaagtgaagcttttgtcgcttgataagaaaaagcagacaagcatcgtccaaatcacgatccatgaggggcgaaaccgccaggtcaggagaatgtttgaagccatcggacacgaggtgctcaagctgaaaagggaagagtatgcttttttgaacctggcgggcttgaaaacaggggaaaaaagagagcttacgcctcatgaagtcaaaaggctcagggcattggcagaacacggtaaagcggctttctaa

SEQ ID NO: 2885 - DNA, 537 bp, Bacillus licheniformis
ttggaattcatcaactggctttctctggcccttatcccgtttatcatcgccacgattctgctatacggtacattcaaaaaagttccgacttatgaagcgtttgttgagggggggaaggaaggaatccaaattgcattttccattatcccttatttagtcggtatgcttgtagcgatcacggttttccgggcttcaggggcgctcgatttttttatgaatcttttaaagcccgtgttttccgccgtgggaattccgacggaagtggttccgctggctctgatccggccgatttcgggaacggcagcgctcggcatgacgaccgatttgatcgccgtttacgggcccgattcgttcatcggccggctggcctctgtcatgcagggatcgacagacacgactctgtacgttttgaccgtctatttcggagcggtcggaatcaagaaaatgggggatgctttaaaggtgggactgcttgctgatttagcgggggttatcgcgtctgtaattattgtaacattgctgtttggaagcgcctga

SEQ ID NO: 2886 - DNA, 588 bp, Bacillus licheniformis
atggtcaatataatctgggtcggcttaacggtgatcggtctggtgtttgcgcttttcaacggaacggttcaggaagttaatgaagctgtatttaaaggatcgaaggaagccgtcacgattgcgatcggactgatgagcgtccttgttttttggctggggctgatgaaaatcgctgaacagtccgggcttctcgaaaaattcagcaggctgtgccggccgttcatttcaaagctgtttcccgagatccctccggatcatccggcgatgggatatattttatccaatttaatggccaactttttcggattgggcaatgcagcgacaccgctcggtattaaagcgatggaacagatgaaggcgctcaaccggaaccgcagggaagcgagccgctcaatgatcacctttctggcggtcaatacgtcaagcattaccttgattccgacgaccgtcatcgcggtcaggatgacatatgatgcaaaggcgccgacagacatcgtcggtccgaccattttggcgactttaatatcggggatctttgcgatcttcatcgaccgatacttttattatagaagaaaaaagaaggggtga

SEQ ID NO: 2887 - DNA, 1155 bp, Bacillus licheniformis
atgcgcttttttctaaaacaagcggcagcagccatcatgatatgctctcttttatgctcttcatacgaaaccgctcaagcacagccctcccttcatatcagcgcaaaaagcgcgattgtcatggacgggcaatccggacgggttttgtttgcaaaggatgagcatgaaaaacggcgcattgcaagcattacgaagattatgacagccattttggccgtggaatcgggcaaattggatgagacggtcacggtcagcgacagagcggtcaggacagagggatcatcgatctatttaacaagcgggcaaaaggtgaagctgaaggaccttgtttacggtttgatgctgagatcgggaaatgatgcagccgttgcgattgccgaacatgtgggcggaagcctggaaggctttgtctacatgatgaatcaaaaagcggccgagctcggcatggaaaacaccctgttccgcaatccgcacggacttgatgaccaccctgatcactattcctcggcctatgatatggcgcttttaacaaaatatgcgatgacaaatgaaacgtacaaaaaaatcgccggaacgaaacgctataaagcagaaacgatgcaaggcatctggagaaataaaaacaagcttttaacagggctttacaaatacagtacaggcgggaagacgggatatacaaagcttgcaaagcgtacgctcgtctccacttcatcgaaagacggaaccgatttgatcgccgtcacaatcaatgcccctgacgactggaatgatcatatgaacatgttcaactatgtattcggccactacaaaacatatatcatcgccaaaaaaggcgagattccgaaattaaaagactctttttacggaaataaagcttttattaaacgggatgtcacatatcttttaaacgaagaggaaaaagaagatgtgaaggttgatatcgagcttcttgaaccgaaaaaatcatggcgtaaaaacaaaaaagaaatcccggacatcatcggagaaatgaacgtcatgttcgacggaaaaacgattgcaagcgtaccgatctattatgaaaacgagcgaaacaaaaaaccgaaaaaatcgtttttcgagacctttcaatccgtattccaaaaagcggcgggcggttcatcatggtcaatataa

SEQ ID NO: 2888 - DNA, 492 bp, Bacillus licheniformis
atgggaaaatctatggcaagagcccaaaccgagcaggcaggcgaatttttagcacagaccgttcagacgctgagcgattatttaaacgaaacgacgctttcatcccttgaagccgaagagcccgggagaagagattattatcgcgatgtcctcagcaacttgagaaaactggcggtttactgtgaagaagggcttgcggcctgccgaatcaggctgcagcaggatccttttcaggaggctgcagccgaaaggacgctctatcaggtctatcatcgatgcatagaagaattttttacaccgaaaaaagatacttggtacgaagacagcagagcggcctacacgggaaaaaacgccatttgctttcacgaaccagcgccggcctcattaaaaaatttgatggcttcgcttgaaacaggatatcaatcgatgagagaagaattggaatactatgcgactgactatcgaatgaagatggttcagccgagatcatag

SEQ ID NO: 2889 - DNA, 594 bp, Bacillus licheniformis
atgacgcttgatatcgtgaattggaaagccattgtcgaagcgcttttgtatgccgccggcgacgagggcctgacaaaaaaacagctattatccgttttggaggtcgatgaagccgagctgctggatattatgcttgatgtcaaagaaacctatgaaaaagaagacaggggcatcgagcttgtcgagtatgcggatacgtacatgctttcgaccaaaaaagaattcgccgtctatttgaaaaagctgatcgaagccccttcaaaagggctttctcaggctgcgctcgaggttttggccatcgtctcttataagcagccgatcacgagagcggaagttgaggagatcagaggggtcaaatctgaacggattcttcagagcctggtcgcaaaagcgctgttatgcgaagtcggacgggcggatggaccgggcagggcgatcttgtacggtacaacagaaacatttctggaacaattcggcttaaaaacgcttgaagagcttccgccgctgcccgaaaatgtagaagaagacggggttcaggaagaagccgatctgttcttcgaaaactttaaccagacgttcgaagatttaaaatag

SEQ ID NO: 2890 - DNA, 756 bp, Bacillus licheniformis
atggaatatcaggtgaaaatcgaggcgtttgaagggcccctggatctgctgctgcacttaatcaaccgccttgaaatagacatttatgacatacctgttgcgaagataaccgagcagtatttattatatgtgcacacgatgcgcgaacttgagctcgacgtggccagcgagtatttggtgatggctgcgacccttctcagcatcaaaagccgaatgcttcttccaaagcaggaagaagagctgtttgacgaagagtttctcgaggaggaagaggatccgagagaagaattgattgaaaaattaatagagtacagaaaatacaaaagtgccgcgcaaaatttaaaggagcgcgaggaagagcggcaaaaagcattcgcaaagccgccgagcgatttaagcgactacgccaaggaaatcaaactcagcgagcaaaagctgtccgtcaccgtttacgacatgctcggggcgtttcaaaaagtgctgaaccgcaaaaaaatcaaccggccgtctgaaacaagaatttcaagacaggaaataccgatagaagagcgaatgacgcaaatcgtcgactgtttgaaatcgtcccgcaaaaggatgcattttatggaactgttcccgtatgaacagaaagagcatctcgttgtgacgtttttggcgattttggagctgatgaaaaaccagctgatcatcattgaacaggaacacaacttttcagatatttacataacagggagtgaagcgattcatgacgcttga

SEQ ID NO: 2891 - DNA, 96 bp, Bacillus licheniformis
atgggaggtaaaggcttcggctacggcggaggatttgctttgattgtcgttctgtttattttgttgattattgttggagcggcatggatctattaa

SEQ ID NO: 2892 - DNA, 522 bp, Bacillus licheniformis
atgtatccccaagcttatatcgattacctcgccgaattccacggggcaagggattattttgagtgccacgaaattctagaagaccattggaaaaaggaccctcccggcgagcggaaattacactgggtcgggttgattcagctggctgtcgcgctctatcatcagcggagaaacaattttgccggcgcggagagattaatggcgaacagcattcgcatcctggcgtccgaaaaagacgcagttgaatcgctcggattggattacagccgcttcatcgaactgttaaggcggactcaccaaaaaatcgaagcccattccccttatgaaagcatcatgctcccgatcgcagatgaagcattgatcaaagcatgccggaaacaatgtgagaaaaagtcatatgagtggggagcaaacgctgcaccagacgcctttatcattgataaacaccggctgagggaccggactgaagtaattgccgagagggataaacaaatcaagcggcgaaaaaagagcagaggctag

SEQ ID NO: 2893 - DNA, 375 bp, Bacillus licheniformis
atgttaattcgttataaaaagtcattcgaaaagattgcgatggggctcctttcgtttatgccgaatgagaaggacgtcaagcagcttcagcagacaattaaagactatgaatcggacactgaaaggcaactgttcctatggaaagaaggcgaggatattgtcggctgtgtaggagtagagaaaagagaagaagaagtcgagatcaagcatatcagtgtaaatccgtctcaccgtcatcagggaatcggcaaaaaaatggtgtcggctatttcgccaatatttgcacctaaaccgctggttccgaatgaattaactaaaggattctttgagcgctgtcaggatcatgaaaatgaagacatcacatataaccaatga

SEQ ID NO: 2894 - DNA, 465 bp, Bacillus licheniformis
atgaataaaatagaaggtcatgtaattggaacagatttgaaaattgggatcgttgtgtcaaggttcaacgattttattacaagcaaacttctaagcggcgcagaagacacgctgttgagacatggggtcaaagctgatgatattgatgtcgcctgggttcccggcgctttcgaaattccgctcatcgccaaaaaaatggctgaaacgaaaaaatacgacgcagtgattacgctgggcacggttatcagaggagcgacaagccactatgactatgtctgcaatgaagcggctaaggggattgcagcgagcagcatgtcaacaggcgttccggtgatcttcggcgtattgacgacagacacgatcgagcaggcggtcgaacgcgccggaacaaaagccggaaataaaggtgcagaagctgccgcggcagcgattgaaatggcgaacctgacccggtcgcttcaataa

SEQ ID NO: 2895 - DNA, 1197 bp, Bacillus licheniformis
atgtttcacacaattgaagaagcgattcgcgatttgaagcagggaaaagtcatcatcgtagtcgatgacgagaacagggaaaacgaaggcgatttcgttgcgctggcggaatacgcaacacccgatgtaatcaactttatggcttcgcacggaagggggttgatctgcgcgccgctcaatgaagagatcgcttcccggcttgagctccaaccgatggtggacgaaaataccgattctcaccacacagcatttacggtcagtgtcgatcaccgcgatacaaagacggggattagcgctcaggagcggtcgctgaccgtcatgtcgctgatcgctgatcacgcgcatccgggtgattttaaaaggccggggcacattttccccctgatcgcgaaaaaaggcggcgttttaaaaagagccggacatacggaggcggccgttgaccttgcagaagcgtgcgggtccgcgccggccggcgtcatctgcgaaatcatgaatgaagacggcacgatggcaagggtgcctgaactcaaaaaaatagccgatcagcacggcttgaaaatgatcacgattaaagatttgatcgaataccgctacagcaagggaacgctgatcaaccgggaagtgaaaattacgctgccttccgaattcggtaccttcaaggtttacggctatacaaacgaaatcgatgacaaagaacatatagcactcgtcaaaggcgacatacctttcggtgacgagcctgtgcttgtccgggtacactcagaatgcctgacgggcgatgttttcggctcttaccgctgcgactgcggcccgcagcttgccgctgcgctcgcgcaaatcgaacaagcgggccggggcgtactcctgtatttgagacaggaaggaaggggaatcggcttaatcaataaactgaaagcttataagctgcaggaagaaggatacgacaccgtacaggctaatgaaaagctcggttttcttccagaccttcgcaactatgggatcggcgcccaaatcttaagggacctcggcgtgaagcaaatgaagctgttaacgaacaacccgcgaaaaattgcaggtctcgaaggctacggcctgacgatcgcagacagggtgccgctgcagatggagacaaaaaaagataatgaaaagtatctaaaaacgaaaaaatcaaaattggggcatatgcttcatttttaa

SEQ ID NO: 2896 - DNA, 648 bp, Bacillus licheniformis
atgtttacaggcatcattgaagaagtcggaacgattttggacatgaaaaaggcgggaagcgccatgtctttagtcattcaatccaacaaagtgatcgaagatgtgaagctcggcgacagcattgctgtcaacggagtctgcctgaccgtaaatgagttcggttccagcagtttcacggcggatgtcatgcttgaaacgctgaaagcaacatcactcggcacattgaaaaaaggaagccgcgtcaatcttgaacgggcgatggcggcaaacggccgcttcggcgggcatatggtgtcggggcatgtcgacggcactgcatcgatcgttcgcatagaaaaagcggcaaacaccgtatactatgatttaaaacttgacccttcactggccaaaatgcttgtgttaaaaggttcgatcgccgtagacggcgtcagcctcaccatattcggactgacggaggatcaggtaacagtctcgcttatcccgcacacattggatgaaacgatttttcctgcaaaaaaggtcggaagcatcgtcaacatcgagtgcgatatgatcggcaaatacatttaccgctttctccaccaaacaaaacaagaaaaacaggcacaggcattgactgaagcattttttaaagaaaacgggttttaa

SEQ ID NO: 2897 - DNA, 1089 bp, Bacillus licheniformis
atgacggatgcgcattatatgaatcttgcattggagctggcgaggcagggcgaaggccagaccggggccaatccgcttgtcggagcggttgtcgtcaaagacggcgaagtggtcggaatgggagcccatttaaaatacggcgaagcacatgcagaagtgcacgccattcaaatggcaggccgccatgcggaaggagccgtcatctatgtgacgcttgaaccgtgcagccattacggcaaaacgcctccttgcgcggaactgattattcgttccggtttgaagcgggtggtcgtggctgcggaagatccgaatccgctcgtttccggaagaggaatcgagatgctgagaagcgccgggatcgaggtggaaacaggcattctcaaagaacaggcggaagagctgaatgaaaagttcatgcattttatgcggacaggccttccgtatgtgacattaaaagccgctgcaagccttgacggcaaaaccgccaccgcaacaggcgacagcaaatggattacttctgaagaagcgcggatggatgctcaccaataccgaaaaaaccaccagtgtattttagtcggatcgggcacaataaaagcagacgacccaagtttgacatgccgtctccccggtgcggtgaatcagccggtgcgcgtcgttctcgatacgacgctgtcaatcccgctccagtcaaaagtgattcaggataaagaagcgcctacttggatttacacgacgtccaaggcagatcccgaaaaggttcggaacgtggaaaaagaaggtgtgcaggtaaccgtgctcgatgcggatgaacttcaggtgcgcgacgtgcttctgcaccttgcagaccgcggcatcgcttcagtctttgtcgaaggaggcgcaacggttcacgcaagcttcgtcaaagaaggactctatcagcaaataatcttctatcttgcccctaaattaatcggagggctgcaatctcccagcatcctctccggtgaaggctttcaatcgatgaaagatgtccccttactgcaattcacaaccattaccaagatcggccaggatataaagctggcagcaagaccgataaaagaataa

SEQ ID NO: 2898 - DNA, 132 bp, Bacillus licheniformis
gtgaaaatcccgaccggcggtaataaagcgagagacagctttagagcccgtgacccgctgtgcttcgtgcaaagcggtggattcagtgaaaagctgaagccgacagtgaaagtctggatgggagaaggatga

SEQ ID NO: 2899 - DNA, 345 bp, Bacillus licheniformis
atggggaaaataaaattcaagctcacggttctgctcgttttggctgccgtactggccggaggcttttattatttaaaaaacggaagcgttcaggatgtctcaacggcgctcagccaaaccgtctcatctgaggaaaagaactataccatttatcaatataagatcaccaaaattgacggcactgaataccacggggtatcagataacggaacgaagatcattttcaatgcgaaaaatcttaaccaggatctgtccgacattaaagaaggagacaaagtaaaggcctacttctctaatgccaacagaatcgacggattaataaaagtcgtcaaggtggcagaataa

SEQ ID NO: 2900 - DNA, 2187 bp, Bacillus licheniformis
atgaggactttagtactgcttagaggctgccctggcaccggaaaatcaacctggatcagggatcatcaattgaatcaatatacgctgtctgccgatcagctgaggctgatccatcagtcaccagtgttaaatttggaagggaaatacgacatttcccaaaaaaatgacggcaaggtatggaagcttttgttcagcctgcttgaagaaaggatggagaggggagaattcacgatcgttgatgccacacatgcaaaacaaagcatgatttccggctataaagctctcgttttaaagtatcgctacagagcgtatgtggttgatttttccaatgttccgcttgagaccgccctgttgagaaaccgtgagagggctgagcataagcgggtgccagacagcgtggttcacgccatgcacgagcggattttatccgaaccggcgccttcctggacaacagtgatcaagccggaagaatttgccgatgctatgcagtataagccgaggcggcttgacagctacaaaaaaatacatgtcatcggggatgtgcacggctgttttacggtgcttgattcctatttgaaaggcagactcgaagatgacgagttatatatttttacaggcgatatggttgatagaggaatagaaaacgcaaaagtcgtccaattccttctccgtatcaaagaccgcaaaaatgtgattttgctcgaaggaaatcatgataaatatttaaagcaatacgggcatgacgaagtaacaagaagcagcgtattcaacaagaagacaaaaccagaattagacgaagcaggttttgacaagagagatatcagggaactggccaggcgcttccaccaaattgcctacttcacgtatggagaagacacttacatcatcacgcacggcggcatttccgcgctccctgacaaccttctgtttacggctaccagccagctgatcaacggtgtcggcggatatgagacagatatcgaccatgtctttacgaaaaatatggaagggcggaacatcattcaaatccacgggcacagaaacatgttccgacttccagtgcatgcagctgcaaaatcatataacctggaagggcaggtggagcacggcgggcatttaagagttgtcaccattgatcggtcgggaattcaaacacacgaaataaaaaatgatgtgtttaaaacttccgctcctccgcttacttctcatcacgcgcacgaggagctgacggtcgaacattttctaaagcatttggacgaacatgattatgtgtctgagcaaaaactagccggcggcatttcctcttttaactttacgagaaaggcttttcaggagagaaaatgggacagcgtcagcatgaaggcaagagggctgtttattaatagaaacacgaatgaaatcgtcagcagaagctacaacaaatttttcaacatcgaggagcgtctgacgacgaaaatgcatgttctcgttaacacgctgcgctttccggtcaccgtctatgataaggcgaatggatttttgggaacggtcggctacaattctgaaaccgatgagcttgtcttcacctcaaaatcctatacatcaagcggacaaaaagacggccatgcgaaatgggtggaagagctgttttacaaaacgtttgacgcatctcaaacagaggctatgaaagaatatgtgaaaaaacgcaatgtttcgttagtgtttgaagtcgtgctgccagaaaaagatccgcacattatcgagtacgaatcggacaagcttgtccttctcgacattgtcaagaggcagatgaaatatgaaaagctgctgtatgaagacgtccttcgttttgcggagacattccgcgtagaatgtaagcaaaaagtcattacttttcatcagtggaccgatttttataaatggtacctgtctgtgtcaaatgacccgtcgattgaagaggaaggatatgtgattgaagactcggcaggatttatgacaaaattaaaactgcctttctatcaatattggaagttcatccgcggaatcaaacacagactcggcgcggctgctgctcgctcgccccaacacgaggcactgttccattccgagcatgtgaagtttctcgcctgggcaaaaacaaaagacagcgagtattttaaaaatcagtctgttatcgccatccgaaacgacttttacaacgaaacctga

SEQ ID NO: 2901 - DNA, 438 bp, Bacillus licheniformis
atgccgttagtaccatacgaaccatttaaacatttgaatacgatcagaagagagtttgatcgggtgtttgccgattttccggcaaactttggaggagagcacggctttggcgatatcagggttgatgtgcatgaagccgggaatgaaatcgtcgcctcctgcgatatcccgggccttgaaagcaaagaagatgttcatattgaggttgaaaacaatatgcttcatatcagcggaaccatcaacaggtcaagcgaagtaaaagaggaaaacatgcaccggaaagaacgatttacaggccgttttcacagggcagtcgcgcttcctgctcccgtcagccgtgaaggaataagagcttcttataggaacggcgtgcttgaagtgagaatgccgaaagacaagcccgacgaaaaaaagaggatagatgtggaatttcattaa

SEQ ID NO: 2902 - DNA, 306 bp, Bacillus licheniformis
atgaaatctaaactgttgttaaccgccgctgcttcagtagcaggactttctttggcaagtgctgcgctgatgacgcaaacagatggtgtgaaggtcgccgagagaaacgtcacatccgcgccaatgcaaatcgcagagagaaatgtaacatcagcaccggtgcaagtcgctgagagaaatgtaacgtccgcgccagtgcaaatcgcagagagaaacgtaacatccgcaccggtacaagttgctgagagaaacgtaacatctgtcaaaacgtcaccgattcatatcggagaacgaaacgtaacataa

SEQ ID NO: 2903 - DNA, 1131 bp, Bacillus licheniformis
gtgagcgtaaaaatcccatcgacggcagtcggcgtaaaaattaatgactggtataacgcgatacgtaaattcaacgtcacggacgccgaaatgctgaaggcagaaattgagcgcgaaatttctcaaatggaagaggatcaagacttattattgtattacgccttaatggaattcagacacagaatcatgcttgattacgtaaaacctttggaagaagtcgaaaccccgcctgacttttctgaaatattaaaagatatcgaagatgaacaaggaaagctgacaggcctgctcgaatattattttaacttttttagagggatgtatgaatataaaaaccatgattatattaaagcgatctctttttacaggcgcgccgaaaaaaagctgctgcacgtcgaggacgaaatagagagagccgagtttcattttaaaatggctgaagtgttttatcatatgaaacagagccatgtgtcgatgaactatgcgcttcaagcgattgaaacctatcaggcgcatgaaacctacacggttcggagaatccaatgcgagttcgtcatcgcagggaactatgacgatttagagtcgaatgaaaaagcgctgtcacatcttgaaaaggcgctgaagctttcacagcaagaaggccagctcatattggaaggacacacctattacaatttgggaaactgctattataagatgggggatttcgatcaggcagccgagtacttcaacagggctgctgcgatttatcaagaagagtcatcagatattcttccaaaagcgtttttcagtcttgcacttgcatatttcaagttgaagcagctggaaaaggcggatgacgcgttaaacaaaggaattgacatcgcccgccgatcagacgatgcgatctacctttcaaaatttcattttttaaaagctttgtatgttgatgatgacggcagggctccaatgctggagacatttcagctgctcgggtcaaaaaagatgtatcccgatattgaggacttggcattggaagcagctgaatactataatgaaattgggcgcttgagcgactctgtttatttctatcaaacggtattcagtgctcgaaaacaaatgaaaaaaggggactggtcgtatgaaatctaa

SEQ ID NO: 2904 - DNA, 120 bp, Bacillus licheniformis
ttgaatatattttacataaagggtcattttttcacaattattttatttattagcatcgttatttcctatcaggatgtggacgaagaatcggcctcaagtcctgttgcacctggaaaataa

SEQ ID NO: 2905 - DNA, 438 bp, Bacillus licheniformis
atggctaaaaaaggatacatacaactgacaaacggcaaaaaaatcgagtttgaactatatccggatgcggcgccgggaactgtcgccaactttgaaaaacttgcaaacgaagggttctatgacgggctgaagttccaccgcgtcatcccgggcttcgtcagccagggaggctgcccgcacggcaccggaacaggcggacctggatatacgattaaatgcgagacagaagggaatccgcacaaacacgaagccggttctctctcaatggctcacgcaggaaaagataccggaggcagccaattctttatcgtccatgagcctcagccgcacttgaacggcgttcacaccgttttcggaaaggtcacatcaggccttgatgccgtcacttcaatggagcagggacaaggcatggaaaaagtcgaagtatttgatgcataa

SEQ ID NO: 2906 - DNA, 1095 bp, Bacillus licheniformis
atgaatgataaaagagcggcgagatacgatgccgggagggcatttgacttgaagagaaaattctctctttttttctttgaaacctcactcatctttcatccgtctatatttcggaacgcattatttccgttccggcaggcttctttaaaagtacagcaattctgcctgaagcctgcatttttaaggagggcattgagcttgaaaaaatcgatactaggaatctttacagcattgtgtctgctcattttcccgcaggtcagcttcgctgacgccgcagtgggtgatgtcatcgtcacgctggggaaagacttgtcaagccaggacagacaaaaagtattaaaagaaatgaatgcgcctgaaaatgcgaccatcatcgaggtgacaaatgatgaggagcataaatatttaggggattatataccgaaagcacaaatcggaacaagagcgatttcttcttcttcaattaccgtagcgaaaaaaggcaccggtttggaagttcagacacacaatatcagcagaattacagatgagatgtatttgaacgcgctgatgacggccggtgtaaaagacgccaaagtctatgtcaccgctccgtttgaagtgtcaggcacagccgctttaaccggattgatgaaagcgtatgaaacgacttcgggcgaaaaaatttccgaagatgtgaaaaaggtcgcgaatgaagagcttgtcaccacttcagagcttggcgagaaaatcggcagtgaaaacgcgtcagcgctgatggccaaagtcaaggaagaaatctcgaaaaacggagttcccgagtcaaaagaggaattggagaaaacgattgattcggctgcttccgaacttggcgtgacactcacagaagatcagaaaaactctcttatatctttatttaataacatgaaaaatattaatatcgactggaaccaggttggagaccagcttgacaaagcaaaggataaaatcacgaaattcttggattctgaagaaggacaaaactttcttcaaaaactgatcgacttctttgtgtctctgtggaacgccatcgtttccgtattcaccggcggcggcacctcagagtccaacggttaa

SEQ ID NO: 2907 - DNA, 876 bp, Bacillus licheniformis
atgaaaccggccaaagtatccctactccaccgattgctccagtgcctgaagcaatgtgttgattgtaacacagtaaatcgttttacagcaataaacatttttgtgaatattttattgattttggctgtgatctcattcccatattctgctgcggcccatggcgcaacacagtccggcgatcaatattcaagctttgaagaattggagcggaatgaagatccagcttcttaccgaattacggagaagaacgcaagagtgccgatgctcatcatggccatccatggaggcggcatcgaacccggaacgagcgaaatcgccaatgaagtgtccaaaaactattccctgtacttgtttgaagggctgaaatcatcaggcaatacggaccttcacattacaagcacgcgttttgacgagccagcggcgctcgcaattactgcaagccaccagtatgtcatgtcgctccacggctattacagtgaagaccgcgatattaaagtaggcggcacagaccgcgctaaaatcagaatattggttgatgagctgaaccgctcggggtttgccgctgaaatgctggggacagatgacaagtatgccggaacccatccgaataacatcgccaacaagtcgctttccgggctgagcattcagcttgaaatgagcacgggtttccgcaaatctttattcgaccggtttacactaaaagacagggcggcgacgcaaaacgaaacgttttaccgatttacaaagctgctgacagattttattcatgaaaactatgaagaagacggaggggatttcccctctgcaaaaataaaacacccccttcaagtgaaaaaaggaggtgtttcggcggttgtgttaaccgttggactctga

SEQ ID NO: 2908 - DNA, 1320 bp, Bacillus licheniformis
ttgtttttacacggtactagcagacaaaatgaaagagggcacctcgaaatcggcggtgtcgatgttctatcattggcagaaagatacggaacacctctttatgtatacgatgtcgcgctgattagagagcgcgcccgaaaattccagaaggcattcaaggaagccggtttaaaagcgcaggtagcgtatgcaagcaaggcgttttcatcggttgccatgattcagcttgccgaacaagaggggctgtctctggatgtggtatcgggaggagagcttttcactgcgatcaaagcagggttcccagctgagcggattcattttcacggaaacaataagagccctgaagaactagccatggcgctggagcatcaaatcggctgcatcgtgctcgataactttcacgagatcgccattacagaagatctttgcaagcgatcaggacaaactgtagacgttttgctcagaatcactccgggagttgaagcgcacacgcacgattatattacgacggggcaggaagattccaaattcggttttgatctgcataatggacaggtcgaacaagccatcgaacaagtccgccgctcgtctgcgtttaagctcctcggcgtgcactgccacatcggttcgcaaatttttgatacggcaggatttgtccttgcagcagacaagattttcgagaagcttgcggaatggcgggagacttactctttcattccggaagtgctcaatcttggcgggggcttcggcatccgctatacaaaagacgacgagccgcttgcagctgatgtttatgttgaaaaaatcatcgaggcggtcaaagcaaatgccgagcatttcggctttgacatccctgagatttggatcgaaccaggccggtctctcgtcggtgatgcggggactacgctgtacacgatcggttctcaaaaagaggtgccgggcattcgcaaatatgtagccatcgacggcggcatgagcgataatatcaggccggcgctttatgaggcaaaatatgaagcagccgtcgccaacaggatgaacgatgcttgtcatgataccgcatcaatcgcaggaaaatgctgcgaaagcggagatatgctgatttgggatttggaaatccccgaagttcgcgacggagatgtgctcgccgttttctgcaccggtgcgtacggctacagcatggccaacaactacaaccgcattccgcgcccggccgtcgtctttgtcgaggacggggaagcgcagctcgtcattcagagagagacgtatgaggatatcgtcaagctggatctgccgctgaaatcgaaagtcaaacaataa

SEQ ID NO: 2909 - DNA, 330 bp, Bacillus licheniformis
atgtatccaaatcgttatccctacacccccgctcccggctatgcacctgaagatgtatacgccccttatcagccggctgcgcattatgaacagagaatttatgagccttatgaagggcagattattacagctccggcgaatacgagattttggcggagaggaactgaggttttccttcattcgtcaacgattgacccgtacggccgcgaaatgctgtatgtcgtctatccgatcagaagacagaacaacatctgcagcctccgggcagtcgcgatctctgccaatgaatacaaaggcatcggtactcaaagaccggaattcgattattga

SEQ ID NO: 2910 - DNA, 1473 bp, Bacillus licheniformis
atgagtgctcaaaagcaagagaagacgaacgtattccttgatccttctaagaatgaagcgtatttcaagaagcgggtcggcatgggagaaagctttgaccttggcgtacggaaggtctttattctcggacatgaagttcagctttattatgtcaacggattgtgcgacacacaatacatcattcacctgttaagagaactggtgcatctgaatgataaagaaaaagaatcgggcgaggtcgaagacatcgtcgaaaacaggcttttgaaccagcaggtttcaaaagcggaaacgcttgatgaagctgtcgaccaagtgttgtcaggactggttgccatcatcgtcgaagatgcgggctttgcttttatcatcgatgtcagaagctacccgggcagaacgccggaagaacctgatacagaaaaagtcgtacgcggtgcaagggacggactcgtcgagaacatcatcgtcaacacagccctgattagacgccggatcagagatgagcgcttgcgctacaaaatgcttcatatcggtgaacgctctaaaacagacatctgcctctgctatttggaagacgttgcagatcccgatcttgttgaagtattaaaaaaagaaattgaagatgtgaagatcgacgggctgccgatgtcggataaatcggtagaggaattcctggtcggccaaggctacaatccgtttccgcttgtcaggtttacggaaagggcagacgtagccgcaagccatattttagaggggcatgtcatcgtgatcgtcgatacgtcgccaagcgtcatcatcacaccgaccactttgtttcaccatgttcagcatgctgaggaatacagacagacgccggctgttgggacgtttttaaggtgggtgcggtttttcggtattttggcctccacctttttgctgccgctttggctgctgtttgtcattcatccgtcgctcttgcctgataatttatcgtttatcgggttgaataaagacacccatattccgattatcatgcagattttcctggcggatctcggcgtcgaatttttaagaatggccgccattcatacgccgacggcgctttcgactgcaatgggcctgatcgccgctgtattgatcggcgatatcgcgatcaatgtcggcttgttttctcccgaagtcattttatacgtttccctctcggcaatcggagcctacacgacaccaagctacgagctgagcctggcgaataaaatggtgaagctgtttatgctgatattggtggcgctttttaaagtggagggatttgtcatcggattaacgatcttaactatagtgatgacttcgatcaggtcattgcgaacgccttacttatggcctctcctcccgttcaatggaaaagcgttttggcatgttctcgtgcgcacgtccgttccagggggaaaagtcaggccgagcatcgttcatccgagaaaccgctccagacagccgtga

SEQ ID NO: 2911 - DNA, 603 bp, Bacillus licheniformis
atgccagcaaaacgcaaggtcattttggtcacagacggcgatatatacgctgcaaaagcaatcgaatatgcaacaagaaaaacgggtggccgctgcatttcccaatcggcggggaatccgagcgttaaaacaggaccggagcttgtaaccatgatcctgcaaacccctcatgatcctgtattcgtcatgtttgatgattccggacttcaaggtgaaggcccgggagagacagctatgaaatatgtagcgatgcatcccgatatcgaggtgctcggagtcatcgccgtcgcttcaaaaactcattatgcagagtggacgagagtcgatgtatcaatcgatgcagaaggcgaactgacagagtacggcgtcgataaacacggggtcaaagagttcgatgtcaaacgaatgaatggtgatacagtctattgccttgaccagctggatgttccgatcattgtcggaatcggtgatatcggtaagatgaacagaaaagacgatgtggaaaaaggttcgccgattacaatgaaagcggtcgagctcattttagaaaggagcgggtatcatgagtgctcaaaagcaagagaagacgaacgtattccttga

SEQ ID NO: 2912 - DNA, 351 bp, Bacillus licheniformis
atggagtatgtcattgcttttattgcaggcgggctgatttgcgtcatcggacagctcttgcttgatatcttcaaaatgacgccggctcatgtcatgtcaacttttgtcgtatctggagcgatccttgacggattcggcatttacgaccgttttatcgaatttgccggtgccggggctacagtcccgattgtcagcttcggccactctcttttgcacggcgcgatgcaccaggctgagaaacatggctttatcggaatcggcatggggatatttgaactgacatctgccggtatatctgccgctatcttgttcgcttttcttgttgccgtgatttttaaaccgaaaggataa

SEQ ID NO: 2913 - DNA, 1020 bp, Bacillus licheniformis
atgaaattaacaggaaaacaaacatgggaattcgagaacccgctgtttgttaactcaagcggaacagcggtcggtcccaaagaaaaagaaggtcctcttggacacttatttgacaaaagctatgatgaaatgcactgcaaccagaaaaactgggaaatggcagagcgcaagctgatggaggatgcggttcagtccgcgttatcaaaacaaaatcttaaaaaggaagacatcgatatctttttggctggcgatctgctcaaccaaaacgtgacagccaactatgtggcgcggcatttgaaaattccttttctctgcttatttggagcatgctcgacatcaatggaatcgatcgcgatcagttcggcgttgattgacgggggtttcgcaaagcgcgccctagcggcaaccagcagccataatgctacggcagaaaggcagttccgctacccgacggaatacggggggcaaaaaccgggaaccgcgacttcgacagtgaccggaagcggagcggtcgtcctcagccagcagcccggcggaattaaaattacaagcgcaactgtcggaagggttatcgacttggggattaccgattcgcaagatatggggtcggcgatggcacccgctgctgcggatacggtcaagcagcatttggaggatctcggacgcacccctgatgattacgatctgatcttaaccggcgacctttcaggcgtcggcagcccgattttgaaggatctgttaaaagaggaaggaatcaatgtcgggacaaaacataatgactgcgggctgatgatctatacgcctgaccagcaagtttttgcaggtggaagcggatgcgcttgttccgcggtcgtcacctttgcccatattttcaaagaaattgaagcgggaaggctgaacagagtgcttgttgtcgcgacaggcgcccttttaagcccgacgatcatccagcaaaaagaatcgataccatgcattgcccatggcgtcgtatttgaacgggccgaaagggggaacgcttaa

SEQ ID NO: 2914 - DNA, 450 bp, Bacillus licheniformis
atgtcaagtttgaaagataattatcaatcgaaagttaaagcgtatcagccttcaccgccttatgtcctgaactgtatcaaggcatttctcgtcggtggtctgatttgtacgatcggccaggctttccagaatttttatatggctgtgttccattttgatgaaaaaacggccgggaacccgacggttgccacgctgatcctgatctccgctctgttaacaggccttggcgtctacgacagaatcggacagtttgccggcgctggttctgccgttccggttacagggtttgccaacagtatgacgagcgcagcgctggagcataaaagcgaaggctacgtcctcggcgtagggacaaacatattcaagcttgcgggaaacgtcatcgtgttcggtgttgtggccgcttatattgtggggatgatccgctttgcctttgacaagctgttttag

SEQ ID NO: 2915 - DNA, 426 bp, Bacillus licheniformis
atgatcattagcgtgatatttatcatctttctcggactcgcaggaggggttgctgttggatccggctttgtcgcttttcttaccgtgcttggcattatcccgaggctgactcagctgacgaaaacaaaaggatttatccaggcgtatgaatgggctgtcattttaggcgcggttttcggaggatgggaatcgctgaacatgtcccgcttttttttatccaaatggctgcttgttccgatcggcctttttgcgggcgttttcattggaatgcttgcagcggcgctaacagaagtcttgaacgtgctgccgatactggcgaaacgcatcgggatgggagaccggattttgatacttttaatggccattgttttcggcaagattctcggatcgatgttccaatggctcatttttgttcatttgtcataa

SEQ ID NO: 2916 - DNA, 621 bp, Bacillus licheniformis
atggaacgtcaagtttttatcagactccgccaccggcttgaggcagatccggatgaattgattttgctcggccatatcgcacaggtagcgggtgaccgcggatacaaagaaaagcttgaacggctgcctatttatcaggtcagcaaagcggatcaaagcatggtggtgctggacgtgatgaaggtgattgaagctgtacataaatcgtttcctgaccttgatgtccaaaccgtcggcggttctgaaaccatcgtggagatccaatatccgaaaaggggtctgtcgcccgtgcttttcatcgccgtctggctgctcttgttcgtcggtgccggccttgccgtcatgaactttcatgaagatgtcagcatgagggaagtgcacatcctgctttacgaaatggtgacgggcaaggtgaaccgctatccataccttttgcaggttccgtacagcatcggtctcggcctcggcatgatcttgttttttaatcatttatttaaaaaacggtttaacgaggagcccagccccctggaggtcgagatgtttaaatatcagcttgatttggaccattatgtggccatgcacgaaaacaaagaaacgacaaaggatattcatgatcattag

SEQ ID NO: 2917 - DNA, 126 bp, Bacillus licheniformis
atgaagtacatcccatttatcattcagaaaggcgcaaaagaccataaattaccacacaaaaaaaaccggaacgctcccaagagcgtccggtttttcatcggacatccgaggctgcctgcaacatga

SEQ ID NO: 2918 - DNA, 768 bp, Bacillus licheniformis
atggatgtggaggttaaaaaagaaaaccagaacactcagcttaaagaccatgaagtgaaagaactgattaaaaacagccagaacggcgatcaaaaagcaagggacctcctcatagaaaaaaacatgcgtcttgtttggtctgtcgttcagcgttttttgaacagaggctatgagcctgacgacctctttcaaatcggctgcatcggcctcttgaagtcggtggacaaattcgatctttcctatgacgttcggttttccacctacgccgttccgatgattatcggcgagattcagcggtttatcagagatgacggaaccgtcaaagtgagccgctcgctgaaagaactcggcaacaaaatccggcgggcgaaagacgagctttccaagtcaaacggccggattccgaccgttcaggaaatcgccgattatctcgaaatcagttcagaagaggtcgtgatggcccaggaagcggtccgctctccctcgtccattcatgaaacggtttacgaaaacgacggggacccgattacacttctggaccaaatcgccgatcagtcggaagagaagtggttcgataaaatcgctttgaaggaagccatcaaggatttggatgaacgggaaaagctgattgtttatttaaggtattacaaagacaagacgcaatctgaagttgccgaccgcctcggcatatcccaggtgcaagtctcgaggcttgagaaaaagattttaaagcaaatcaaaaaccagatggaccattttgaaagctga

SEQ ID NO: 2919 - DNA, 441 bp, Bacillus licheniformis
atgaaaaatgaaatgaacattcagtttacagcgctcagccaaaatgaatcgtttgcacgggtgacagtcgctgcttttatcgctcagcttgacccgacgatggatgaactgaccgaaattaaaacggtcgtatccgaagcggtcacaaacgcgatcattcacggttatgaaaactcagggcagggaaacgtatatatttccgtcactctcgaggaccatattgtctatttaacgatccgcgacgaaggagtcggcatccctgatcttgaagaagcgcgccagcccctgttcacgacaaagcctgaactcgagcggtcgggaatgggctttacgatcatggaaaatttcatggatgatatttcgatcgactcctcacctgagatgggaaccacaatacacttaacaaagcacttatcaaaaagcaaagcgctttgcaattaa

SEQ ID NO: 2920 - DNA, 354 bp, Bacillus licheniformis
atgagcctcggaatcgatattcacgtcaaagaatccgtattatgcattcggttgacaggtgaactcgatcaccatacagcagaaaccttgagaaaacaagtcagtgaccatctggaacaaaccgacattcgccatattgtcatgaatcttgcagacctttcgtttatggacagttcagggcttggcgtcgtgctcggcagatataaggagattaagcagctcggcggagaaatgatcgtctgcgccatttcccctgctgtcaaacgtttatttgatatgtccgggctgtttaaaatcattcgccttgagcaatcagagcagcgtgcacttgaaacgttgggggtggcgtcatga

SEQ ID NO: 2921 - DNA, 1173 bp, Bacillus licheniformis
atgaaacgtcatttatccaaattgctgatttttacgataatcctgatgactgcgccgtcggcgcttgcaaaagagagcgcaaagaaaccgtcggagcttgctgatgacgcaaaatctgccgttttaatcgagcgggataccggtaaggtgatgtatgacaagaacagccgtgaaaagcttcctccggccagcatgacaaaggtgatgaccatgctgctgatcatggaggcccttgatgaaggcaaaatcaaaatgaaagacaaagtcagaacaagcgagtatgccgcttcaatgggggggtcgcaaatttttctagagcccggtgaagaaatgacggttgaagatatgctgaaagggatcgccatcggatcgggtaatgatgcctctgttgcaatggcagagcatattgcggggtctgaagaggaattcgtcaaaagaatgaatgaaaaagctgctgagctcggcctcaaggatacgtcttttcaaaatacgacaggtctgcctgaagaaggccattacagcacagcctatgacatggcgctcatggcgaaagagcttttaaaatatgaaaacatcacgaaatttacgggaacgtatgaagactatctgagagaaaacactgataaaaaattctggctcgtcaacacaaaccgcctcatcaaattttatccaggtgttgatggagtcaagaccggctttacaaatgaagcaaagtactgtctgacagcttcagcgaaaaaaggaaacatgcgcgtcatcgctgtcgtttttggagccagcacgccgaaagaacgaaatgcccaaatcacaaaaatgcttgattttgcgttcagccaatatgaaacgcatccgatgtataaacgtaacgaaatcatttccgatttgaaggtcaataaaggccgtgagcaaaaaataaaccttgtcacatcagaaccgatttcccttttgacgaaaaaaggcgaaaatatcgaatctgttaaaaaagaaatcaaacagaaagaagatatccaggcccctgtcaaaaaaggcacagagcttgggacgctcgttttggaaaaggatggaaaggtgctcgctgaaagtcctattgtcgctgaaaaagatatggacaaagcggggatgtggacgatgttcaagcggacgatgacccactggacgaagtggagtgaataa

SEQ ID NO: 2922 - DNA, 816 bp, Bacillus licheniformis
gtgaaacagatgattgcaaatgccgcagactatattaaaagcaaaacggaaatcaaacctgcggtcggcctgatattgggatccggccttggcgtgcttgccgatgagatagaagacgccgtccgcattaaatatgaagacatcccggactttcctgtttccactgttgaagggcatgccggacagcttgtcatcggcagacttgaaaatgtgcaagtcgtcgcgatgcaagggcgttttcatttttacgaagggtattccatggacaaggtaaccttccctgtccgtgtcatgaaagagctggggatcgagactttaatcgtgaccaatgccgcaggcggcgtcaatgaatcgttccgtcccggcgatttgatgatcatatccgatcatatcaattatatgggaacgaacccgctgatcggtccaaacgattcctcgctcggcgtcagattcccggatatgtcgtccgcatatgataaggaactgcgcctcttggcgaaaaaaacagccgaagaattgaacatcagcgtacaagaaggggtttacacagccgttacaggacctacatacgaaacgcctgccgaagtgcggttcctcagaacgatcggatcggatgccgtcggcatgtcgacggttccggaagtcatcgtggcaaaacatgcgggccttcgcgtgctcggcatttcgtgtatatcaaacgcggcagccggaatcctcgatcagccgctctcccatgatgaagtgatcgaagtcaccgaaaaagtaaaagccgacttcttgcggtttgttaaagcggcagtcgccaaaatcggctaa

SEQ ID NO: 2923 - DNA, 1185 bp, Bacillus licheniformis
atgcctgcatttgattataaccgcgtatttttaattgtaatggattccgttggaatcggcgaggcgcctgatgccgaaaaatttaatgacaaaggcgcagatacattgggccacattgccgaacacatgggaggcatcagcctgccgaacatggcaaagctcgggctcagcaacatccgtgaaatcaaaggcgtcgaaaaggcggaaaagccgcttgcctattacggcaaaatgaaagaagcctcaaacggaaaagatacgatgactggccattgggagattatgggactttacatagacaaacctttccgggtgtttcccgaaggttttccggacgaattgatccacgaacttgaacagaaatccggaagaaaagtgattggaaacaagcctgcatcaggcactgcgattttggatgaactcggtgcggagcatatggaaaccggcgcgctgatcgtctacacctcagcagactccgttctgcagattgccgcacacgaagaagtcgtgcctctcgaggaattgtacaagatctgcgagatcgcgcgcgagctgacgcttgacgagaaatatatggtcggacgcgttattgcgaggccgtttgtcggcaagccgggcgaatttaaacggacgccgaaccgccatgattatgcgctgaagccgtttgacagaaccgtgatgaatgaattgaaagatgacagctttgatgtgattgcgatcggcaaaatctccgatatctacgacggcgagggcattacggaatcgctcagaacgaaatcgaatatggacgggatggacaagctggtgcaaacgcttgacaaaggttttactgggatcagctttgtaaacctcgtggactttgatgcgctgttcggacaccgccgcgatccggaaggatacggaaaagcgctcgaagagttcgacgcgcgccttcctgaagtatttgaaaagatgcgcgaagatgatctgctcatcattaccgccgaccacggcaatgatccggttcaccatggcactgatcatacaagggagtacgttccgcttcttgtatacagcaaaaaacacgaaaagcctggggcgcttccgctcgcagatacattcgcggacatcggcgcaacgatcgccgacaactttaaaacgaatatgccaaagtacggaaaaagctttttatccctgctgaaatag

SEQ ID NO: 2924 - DNA, 891 bp, Bacillus licheniformis
gtgaaagttcatattaaagactttatccactacgccgttgttgaacgggggctttcccacaacacggttgtgagctatgaacgggatttgaacagctacgccgcctatttagaggagcaggagcagctgaactcttttgaccaggtgacaaggctgcacatcatccagtttttgaagcatttaaaagacgccggaaaatccggaaagacggtcgcgaggcatctcgcttccatccgcagctttcaccagtttctgctgagggaaaaagtgacggcccaggacccgtccgtccatattgaatcgcaaaaaacggaacggacccttccgaaggtgctgtcattacaggaagtcgaaacgcttttggatacgccgaagctgacggggccgttcggctaccgcgataaagcaatgctggagttattgtatgcgacaggaatccgcgtcagcgagatgatcgcattaaagctgtccgatgtccatttatcgatgggctttatccgctgcttcgggaaaggaagaaaggagcggatcgttccgctcggcgaagcggcgtcacatgcggtcggcgaatatctgtcaaaagcgaggggcaagcttttgaaaaaaaataccgaagacgccctgtttctgaatcaccacggcagacaaatgagccgccaggggttttggaaaaatttaaagaaaatcgctttggaagcgggaattaataaagagctgacgccgcacacgctgaggcactcattcgccacacacttgctcgaaaacggagccgatctccgggccgttcaggaaatgctcggacacgccgacatttcgacgacgcaaatttatacgcacgtgacgaaaacaaggctgaaagatgtgtataggcaataccatccccgtgcatag

SEQ ID NO: 2925 - DNA, 225 bp, Bacillus licheniformis
atgaaaatgctgaaaacggccgccgatatgatcaaggtgtttgtgctgtttaccggttttaccgtcttgttttattatgctatgatatggataaattcagagtatgaaaactatcatcggtatgataaacctgaaggagcagccctcaaggtcgcctcgatggaagaggacgagcagggcagctggtttaaccggttaatctttttttatttgaacggggagtag

SEQ ID NO: 2926 - DNA, 450 bp, Bacillus licheniformis
atggaaacacgtattgatcggattaaaaagcaactgcattcttccagctataaactcacccctcagcgcgaggctactgtaagggtgctgcttgagaatgaggaagaccatttaagcgcagaagatgtatacctcctcgtaaaagagaaatctcctgagattggtcttgcgacagtatatcggactcttgaactgttaactgaattaaaagtagtggataaaatcaattttggcgacggtgtgtcaagatatgacctccgcaaagaaggtgccgcccatttccatcaccacctggtttgtatggaatgcggttcggttgttgaaattgaagaagatttgcttgaagacgtggaagaaatcattgaaaaggattggaaatttaaaataaaagaccacaggctgacgttccacggcatctgtcatgactgtcagcaaaaggaatcggaatag

SEQ ID NO: 2927 - DNA, 657 bp, Bacillus licheniformis
atgcggaagcccacaatcaaagagctcatctttcaacatatgaaggaccatctgtcgatctatttatttgtttctgtgctgttcttaatgggtgtgattttcggcgcggtcatcgtcaacagcatgacgatcggtcaaaaagaagatttgttctactatttgaatcaattttttggacagctttccgaaggaaaagcagccagctcaaaggaaatgtttttgcagagctttcttcataatatgaaatatttaggcttaatgtggattctcgggatatccatcatcggtctgcccgtcatttttatcatggtcttcttaaaagggatcgtcgtcggatttacagtcggctttttggtcaatcaaatgggaatcaacggctttttcctgtcttttgtctccgtgctcccgcaaaatattctgctgatcccggcgtacttgatcatgggcacctgcgccatcgccttttcgatgaggctcatccgccagctttttgttaaacgcagccttgcagaagcacctgtccattggtttggccgctacgcttttgtactcgtcctgattctcgcaatgtctcttatatcctctttctttgaagcatacctttcgccagtgttgatggaaaagctgacagagtacgtcttgccgaaacagcattaa

SEQ ID NO: 2928 - DNA, 1347 bp, Bacillus licheniformis
atgagcgggtttatggagaagtttgagcggaacgtggagcggtttttggttcccgttgctgcaaaattgaattcacagcgccatatatgtgcgatcagagatgcttttattctatcatttccgattattatggcaggatcgattatcattttattgaattttgccattttatctccggacgggtttatcgccaaaattttatttcttgaaaagatatttccgaacttggctgattaccagtcggtctttacgcccgtactgcgggggtcgctcgatattatgtccatatttgtcgtgtttctcgtcgcccgcaatttagccatctcaatgaaagcggatgaactgcttgccggattaacggctgtatcctgttattttatcatttattcaccgtaccgcctgatcgaaaacgagagctttttaacgacgaaatggctcggcgcccaaggactgttcgtcgccttaatcatcggaatcatcgtcggtgaagtgttcagcaggctatcaaatgccaagcgactgcaaattcatatgcctccgcaggtgccgcctgcggtcgcccggacatttaaagtgctgtttccgatcatcttcattacgattggttttgcgatattaagctttgcgctgatgtccctgtcgaaaaacggtctgcatgaattggtgtatactgtgctgcaggcgccgttgagagagatgggaacgaatattttcaccgttgtttttcttggaatcgtcgccaactttttatggctgttcggcattcacggtccgaatacgattgcggcgatcagagaaacgatttttgcagaagcaaaccttgaaaacctcggttttgccgctaaaacaggctctgcatggaacgctccgtttcctgaaacatgggcgctgaatgacgcctttgcgaactacgggggatcaggcatgacgctggggcttttgatcgcgatattcatcgcttcaaagcggcgggattataaagatatcggcaagctttcgatcgggccgggaatatttaatatcaatgaacctgtcattttcggacttccggtcgtgctcaatccaatcttcatgattccctttattatcgttccggcagtcaatactgtcatcggctatttgttcatcaagtttcagctgattccgccgatcgcatacgctgttccgtggacaacgccagggccgttgattccgtttctcgggaccggaggaaactggcttgcgctcggcgtcggctttctctgcctcgccatttcaacgatgatttatctgccgtttgtgatggctgccaacaagactgtgaatacggacagggagcattccgcggaaaacaggaaggaatcataa

SEQ ID NO: 2929 - DNA, 300 bp, Bacillus licheniformis
atgaagaaaattttattggtttgtgcggccggcatgtcaacgagcctgcttgtcagcagaatgaaaaagcatgcagaggcgctgaacgaagaggtcgacatcattgctctgcctgtatccgaagcggggactgccgcgtcaagcgcggacgtcgtattgttggggccgcaagtcaggtaccaaaagtcacaggttgaggcgagcgcaggagacacgccggtccaggtgatcgacatgcgagactacggcaccatgaacggcgaagctgtgctgcaaaaagcgctgcagctgatgaaataa

SEQ ID NO: 2930 - DNA, 1473 bp, Bacillus licheniformis
atgaaacctgtccatcaagaaaaaattcaaacagacctcacgctctcaaacagcgacttgcagcctctgaagccggaggaacgcacatggaaagcggttaatttcgcatcgatctggatgggctgcatccataacatcccgacttatgcaacggttggcggactgattgcgatcggactttctccgtggcaagtgcttgggattatcgccgtcgcttcgattgttctctactcggccctcgcgttgaatggacatgccggcgcaaaatacggcgtgccttttccagtattaatcaggtcttctttcgggatctacggggctaatataccggcgctcctcagaggtttcgtagcgattatgtggttcggcattcaagcgtttgcgggaagcacggcgatcaacatcctgatcttaaacgtatggagcggctggaaagacatcggcggcgactggaacttatttggtttgcatttaccgggtcttttgtcatttgttttcttttggggaattcatcttctcgtcctccatcacggaatggagtcgattagaaggtttgaagtctgggccggcccgctcgtttatctcgtctttggcgggatggtgtggtgggcggtcgatattgcaggggggctcggtccgatttattcgcagccgggaaaatttcagacattcagcgaattaatttggccatttcttgccggtgtgacggggattatcggcatttgggcgacgctcattttgaacattcagtttgcagcctcccaaaaagaacaaatcagaggacagttttacggtttgccgggcacattcgttctatttgcatttgcaagcatcaccgtcacctccggctcacaggctgccttcggggagccgatttgggacgtggtcgatattctcgcccattttgacaatccgtacgtgatcgctctttcggtcattacgctttgcatcgccgccatttcggtaaacgttgcggcgaatattgtctcgcctgcctatgatctggccaattttttgccgaaatacatcgatttcaagcgaggcagctatttgacagcagttttggccctgttcacttttccatggaagctgatggagaatgaagcgagtgtgttttcgtttctcggcacgatcggcggaatattgggcccggtcgcaggcgttatgctcgccgattatttcatcatccggaagcgcaccctctgcctcgaagatctctattccgcaaaaggacagtatatgtattataaaggctataattacagggcttttgctgcggtagctctcggagcgcttatatctctcatcggctcttacatccccgccatgaagccgctttatgacatctcctggttttcgggcgtgctgatcgctgccttcgcctatatctttttaatgcgcatccatccgccggctgccatttcaaatgaaacggctcaatacgaaggcggcggaagaaaaataagcgggtaa

SEQ ID NO: 2931 - DNA, 561 bp, Bacillus licheniformis
atgaatccgatactgctcgattttccggacagcttcgaaacagagcgcctgctgatcagagcaccgcgcgccggtgacggcaaggcagtatatgatgctattgcagcttcgttttcagaactaaagccgtggatgccgtttgcaagggagatccccgaggaagagcgtgtagaaatcaacgtcaggcgggcacaggccgattttattttgcgcaacgatttgcggatgcatattttccataaagaaacgggaaaattcgtcggcagcaccggtcttcaccgcatggactggaaagcgaaacggtttgaaatcggctattggcgcagttccgaattttccggacaagggtacatgacagaagcgcttaacggtctcattgatttcgcgagaagacacgtcagagccaagcggcttgagatatgttgtgacagcatgaacacgaaaagcagaaaaatggcggagcgcctcggtttcgagcttgaagccgttttacaaagcgatgacctttcgaacgatttgagcgaatatcgggacacatgcatttattcccgcatcttctaa

SEQ ID NO: 2932 - DNA, 369 bp, Bacillus licheniformis
atggccaaaagcaaggcaaggaaaaagcgcgagcacatgttgagaaacacaggcagagatgccgccgcatcaagaggcaaggcgccggacttcggcacgcacgtcagaaaaacgaaaagcaggcgggaagagcttgcaaagctgcatatgaaacataaacgaaagaacccttatgatttgcttcatgaagatcataagggttctttttttagaagatgcgggaataaatgcatgtgtcccgatattcgctcaaatcgttcgaaaggtcatcgctttgtaaaacggcttcaagctcgaaaccgaggcgctccgccatttttctgcttttcgtgttcatgctgtcacaacatatctcaagccgcttggctc

SEQ ID NO: 2933 - DNA, 453 bp, Bacillus licheniformis
atggagtggaaactaaaatcgtatgaggaattgtcgaaggaagagctgtatcgcatcatcaagctcagaatagacgtctttatcgttgaacaaaactgtccgtatcacgagcttgatcacttggatgagcgggcgcaccatttatttctgagccaagaaggagagatcgctgcgtattgcaggctgttcccgagcggcacagcataccccgaggcatcaatcggccgggtgatcgtccgcaaagaagacaggggaaagggatatgcgcaggcgcttcttgataaagcgatccgctttttggaaggcgagtgggaagagacaaaggtcaagatcagcgcccagaatcatttgcgttccttttacggctccttcggatttaaagcaatctcagacgtctatatggaggacggcattccgcatgtggatatggtcagaacggaagaagccgtatga

SEQ ID NO: 2934 - DNA, 1164 bp, Bacillus licheniformis
atgaaagaaatattcgcagacatgcatatccatatcgggcggacggaatcaggccggcccgttaagataacggctgccagaacgctaacgctcgacgaaattttgattgaagcaagcgaacataaagggatggaactgatcggcattatagattgtcattcatccgaggtgctggccgaaattgaaaaaggggtgtcttcagggcgttatacagagcttgaagacggcggaatcaagtataaagataccgtgcttttatgcgggtctgaattggaaatcaatgatgacagatgccgcggcccgattcatgtgcttgcctttatgccgtcgatctccgcaatgaagcagttttccggctggctctcagaaagggtgacgaatatccacctgagctcccagcgcatctatgaaacgggcatcggtcttcagcggaaggtgaaagagctcggcggcctgttcattcccgcgcacatttttacgccgcacaagagcctgtacggaaaaggagtcgaattttcgctgaaagaagtgtttgacccgaggatgattgatgcggttgaactcgggctgagcagcgacaccgatatggcttcacacgtatccgaactgaatccttatgcatttttgaccaattcggacgcccattctcttggaaaaatcggcagggagtataataagctgcacatcaaacatgccagctttcaagagttttcgcttgctttaaaaggacaagaggggcgtagcattgccgcgaattacgggatgaatccgcagctgggcaaatattttcaaaccgcttgtgaaacatgcggccgtctgcaggaggcagatgaaacgttgtgcaaagcgtgcggcagccgaaagtttacaaaaggcgtcagcacgcgtctaatggagctttatgatcaggatgaaagcccggtcaagcgcccgccatacgttcaccaggttccgctgcagctgatccccggcatcggcccgaaaacgattcagaagctgaaagaggctttcggcactgaaatgaatatacttcaccgtgtaaaagaaggcgatctaaaagaaaccattcgtccgcagacggcagagctcgtgatcaaagcaaggaacggggatttagagctgaaagccggaggcggcggaacctatggaaaagtgcagagctaa

SEQ ID NO: 2935 - DNA, 567 bp, Bacillus licheniformis
atgatcaaactgaagcatttagaggagaaaaccatatcaaaggaaaagcttttttcaggcaaggtgatcgatctttatcttgaagatgtcgaactgccgaacggtaaaacgggaaagcgcgaaatcgtgaagcatccgggcgctgtagcggtgcttgctttaactgatgaagaaaacatcatcttagttaagcagtacagaaaagcgcttgaacggacgatcgttgaaataccggcgggcaagcttgaaaaaggggagaaacccgaatataccgcgctgcgggagcttgaggaagagacgggatacacggcggcgaagcttgagaaaatcaccgctttttacacatcgccgggctttgcggacgaactggtgcatctgtacctggctgaagagctgacgccgcttgaagaaaagcgcgaacttgatgaagacgaatttgttgaagtactggaggtgccgctttcaggcgcgctgaaactgatggaaactcaggacatctatgatgcgaaaacggcttatgccgtgcagtatctggagctgagaaaggccctgcaagcaaaaaaatga

SEQ ID NO: 2936 - DNA, 177 bp, Bacillus licheniformis
atgaaggtctaccgcctgaatgaccgcatcgtcatgtctgggaaagcatgggaaatccgcgccaagctgaaggaatacggacgaacgcatcactatgtgaaagattggctttctgaaaaagaaaatcgcctgcaaaagcttaattttattgacatcaagaaggactgcatgaaataa

SEQ ID NO: 2937 - DNA, 606 bp, Bacillus licheniformis
gtgggaattgaaaagggccgcaaaggcaaacaaagccggaagcggctgctcgaggtcgctgcaaacgaatttgcaaaccggggattccatgagacaaaagtgagtacgattgtgaaaagagctggactgactcagccttctttctacctatatttcccaagcaaggacgccatctatgacgagctgatcaatggctttcacgcgaacttaaaaaatctgatcgaatcgttccatttagagaaaggaatcgagaaaaaacacgtatcaaaacgggtaacggccgctgtagaggctgtatttcgatttttggcagaggacccggatttgactcgcatcggtttttttctcagccctgaagcaggcgaaatgaaaaaagatttaacgctcgccttgaaagaaaacttgaaagcagagcaggagctcggctacttccgatccgacctggaaatggagaccgttgctgaatgtctgacaggcatgattgagcaccttgccgatatctatttgcttgacggatcaaaggacccctcaagtctcgcaaaacaaatcacggatcttttgatccacggaatgctcgtaaatccgcagcatccagaaacggagtga

SEQ ID NO: 2938 - DNA, 348 bp, Bacillus licheniformis
gtggcatttattttcttaaaagcagggctggcggcatttatgctgaccggaggcgtaatcaaggtgctgcacgttccttttcaagtcgaacattggcgccattatgaatatccgctgtggtttctttctgttacaggatgtctcgaaatcgccggagcgcttggcatgatcggcggaatttggaatgtgcatctggctgtcggttcggggctgttattctccctgcttatgacaggagccatccatgcccacctggtccgggcgcggcagccttttttcacggccatccctgccgcggtttgtttgatttgcgccctaagcatgatcatcgtcgagctgtacttctga

SEQ ID NO: 2939 - DNA, 921 bp, Bacillus licheniformis
atgaaaaaaaggacgctcggacattccgatttacaggtgagtgaagtcggcctaggctgcatgtctctcggaacggacaaaaagcacgcactgtcaattctggatgaagctttggaactcggcatcaattacttggatactgccgacctgtacgattttggacgcaacgaagaaattgtcggtgaagcgatcaaatcaaggcgccaagatgtcatcctcgccacaaaagcgggaaaccgctgggaggaaggaaaaccgggctggttctgggatccccggaaagcatacataaaagaagccgtcaaacgcagcttaaagcggctgcaaaccgactatatcgatctttatcagctgcatggcggaacgatcgaagataacatcgacgaaacgattgaggcctttgaagagttaaaacaggaaggcgtcatccgccattacggcatttcctcgatccggccgaacgtcataaaggaatacgtcaaaaaatcaaacatcgtcacagtcatgatgcaatacagcttgttggacagacggcctgaggaatggctttctctccttgaagaacatggaatcagcgtgattgcaagaggacctctggcaaaagggattctgacagaaaaacccctgtcagatgcaaacgcatcgattaagaaaagcggctatttatcatattcctacgatgaactcatcaaaacaaaggcggacattgaaaaaacagcgcctgatttatccgcaaccgaaaccgcgctgaagtatattctcgcccagccggctgtcggcgcggtcatccccggggcgagcaaactctcccagcttcgggaaaacgttgaatctgtcggcggacgcagcctgacagaacaggaaatcaaagcgctccgcttttatacaaaacgcgacgtgtacactgcgcatcgcgaatga

SEQ ID NO: 2940 - DNA, 234 bp, Bacillus licheniformis
atgggaaagaaaaaacaagacccaaatacccggcagctgctgaaagatgcactcgccgacgatttgaaacataagcttcagcaaatgaaaagcgaattgaaagaggaggacgagaaaagaaaagagcgtgagaaagaacggcttatcaaggaaagacaggaaagggaaaaaaataaaagctttgaagaactcctcaacgaaagcggacttgacgactggaggaagtataagtaa

SEQ ID NO: 2941 - DNA, 930 bp, Bacillus licheniformis
atgttgatttggctggctgctatcggagcggttttgctgttcattgctgcgctcggaatctattttacgaatcaaatcatgtacattaaaaaacggaccgaccaatacattattgagcgggaaactgccgacggccattatgacgaaaaagctttcgccgctctcccgaaggaagaaatcaccctcgcttcttcttacggctacaatattaaagggtactacgtgcacccgcacaaaacgaaaaacaccgtgattatctgccacggagtgacgatgaatctgctgaattcaatcaaatatatgaatctgtttctggatctcggctggaacgccgtcatatatgaccacagaaggcacggcgcaagcggcggaaaaacgacgagctacggatattatgaaaaaaacgatttgaaaacggttgtcaattggctgagggaaaaacacggcgaacaagcgctgatcgggattcacggcgaatcgatgggcgctgtcacaacccttctttacgcgggaatggatgacgccgaggctgatttttatgtggccgactgtccgtttgccacatttgaggatcagctcatttaccggctgaaagaagattttcatcttccaggagctttcattttgccgctcgccagcctctttttgagatggcgggacggctaccgcatccgtgatgtctcccctttatccgtcgtcggaaagatcaaaaaaccggtgctgttcattcacagcaagcacgacgactatatcccggctgaatcaagcgaaatgctttacgagaaaaaaccggggaagaaacggctttatattgctgaaagaggagcgcacgcaatgagctacacccaaaacagaaacagctacaaaaacacggtgcgggactttcttcaagaaatcacaaaccggcacaaagaaggcgaacgagcataa

SEQ ID NO: 2942 - DNA, 240 bp, Bacillus licheniformis
ttgaatcaaaaggcaaaatctttaaagcaaaccgctcaaaataaaacatgggcgtcctttttacatcaaaatcatccgtatacactccttcattggtcaatcggagggacagagtccgtcaaaaaggatgtctggcttcttcaggatgaaatgacctttgaaacaaaggaatttgatacaattgagacggccatctcctggatcggcgatcatatgagcgacattacagatatcctgtag

SEQ ID NO: 2943 - DNA, 324 bp, Bacillus licheniformis
atgcagcttgaaatcactgctcaggcaagacaagccattcaacgggcaacagagccttatcctgataaaaagatccagctccgctatgattccgagggatgcggatgcgcggtcagcggtgtgccggtcttgtggctgacggacgaattatcgggaagttgcgagccccttgagacaaacgggcttccgatttatattcagtcatcgcaaaaagtcttttttgatgaagcgatgaccatcgactattatgagaaagcgggtgcgttgatgctgaagagtccggcacaggtgctttctcccagaatgagtattttagtgaaatag

SEQ ID NO: 2944 - DNA, 198 bp, Bacillus licheniformis
atgtccaaaaaagtgcagattaaagtgatggacaacggcggtttccgggtcacgggagacgtcgaactgatcgacatggaaggaaattctttccctgaaaaaccggctttttcgctgtgcagatgcggaaaatcgctgaaaatgccttactgtgacggaagccataaaggaatgttcgactcttgtgtcagagcttga

SEQ ID NO: 2945 - DNA, 972 bp, Bacillus licheniformis
atgattcaattgttaaaccaaaaagatccgcatacagcccgcagcattgtaaatgttcaaaggccggcttatgaaagagaagcggagatcattcaatttcagggcattccgcagctgaatgaaacggtttttgatgtaatggattcacgagaaactttcatcggctcgtttgagggggaagaattagccggaatcgcttccttcatacatacagctgaaaagctgacgatctgcaggctggccgttcatccggtccattttcgaaaggggattgcaatggcgctgcttcgttatatattgatggtgaaggaagccgaatcgtttgaagtgacgacgggtgcggggaatgagccggcaaaagcgctgtatcggaaattggggttttctgaaattgaacagtatgaacctgaaaaaggggttgttctttcaaggcttacgctgcaagcaccgagaaaggttaaagtcgtctcctataaagaagaatggaagggcgaatttttcaaggaaaaaaagcagcttgaagcgcttttccggaatgaagtcttgcatattcaccacatcggaagcacgtcaattccgggaatgagcgccaagcctatcattgacatactgatcgaagtgaaagatctcggctccgccgccggcttcgaaaaggggatgaaaatgctcggctatgaaccgaagggggaaaacggaattccgggaagaagattctatcaaaaagggagacggaagcgtacacaccatgtccatctgtatgaaagcgggcatcccgatatcagacggcatctcgcgtttcgggattatttaatctcccatccggagcgggccgaagaatatgctgcactgaagatgaagctggcggagatgtttccgcttgacatagcaggctatattgacggcaaaagcggctggataaaagagactgagcgcttggctgaacaatgggaaaaggcggaggaggacagataa

SEQ ID NO: 2946 - DNA, 369 bp, Bacillus licheniformis
atgatttcaaaaacgccggagccgccgtattacgcggtgattttcacatcggtcagaacgaatggggataacggctacaaagagacggctgagaacatgctaaagcttgccgcagaacagcccggctttttaggagcagaaagcgcaagggacatgaacggaaagggaataacggtctcctattgggaaagccttgaagcgattgaaaaatggaagtttcacggcgaacaccggcaggcgaaggaaaaaggccgaacagaatggtactctgactttgccgtacggattgcaaaagttgaagacgcaagaatttcggagcgttccggccggcccccgtcagatggcaccagcggggaggaaatgcaatga

SEQ ID NO: 2947 - DNA, 150 bp, Bacillus licheniformis
gtggatcttgatgaaaacatgggctttgaagcttctctctcatgtgcagcgtgtgccggctgcaaagcggtccgctgcatgtcaacaatgtgccgattggttatcaccagggattttcgatggaaaaaagtgtccaaggttttcgaatga

SEQ ID NO: 2948 - DNA, 615 bp, Bacillus licheniformis
atgcgtcgtcattcatttttatctattctattgatttgcatgctgtctgttgtgtccgtattttcattccggccttcagcagcttccgccgcttcccacaatccggtcgtcatggtccacggcatcggcggagccgattataacttcatcggcattaaatcgtatttacaatctcaaggctggacaagcagtgagctttacgccatcaactttatcgataaaacgggaaataatataaacaatgctccgagattatccgaatacatcaagcgtgtgctgaatcaaacaggagcatcaaaagtcgatattgtcgcccacagcatgggcggggccaatacgctctattatattaaaaatctggatggtgcggataaagtcggacatgtcgtcacccttgggggcgctaatcgtctcgttacaaacacggcgcctcagaatgacaaaatctcatacacttcgatttacagcacaagcgactatatcgtcttaaacagcctctccaaacttgatggtgcaaacaatgtgcaaatctcaggcgtaagccatgtcggtcttttgttcagcagcaaagtaaatgccttgattaaagacgggctgaccgccagcgggaaataa

SEQ ID NO: 2949 - DNA, 216 bp, Bacillus licheniformis
gtgatgatgattacagtaaaaatacgccatactgctgaaaccgaaggcacagacataggtgacttcactcctgctgaactcgaaagcatcgtccagacgatcagaaaatacggagcttggctttcacctgatgccgacacagatgattataaatttacattccaagacgctaaatacaatctcgaacaaagagtctttgaaatcatagtggagtaa

SEQ ID NO: 2950 - DNA, 1530 bp, Bacillus licheniformis
atggcttacatagcaaaacgcatgatcataccgattatttttctcttcattctcgcttcctgctccgccggaggcgctggctcagcgaaaggggaagagaagaaactcacctttcttttcaatattccgagtcaaacccttgacccgaatcttgatgtcaattatacggctatccgcgccggcatcagtgaaacactcgtcaaaatcagtgcggacctttccatcgaaccgtggcttgccaaagattggaaaagcaaagacggacaaacttgggtcttcacccttaaagacaatctgacgtttcaaaatggtaaaaaagcggatgccaaagcggtaaaagcgtctttagaacggacgatgcgcgagagtaaagccatgaagaacgccctaaaaatcaaggaaataaaggctgaaggacaaacattgacgattacaacgaaggagccgtttcccgaattcccttcagaattggttcatccaaacacatcgatcattgacgtcagcgcagcaaacatttctcaacagcccgtcggaacgggacctttccaagtttcctcttttgaggccggccataaaatagagttagaacggtatgacgattattgggacggcaaaccgaagctgaagcacgtcacattctcgtttaatgaagacgcaaacgcccgcgtcatggctctccaatcaaaagatgccgatatcatttacagaccgagcgttgaggatattgaccaaattcaaaaagattcgtcgattaccgttgattcggtaccgagcttgcgcgttcaccagattctttacaatacaaagaaggatcatcttgctgaccgccacctgcgccgcgccttcgacgcactactgaaccgcaaagaaatcgctgaaagcattttgaacggacatgctcagccggcagacggccccttcctagccgatttcccattttcctccgatacggttcaaaagccgagcggacttcaggctgcaaaagctgagctgaaaaaagccggctacgagcttgaaaacggtaaagccgtaaaggacggaaaagccttgtcttttacactgctaacctatcagtctcgtccggaattgcctttaatcgcgcaaattcttgaatcaaatgcgaaggaattgggcatttcgattaagattcagcaagtcgaaaatattgatgaatatttggcgaaaaacgatgactgggatttagcgacatacagctcaatgaccgcgccaagaggcgatgccagctatttgctgaacaccgcctatatgccgaacggcgctttaaactacagcggcatcgaaaatcaaaccttgatcaaatggattaaggaattcaaccgcacgatcgacaaagagaagcggaaccgacttgccaaaaaagcagctgaattgatcgagaaggagacattgaactcttttatcgtgactcccgaaaacatcacagcctaccgagacggtgtattaaattgggaaacgagcaaaagtgagtattatatgctgacgaaagatttggatgtgaaaacgaaatga

SEQ ID NO: 2951 - DNA, 942 bp, Bacillus licheniformis
atgaagcagatcgccaagcggctgtttgaactggtcctgttcttattcctgctttcatttatcagctttgtgtttatgaaagcggctcccggtgatccggtgaaacagatgcttcgcgtagatgatgttgcggtaacggacgagcagatcgaggcattcagagaggagctcggtttggacaaaccggtttatattcaatattggaactggttcaagcgctttttccaatttgatttgggaaaatcctatacaacacacgaacccgtcatcgacgagctcagccggaaattcccggcgacattgcttctaaccggcgcatcgcttctcgttatgctgctgattgccgtgccggtcggaacgctttccgctttataccgggatcggtggatcgatcatctcagccgcttgctcgctttagtgggagccgcgctcccgagcttttggctcggattgatactgatcgatctcttttccgtcaggctgaattggctgccgtcgatgggagccggaacgtttaaacatttgattctcccctctctcacgcttgggatcgcgatgtcgggcgtttatgtccgccttgtacggtcaagcctgatcgaaagccttggtcaggatttcatcagatctgccagggcacgcggcatcagcgaggcgagaattttcttctttcacgcgtttcgccattgtcttgtccctgtcatcacgatattcggggtcagcctcggcagcctgctcggcggcacggtgattattgaagtcctgtttgcatatcccggcgtcggcaagcttgtcgttgatgccatcgttcagcgtgattatccgatcattcaggggtacattcttttcatggggatcgcggttgtcctgatcaatcttttagtcgacctctcttatcggtacctcaatccggaaattcgcttaaaggaggctggtcgccgatga

SEQ ID NO: 2952 - DNA, 822 bp, Bacillus licheniformis
atgagaaaaaacgtatttcgatctaaaacaggactatggtttgtgctgctgttttccgcggcgctgttcaccgtccccttctttttgccgttcgatccgctccgcacagatatggccaaccgtcttcagccgatcagtatgcagcattggctcggaaccgaccatttgggcagagatatattttcccggatggtcgccggtgcgaaagcgacggtcggcaccgccttgggcgcgattctgatttccgttttcataggtgttcctgtcgggcttgtctccgggtttttcggcggacggctggaccggatgatgatgagaattgttgacgcggttatggcttttccggactatattgtcgcgattgttttaagcggtttgcttggtccggggctgatgaacttaatattggccgtcgtcgctgtcaaatgggtcggctatgcaaggctggtccgcagcacggttttttcggaaaaacaaaaagattacatcgccttggccgagcttaccggtttaagctccggggcgattttaaaaaagcacctgctgccccatgttctcggcaacctttccgtacttgcgacacttgatatcggaaaaacggtgttaatgattgctgccctgtcctatatcggcctgggtgctcagcctccatacccggaatggggcgccatgctgaacgacggaaaacattacttcttgcatgcgcctcagcttatggtgattcccggtcttgcgatcatgttcatcgttctgttgtccaacctgtacggtgatcgtttaagggacaggtttgacgtcaaacacaagaaaggagtttcttag

SEQ ID NO: 2953 - DNA, 843 bp, Bacillus licheniformis
atgccgatgttatccattgaggacttatcaatcagctcccggcagcacaccattgtcaaaaatgcctccttctcgattcatggaggggaatggttcgcgctgctcggggaaagcggcagcggaaagagcctgaccgcttcggccatagccgggctgcttccggacggactaacggtgaccggcggagacgtgatatttgaaggccaacagatgcttcaagccggacgcaaagcactccgacgcgtgcgcggaaaggatatcgcctgtatttttcaggactgtcacggagcattcaccccttttatacggatcggcaaacaaattgacgaaatggtcaaaacgcatacaggttggtctaagaataagcgaagagaagcgattctccatgcttttcgggaggtttctctgccggaaaacagagtatatgaaagctacccgtttcaattgagcggagggcagctgcaaagggccgcgattgctcaagcgatggtgctccgccccaagcttctcatcgcagacgaaccgacgacggctttagacagcatcacggccgcggacgtcttgcaacagctcgccgcgatgcgcgccaaaacaaactgcgccatcctttttatcactcatgacctgcggcttgtcaaaagatacgccgatcaaaccgccgtcatgcaaaacggagaaatcgtcgaaagcggcttaaccgctgatttaattagacagccggcacatgaatatacgaggtgtttattcgcggccatcccgccgctgaaaaatcctccgccaaggctgacggcagccccgcctgaaacaaaggaagcggtgctggcgggaacaggaggtgcgtga

SEQ ID NO: 2954 - DNA, 786 bp, Bacillus licheniformis
atgacccattctgcagagaccgttctttttgtcagcaatctgacaaaacattacgcttgcggccacaaagcggttgacaacgtatcattctccattcgaaaaggcgaatgcctcgggctcgccggcgagagcggcagcgggaaaagcaccctcgcacgctgccttttgctgctcgaaaaaatcgatcacggagagattaggcttcatcaacatccgcttaccggcataaacaaaaaagagacccggagactgcgtcgaaaactgcaggctgttttccaaaatccagctgcatcattcaatccaaagctcaatattatcgattcagttatggagccgcttgatgtttccaaacaagacatgccgtcatttttaagggacttccgaggcagccgccgtctgacggctgagcgtctgttctcaatggtcggccttccctcgcgcctccttgaccgctatccgcacgaattaagcggcgggcagcgccagcgggccttgatcgccagagccatcagcactcatccgtctttaatcatctttgatgagcctacagcaagcctggatgtcaccagtcaggcgaagatcctggatcttctcaaagatttgcaggatgctatgggcctttcttatttatttatttcccacgatctggccgctgtccacttcatgagccatcgcatcatggtcatgaaagacgggcagattgccgatcaatttgaaaaagaagagcttttttctgccgaaaggcacccatatgccaaaaagctgcttcaggtgtttgaatcctaa

SEQ ID NO: 2955 - DNA, 1359 bp, Bacillus licheniformis
atgaatcacaagcaatatctagcactcgccgttccgctgatcatttcaacgatcaccactcctttattgggtgcggtcgatacggcggtcgccggccagctttcctcccctgcttacatcggcggtgttgcagtcggaacgatgatttttaatacgatgtattggctcctcggttttttgcgggtaagcacatccggattcgccgctcagtcactcggctcccaaaacagatcagagagcgttttggcccttgcccggcccgtttgcatcgcgctgtttgccggactgatgttcatcatcttgcaaaaaccgcttgaatacgcagcgctgacgctcatacagcccgaccgccataccgctgaattcgcctcgcagtatttttcgctgaggatttggggagctccatttgctttaatcagctattgcattctcggctggctgatgggaatgtctctaatcaaagtgacattgcttttgcagatttcgatgaacgtcttgaatatcgtgcttgacatcgtttttgtctacgtctttcacatggaagtatacggcatcgctctagccactttgatttcggatgtgacgggctgcctgatcggctgctggcttgtgaaaacgaatgccgccatgccgtttaagctgccgtccgtcaagcttttattcgacccgaaaccgtttaaaaaaatgatggttgtcaaccgagatctattgattcggacattgtgccttttgacggttttcaatttatttacggctaaaggagccggcttcggcgctgaaattttagccgcaaatgcgatcttgattcaaattcattatttgatggcttatgtttttgacgggtttgccaatgcatcgagcatctttgccgggaaagccgttggaagaatggatcgggatctctattcccgtacgctttccctttcgatccagtggtcgctgatctcggccgcgctgctttcagtcggctactttctcttgagaaatgcgatccttccattgtttacaccgcttgaaagcgttctggaagcagcgaaaacttacgatgtttggatcgctctttttcctttggccacaagtttcggactcgttttttacgggattttcacaggcgccaccgaaataggcccggtcagaaattcaatgtttttggctgttctcgtcttcctggccgccttttttaccgctgtccccgctttcggaaaccatgggctgtggctcgcttttcttttattcagccttgggcgttccgtattcttatgcatggctgttcccgggctgaccacccggcttttcggagagcgcagtgctgcgagagaggcaggccaaagaccgaaatcattaaaacaccccggctaa

SEQ ID NO: 2956 - DNA, 642 bp, Bacillus licheniformis
atgaagacaccttttatcagaaatgaccaatataattttattaagtttcaaacggacagcctcgtccagggacatgcgaacatcaatgacgaaaacgtccttgacgctttgaagtgcaatgcgctggatcaagtgttcaacctgtttcctgatctcagcagcgatcaaaagtctttgctggagaagctggcagaagtggaagacagcggtgaagcggtgcgctttttagctgaattaaaacttcatgtgattccatttcagaatgtaacggtaaagactgctaaaaagctgttctctaaagtgaaaaaattaaagacgcccgaatttgagcagatggatttcagcggatattcctacctgggatggaacgatgcaggatcaggcaggaaatacatgattgtggacgccggcggaaagctgaccggaatccacggcaccatcaaatccagcaataaaaaaggaatctgctcgatatgcaacaggaccgaagagatcggactgttcatggcccgcgtgaaaagcgggaaagaaacctatacggacagaggcaattacatttgctgtgacagtgaaaaatgcaatcaaaatttgatgacgctggatcatctgaaccatttcgtcgcacaattaacgaaagaataa

SEQ ID NO: 2957 - DNA, 87 bp, Bacillus licheniformis
atggtaaatgacattcatttgccgactgcagcgtctcatgcaaagcctgttatcttgaaaggcgatactttgcatgaggcggggtta

SEQ ID NO: 2958 - DNA, 339 bp, Bacillus licheniformis
atgcttcgcgacagaggcagtatcaaatgggtttccatgatgctgcctgagcacgtggaattgctcagggaatatcatgaaagctttcaaaaaatcaaaaaaccgatcctggatgaacaaaaatatgaagaattcaatgaaatcatttgtgaagcgatggcagaaaacaggtttttgcaatttgcttattaccggcagggggaagtgaaaacgctcgccggccggattcactatgctgacgctctgaaaagggagctgcggatcgtaagccgggcggatgaaatttgcattttaaagatagaggatatcattgagattgaatacgattgtcgtttataa

SEQ ID NO: 2959 - DNA, 1263 bp, Bacillus licheniformis
atggattacagtcaatatccgtcgcgttcggttttgtgcgttgatatgcggagcttttatgcaagctgcgccgcagtcctgctcggacttgacccgatgacttgcttcttggcggttgtcggaaacacggagcggcagggaagcatcgttctcgctgcttctccggctctgaaaagagagttcggcgttcaaacgggaacaaggctttatcagctgccggatgatccgcgcatcaagctggtcaatccgaagatggggctgtttgtccgtgtttctacagagctcacccggctgttctgccgctatgtgccgcctgatgccattcatacgtacagcgtggatgaaagctttattcaggtggacggtgttgaaagcatgtggggagacgcccgaacgattgcgatgaaaattcaagatgatatggaaagggagtttggccttccctgtgctgtcggaatcggaccgaatctgctgatggcaaagctgtgccttgaccttgaagcgaaaaaatcagcaggcggggtggccgtttggggctacgaagacgtgaaaacgaagctgtggccgctgtctccgctgcgccgcatgtggggaatcggctccaggctggaaaagacgttaaaccggatggggatttttacagtcggccagctggcgcactatgatctcagtcggcttgagaaaacattcggggtgatgggaaaccagctctattatcacgcttggggcatcgatctttcagcgattggagcgccgctcatggaggggcaggtcagctatggaaaaagccagattctgcttcgcgattatccgaatccggaggaagtcaagcatgtcattcttgaaatgtgtgaggaagtggccaaaagggcgcgcgcccaccgccaggcgggccggaccgtcagtctcggcatcgaatacagccgcgatgagcttggcggcggattttaccgttcaaaaacaatggaaagcccttcaaatgtcacgcttgatctttaccatacatgtctggcactgttcgagcggttttatgccggcaaaacggttcggaaaatttccgtctctttgtccaatattcaagatgacaccaatatgcagcttgatctttttcgccccgatcaggaaaagaagcggcagctcgggtatgtgatggacggcatcagagaacggtacggctcaacagcgcttttgcgggccgtttcctacacaaacgccgggacggcccgtctgcggtcaaaattggtcggaggccatcaggcatag

SEQ ID NO: 2960 - DNA, 84 bp, Bacillus licheniformis
ttgaccattccagttcggaatttcgccttattcagtttgatgattcaaattgaatgctctcttgagaacatcagtttttcttag

SEQ ID NO: 2961 - DNA, 213 bp, Bacillus licheniformis
atggatgagaaactgattgaaaaaatgctcggacaggcgctgaagcagtacggacgcaatgttgcaaccgatccgctcagccccggcgaaaaaaaaatcctgaagctggctttgcaggaaaggcggatcgaggagccgaatgaagggctgcatgcccatatcgaggatgtcatctatgattatgtcacaaatcaaggcttgttctcatcataa

SEQ ID NO: 2962 - DNA, 1239 bp, Bacillus licheniformis
atgaaacaaaaatggcagaacatccacccgctcagctggaccattattgtcggaaccattttcggacgcatgggaacagccatgagcatcccttttttagcaatttatttgacacaagtgaaaggcgcctcttccggctttgcgggagctgtcattgcagcgagctctctgatcggaattgcggcaagcttttatggcgggtacttatcagacaggttcggccggaaaaccatcatgctcgtctcgattttcggctggacgttcgtgttcgccggttttgcactcgccgatcatgtctggacattctttatcatgaatgccttaaacggattatgccgcgctttgtttgaaccgacttcaagagcgctgctttcagacgtttccaaacccgaaacgcgccttttcgtctttaatctccgctataccgcgatcaacctcggcgtcgtcttcggcccgcttttaggcctgtatctcggatcttccaaaacgacgctgccgtttttcattgcggctttcatttattttatttatgcggcggtgctggtcattcaatttaaacaccacaccgtaccggcagctgagcgtaataagcgtataaaagtgcgggacgcgctggaggtgacaaaaacagaccgggtatttacgattacgctaatcggttcgattctttgtttgttcggatattcccacttcacatcgacgcttgcacaatacatggcggccagcccgttcattgaagacgggacgaaagtgttcggcatgatgctgacgctgaatgccttggccgttcttgccgtacagtacccgatcgtacatatcgccaaacggttttcaccgattttatcgctgattgcaggaaatgtgctgattagtggaagcctgttcagcctctcttttttcaatgatctatggtccattgtcttgatcattatcgtgtttacgatcggggaggtgcttctcttttcgatgatggatttactggtcgaccggattgcccggcctgagctgaaaggcacttactttggggctatgggcttcacccagcttggaagcgtggtcggcccttgggcggggggaatgctgctggacacctttggagcggaaaaaccgtttttcacttttgcaatcctgtctgctgccaccatttgcggcgttcctttcctggtagcagcctaccggaaactcaaaatggatgaagcaaaagtcaatttaagttcgaaaaaaacgatgcagcattaa

SEQ ID NO: 2963 - DNA, 384 bp, Bacillus licheniformis
atgatccatcatattgaactgtacgtttcagatttggaagcgtcgaagcgcttttggggctggtttctcggggagctcggctatgaggtttttcaacaatgggaaggcggcatcagctggaaagcaaacggcgcctatctcgtgcttgtgcaggcgaaagagcagtttatcaaagcgggttatcacaggtgccgcgtcggcttaaaccatcttgctttttacgcggcatccaaagagcaggtcgacgaaatgacaatgaaactgagagagcggggatgccgcattttatatgaagacagacatccgtttgccggcggaaacgggcattatgccttgtataccgaagatccggaccgcatcaaagttgaacttgctgccccttga

SEQ ID NO: 2964 - DNA, 960 bp, Bacillus licheniformis
gtggcgaatcaggatttgaatttgcacacgttatatacgagtcatacccgtgatgcctgggcaaatctcggcgggcatatgtcggtaaagatgaccgaagaggaagtaaagaagcttgaaggtttaaatgactatctgtctttggaagaagtcgaaaccgtttatgttccgctggcgaggctgctttatttacaccgggcaactcaatttgaacggaacacccgggtaaacggttttttgaatcatcctcacgcggccaagattccgtttatcatcgggattgccggaagcgtcgcggttggaaaaagcacgacggcccgcatcattcagactgtgctctcccgtttgcaggaacggctgaaagtcagtctgatcacaaccgacggttttctttatcctaattcggttctgacagaaaagcagatgatgtcgaggaaagggtttcccgaaagctatgatgtcaaagcgctgcttgagtttttgaacgatttaaaatcaggaaaggaaattgtccacgcacccgtttattcccatctaacgtatgacagattggaaggggtttatgaaacggtagaacaagcggatatcgtgatcatcgaaggcgttaatgtgctgcagacaccgacgatcgaagacgaccgtacaaaaccgcgggttttcgtttccgatttttttgacttctcgatttatgtggatgccgaagaagacctcattatcaaatggtatcttgaacgctttcgcatgctcagggagacggcttttcaagatccgagttcttatttccataaattcaaagacctcgcggacgaagaagcggaccatatggcaaagtcaatatgggagaccgtcaaccgtccgaatttgtatgagaacattctgcctacaaaattccggtctgatttaatcttgagaaaaggcgaaggccacaaggtggaagagattttggtcagacgggtatag

SEQ ID NO: 2965 - DNA, 966 bp, Bacillus licheniformis
atgtctataaagaatatttataatattttcaagaaagagcttgcatttcaatcgtattctaaattgctcatcattttattgcttcctctattattcatttcatccggatacatatatgttcactataaaaatacaatggacagctaccagcagttcaaaaagactgaaaatgaatataaagaactcggcatcgatattaagcaggcgctggagtcgcccgtcaaggtgaaggaaggtgagctgaaaagcgaggatggcgacggagagatcgtcgaaaatattttaaggttcgactatgagaatttcgtcttgtccctccatcacctggagccgaaacagtcagtcactatgacgcttgagctgatgggcttcatcatttttcccttgggtttcacgctgtatgccatctatatctcctcatacgacatcagattcaagacgatgaaagtgaaagcggtcagccatgattggaaatccgttctgtttgccaaacagtgttcggtttacatggtgatggctgccgccgtgatcgccgttgtatgtacggcatatgtgtcaagcctcgtcttttattcccttgcttcaagggatataccggtcggcgagttcacaatacccgctgtttcaaaaagcaatatcctgcttcagctcgctgtcgttctggcggtcagcttcatcttttcgacgatcggattttatttgggcgtcctcttcagaagctttattacgcctgctttgctttatgtcgtttacagcctgctgatccctgctttgggcaggttcgatttaaaaaacctgctgtctaatctcgggcatgcggttttcagtttcagcggcggctttaaactgtttacaccggtgaaggtggacatgattccggtcatcatcattttagccgcatccgtcggcttgctgtctgcggtcacttattacatggcgcacaggcaaagcaaatatgtcgtttga

SEQ ID NO: 2966 - DNA, 663 bp, Bacillus licheniformis
ttgatcaaaatcgatgacctgacgaaatcttatggaagcaaatcggtattcaaccgtctcaacatgaatattgaaaaaaacaaagtcacctttctgatgggagaaaacggcgccggaaaaacgacgctcttgaaatgcctgctcaagcttgaacctttcgaaggcggcatactgtacgacggcgagccgcttgaagcagtcaggagcaaagtccacgtcatctatgacgattccccgttttacgatcatctgagcggctatcaaaatatcaaactactgatcaataaacctgccggcaaagaagagcttgaacaattgtcgcaaaagtttctcggcagggagctgctgaaaaaaaaggtcaagacctattcatacggacaaaagaaaaagctggccttaatgatcgctgcattaaacaaaccgtcattcttgtttttggatgagatatcaaacgggcttgactaccggtccatgatggagcttcaggagctcatcaatgactggtcaagcaggatgacgattgttgccgccggccatcagtttgagttttattcttcaatcgtcgatcaattatacgtgttgaaagacggttcagctatccacatagacaattttaaaacgaatggagcagaattgggcgatgtctataaagaatatttataa

SEQ ID NO: 2967 - DNA, 489 bp, Bacillus licheniformis
atgaaaaaagcgattttagggttttctttgtctgcggcgctcctggttccatcctcattcgctgcggctgctggggacgggcagctgacaagcgagcaaaaggaactgcttgaagccaagacagaatacgttcaatcacttcctgaacaggcatccgttcaaagcggtgtgacggcttatgcaggaaaaaggctgacaattaaaagaggaagcttcctcgcctggtcaaaagattatatcgactggtactacaacggcaaaaaagtatcgaaaagcagcggatcgcaggatgtcggctacgtctttccgaatgtggtgagggcaaaggggattaaaaggtattataagtcatcagggcttcacaaatggagagcgaaaaaaacgctgagcttcggaaccgttacaccgtggggagatgttgaattggccagctcaacctttacagacagaaggtgggtcaataaaaaaggaaaatacggaaacgattaa

SEQ ID NO: 2968 - DNA, 261 bp, Bacillus licheniformis
atgtttcaaaacaaaatcaaaaaagcagtcggagcggttgcatctgcaggtgctttgttagtgtctggattgcccgtaagtgcggatacactgcctgaattaatatgggtgagggacaagtatcccggtgcgcaatacgaatataaggtaataaatggcgagagatatgtcgatgtttacagagtaataaatggtaaaacagatgtcacacgcgaaaaatgtgaaacgatgtaccaagaccgctgctatgtcaaaaaataa

SEQ ID NO: 2969 - DNA, 129 bp, Bacillus licheniformis
atgaacatgcttcgatccgcttttggagaacagagcgtgaacgagcggctgattcttttacagacgcgggctttagagcgcaagcaagcgggaggcgttttgatgcgcctcccgctttccgttctgtga

SEQ ID NO: 2970 - DNA, 507 bp, Bacillus licheniformis
ttgatctatatatacaattgttacggcggcactcattcatctgcacttgccgctgcttatcatctgaaaaagctcccattcagcagaaaaccaacaagaaacgaaattttaagcaccgactgttttaatcaattaagtccgaaggaaatgggaaaattaatctttcacggacttgatgaagaaggcaaccaggtgtacacgatcggcagaggatcgtcaaaagctgtcattccagccatgcgaggcgttctcgagctgtttgaaaaaaacgggaaacttcaggagaaagtcattttttcaaacacgtctccgactgtgccaatagcgatgacattcggcggtttattttcgaggaggctgaaaatcgatccgatcggggttcctttgctggtgcttggagcgcagcaggcataccaagacatcatcaagcttgtgcagcaaacaaaaaaccatgcaaaaacgacttcttcgatgatcgaggtactcgataacggctttaaaggatag

SEQ ID NO: 2971 - DNA, 723 bp, Bacillus licheniformis
gtgcaggaagaatggaacccattgatgaaaaatcgttgcatcatctggttagtcacggggatttgcttaacggtcatctttcaatttccgctgaaaagcgtcgcttcatccgcagacaaatacgccaattttgccgagcttgccgaacatgaaacagaaggagaagattaccaaatcgaatacacagacatgggcaccgaactgttgattctttcaccgcacggcggaggaatcgaaggaggtgtcagtgaacttgtccgcgccttcagcgccgattattccacttatttatttgagggaatcaaaccctcgcaaaactgggatctccacatcacaagcaatcattttgatgaacctcaggccctcaaagcggtcaaagagcacagctatgtgctggcttttcatggatatcatgacatcgttgaacatacgcttgtggggggaacggatacaggaggggcgaaagcgattgtcagagcgctgctgaacaaaggtttttcggcggagctggtcagcccgagccaccggcttgcaggaggaaatcctgaaaatatcaataatcaatgcaaaacaggtcaaagcattcaattggaaatcagcacgcctcaacgagaggcttttttttcggagttcggcctgtggacgcgggcaagttctaaaaatgagacgtttcaagcgtatgtctcagctgttaaagaagttctggaaacgaggtataaataa

SEQ ID NO: 2972 - DNA, 153 bp, Bacillus licheniformis
atggcacctgtccagcctgaggcaattgatataaaaatacgtcacgccgaaagattccgtgcttccgggaacacgtgccggccgctgatgaaaaataaggtaaaggtcgctttcgttttgccgttcttcttatataaaatggcaactgggtga

SEQ ID NO: 2973 - DNA, 228 bp, Bacillus licheniformis
gtgacgtatttttatatcaattgcctcaggctggacaggtgccatcagatcaagcagcgcttaaagaaggaagcagaggttcgatgccgggttttgcagagggacaaagtctccctgtttttatatgatattttgagcctctctgcagggggcatcgctaaaaaaatgcaaacaaaaaaggaacggatgattccgttcctttcttcgagaaaccattattttttatag

SEQ ID NO: 2974 - DNA, 783 bp, Bacillus licheniformis
atggagcagaagttgaaagcgcacaaagtgatgattacaggagcttcaggagggcttggcgaacggatcgcatatcatgctgcaggggaaggagcggagatcattctggctgcgcgcagaagagaccgcctcgatgctttgaagcaaaacatcgcggataaaatcggcgcaaagtgccgtataatcgtattggacgtcagccggacggatgaagttgaagcggcgtttcaagaggccggtccggttgatattcttgtcaataatgcggggttcggcatttttgaaagcgcgcttgacgcttcccttgaagatatgaaagcgatgtttgaggtcaacgtattcggtctgatcgcctgcacgaaaatggcactcccgcatatgatcaggcaagacaaaggccatattatcaatatcgcttcacaagcgggcaaaatagcgacgcccaagtcaagcctttatgcggcaacaaagcatgcggtgctcggatattcaaacagcttgagaatggagcttgcagaaacaggggtcaacgtgacaacggtcaatcctggaccgattcaaacagactttttcaagacggcagataaaaaaggcgattatgtaaaaagcgtcgggagatggatgctagatccggatcgggttgctaagaaaatcgtctcggcaatgatgacgaacaagcgcgaaatcaatcttccaggctggatgaacagcgtcagcaaactctaccagcttttcccttcgctggttgaacgaacaggtcgaagcgctttctataaaaaataa

SEQ ID NO: 2975 - DNA, 954 bp, Bacillus licheniformis
atgaaagacgcaagaatcattcctattgcactgccgactccgtttgcagtcggagacgtcaacatttatttgctcagaggcgaggcgctcactctggtggatgccgggcccaacacaaaggaggcggcagccgttttgaagagcgagctggccgaacagggactgtcattaagcgatatcgaccaggtcgtcctgacccaccatcacgctgatcacgccggactgctggacgaattcccggcagaggtaaaaatcattggccatccgttcaatgaaccgtatatcagtcaaaatcccgattttattgaaaaacaaaagtccttttttacatacctgtttcaacgattcggcgttcccggcgatatgaagccgccaggccataccataaaagcgtcgtaccggtattcatgtaatcggacattgacagagaccgtttcagaaggtgggcaaattgaagggcttgacgggtggcgggttcttgagacgcccggacatgccgcttcgcatattgtcctttataatgaagaacttggaagcatgctcgggggagacttgctgctaaagccgtcttcttcaaatccgcttctggaagtaccgcaaaaaggagggaaacgcccgactccgctgctggattacctggaatctctcggcaggctgcaggagcttccgcttcacatgatttatcccggccatggggaggaaatcacaaaagtgaatgagcttgtcgccaaaaggctggaaaagcagcgaaacagagccgaagaggtgtaccgcatcctctctgaaaaaccgcattcaccttatcagatatgtcgaaaactgttccctgcagtctatgaaaaagagctgttcttaacactgtcagaaacgattgggcagcttgacgatctggaatcccaggggaggatcggagttgatgcggccgatggaatcgattactattatgcaaagtag

SEQ ID NO: 2976 - DNA, 822 bp, Bacillus licheniformis
atgaaacgaataggatttatcggagccggttcgatggctgaagcgatgattaaggggcttgtcaaaagcggtgcaatggaacctgaggcgatattcgttacgaatcagtcgaatacggccaggcttcgtgaattaagcgagacttacggggtatgcggagaagcagatacggcaaaagtcgccgcccggtcggatacactcgttttggcgatgaagccgaaagacgcggcaggaggaatagccgcactccgcccctatttgcgaaaagaacagctgctgatctctgttcttgcaggcattccgattcatacgatccagcattatgccgggcttgagctgcctgtagtgagggccatgccgaatacatcggccgccattcaaaaatcagccacagcctttgcggcaagcccgcttgtcacgcaagagcagatgcaggaagcggctgacctctttgcgacggtcggcagcgttacaatcgttgaggaatctgcccttgatgctgtgacagccgtagccggaagcgggcccgcttttgtttatcggtttgtcgaagccctgcaggcgtcggctgccgagctggggcttcctgaaaaaacggcgaaacagctgattatcgatatgatggcaggagcggctcaaatgcttgaaaccgccagagatccttctgtcatgaggaaagagatcacaagcgcgcgagggacaacggaagcaggccttaggatgcttgacgaccatcaatttgaacagaccgtcatatcctgcgtcaaagaagcggcgaatcgttctgcggaactcagggatatgtttgccgccaaaatttaa

SEQ ID NO: 2977 - DNA, 1605 bp, Bacillus licheniformis
gtgaagtggcagacagtggaagaactgaaacggctgctcatttctcttgttcaatacgaaagcatctcaggcacggccggagaagtggcgcttgcgaaatatatgcatgatgtcttaaaggaccgttcgtactttcaaaagaatcctgaatacttaaagcttcacccgatggaggatgggcgctattttttaaccgccctcgtcaaaaaggaaaagaaatcaaatacggtgctcctcttgagccattttgacgtggtcgatacggcagactacggagaattcaaacatatggcatgcaaagtcccggaactcatggacctattaaatgataaaaaagaacttttgcctgaacgggtcaaaaaagacctggaaagcggcgaatggctgttcggtaggggaagcatggatatgaaagcgggtcttgctgttcaattttctatgctggaacgggcgatgaacggagaatttgacggaaaccttctattaattacggttccggacgaagaagtcaactcgcaggggatgcttgaagcagtacctgtactgaaagctttagaaaaagaatttggccttcattatacagcgtgcttaaactgtgagccgatgtttgaaaaacatccgggtgatccgaagcagtacgtctattcaggcagcatcggcaaagcgcttgccggatttttctgcaaaggggttgagacgcatgtcggcgagccgtttgcaggggtgaatgcgaatctaatggtgtctgagatcaacaggctgctcgaattaaacgtcgactattgcgaagaagcggacggagaggtgacgcctcccccggccaatctgatgcaaaaagatctgaaggaggcctactcggttcagactcctcacacagcggtgtcgctctttaatgtgctgatgatgcagcgttccgccgccgagctccatcgcatgctgctcgacacagccagggaagcggccgccaatattcaaacaaatatcgaacgtaaaacggccgaatatcagcggtttgaagccttcatgccaattaacccggctgtttccgtgctgacgtttgagaagctgtggaacaaagcacaggaaaaagccgggaagcccgaggcggaacgcatcctcaactttgcatttgcgaacaggggggagcttggagaccgcgacttttcaacgaaaatcgtctctgaattggcttcactctgcaaagaagatgctccgatgatcgttctgttttacagtccgccgttttatccggctgtttcttcaaaggacgatcctctgatccgaaaggtgatgagagaagtgaagcagtatgcggccgacaggcacggaattgaatttacagaagtccaatatttccccggcctgtccgatttaagctacctgcagctgcaaaaacagtcagtcgatgcgttcacatccaatatgccgctttttcatcacggctattcacttccaaaaggacgcgaaaacgcactgtttgtgccggtcatcaatatcgggccggccggcaaagatcctcacaaatggacggaacgtctccatgtgccgttttcatttggaaagctgccagatatcctccggctcgcgatacacaagcttctctaa

SEQ ID NO: 2978 - DNA, 1020 bp, Bacillus licheniformis
ttgagtaatcgaaaactattcacaccatggagtttaaaaggagttacactaaaaaaccggattgtcatgtcgccgatgtgcatgtattcctcccatgaaaaggatggaaaagtgcagcctttccacatgacccactacatctcccgcgccgtcggacaagtcggactaatcatggtagaagctaccgccgtcactccgcagggaagaatctctgaccaggatctgggcatatgggatgacgcgcatattgacggacttgctgcattgacgtcacaaatcaagacgtacggcagcaaaacggcgattcagttggcgcacgccggaagaaaagccgaggtcgaaggtacaatctacggaccttcagcgattcctttcgacgaaaattcgcgaacgcctgttgaaatgacaaaagaggacataaaagaaaccgttcaggctttcaaaaaaggagctgaacgcgcgaaagccgccggctttgacatcatcgagattcatggagcccacggatacttgatcaacgaatttttatcaccgctttccaacaaacgcgaggatgaatacggaggttcaccggaaaaccgctacaggctgcttcgcgaagtcatcgacgctgtaaaagaagtctgggccggaccattattcgtacgcgtttcagcttcagactacaaaacaaaaggccttgatgtcgccgattatgtcggtttcgccaaatggatgaaggaacagggcgttgatttgatcgatgtcagctccggtgctgttgtgcctgctgatatcaacgtcttcccaggctaccaagtcggcttcgccgatacaattcgcgctcaagccgagattcagacaggagctgtcggattgatcactagtggccttcaagctgaggaaatcctccaaaatggacgcgctgatctcattttcgttgcacgggagctgctgagagatccatactggccgaaaaccgctgccaaacagttgaacacaaaaattgaagggcctgttcagtacgacagagcctggtaa

SEQ ID NO: 2979 - DNA, 762 bp, Bacillus licheniformis
atgaccataacggaaagaatatatactgttgaagggtgcatgttttatacaaagcagagaaaaggaaaaaagaacgcaacgattatttttgaagcgggctacggtttttcttcaacgacttggcagcccattttatccgatatagacgaagatctcggcttgtttgcatacgaccgtgcaggccttggcaaaagcgggccgagcaccagcaaacgaacagcggatcagatggtgaaagaactaaaagcgctgcttgcagcagcagacgtcaaaccgccctacctgtttgtcgcccattcgttcggcgccgtcattgcaaggctgtttgcaagccggtacagcgatgaagtcatcggcatggtgctgcttgatcccgcttgtgaagatcaggaggaaaaagtgctgccgctacttccggacacattaaaagaagattatgtcaaacagttttcgatcgaagggtcccatgaggactttaaacaaagcctggacatgctgaagcaggaaaagaaacacctcggttcggttcctttgctcgtcctctcggcgggaaaaaggacggaggcggcgaagcaagctcatcaagaatggctgaagcttcacagcagactgctgtctctatcgcatcaaagcggctggattcaggcgaaaaacagctcgcatttgatccatcatgatgagccgcacatcgtccagcttgcgatctatgatgtgtggtatgcggcacagcagcaaacatacgcctatcaagccgccaattaa

SEQ ID NO: 2980 - DNA, 150 bp, Bacillus licheniformis
atgagagtaaaaattacattggcgtgcaccgaaacaggggaccgcaattatattacgacaaaaaacaaacgcacaaatccggatcgcctggaattgaaaaaatattctccgcgtctgaaaaggcacacgattcaccgtgaaacaaaataa

SEQ ID NO: 2981 - DNA, 924 bp, Bacillus licheniformis
ttggagttattatttttaggaacgggagcgggcatccccgcaaaaacgaggaatgtcacatccgttgcattgaagcttttagaagaaaggcggtctgtttggctgtttgactgcggggaagccacacagcatcaaattctacatacatcgatcaaacctagaaaaattgaaaagatttttattacccatcttcacggcgatcatgtatacgggcttccgggtcttgtcagcagccgatctttccagggaggggaaggcccgctgaccgtatacggaccgcaaggaatcaaaacgtttcttgaaacggcgcttgacgtatcggggacgcatgtcacatatccgcttgtgattaaggagattggagaagggacagtctttgaggatgaccagtttatcgtgacggccagaagcgtatctcacggcattcccgcttttgggtaccgcgtgcaggaaaaagatgttccgggcgcccttgacgctgaagcactgaaagagatcggagtctcgccgggccctgtttatcaaaaactgaaaaacggggagacggtcacattggaagacggccggacgattcatggggcagactttatcggaccgccaaaaaaagggcggattgtcgccttttccggggatacgaggccatgcgagaatgtgaagaggcttgccgaaaaagccgatgttctcatccatgaagcaacatttgcgaaaggcgacagggagctcgccggagactattatcacagcacttcagaacaagctgctgaaacagcgcgggaagcctgtgcaaaaaaactgattttaacccatatcagtgcaagataccagggggaaaacgtgcttgaactggtcgatgaagcaaaagcgatctttcctgataccgtggcagcttttgacttttatgagcatgagatcaaaagaacttaa

SEQ ID NO: 2982 - DNA, 1479 bp, Bacillus licheniformis
ttgaaaaaagatcaaatggaaccaaaagcagttatcgtaatatttggcgcaacaggggatttggcaaaacgaaaactatatccttctatccacaggctctacgaaaacggacaaatcgggaatgaattcgcggttgtcggagtcggcagacgcccttggacaaatgaagactttcgcagtaccgtacagcaatcggtttcgaagtttccgttaaacgaaaaggatgtggacgagtttacatctcacttctactatcatccttttgatgttacaaattccggctcataccgggaattaaacgaacttatagagaagctggaaagtacatatgatattccgaataaccggatgttttacttagcgatggctcctgaatttttcggaacgattgcaaagttcctaaaatcagagggtgtcacttcaacaacaggctggtcaaggctcgttatcgaaaagcctttcgggcatgatctgccgagcgcaaaagccttgaaccaggaaatccgtgaagcttttacagaagatcaaatttatcggattgaccattatctaggaaagcaaatggtgcagaacatcgaagtcatccgctttgccaacgcgatttttgagccgctttggacaaacagatacatctcgaacattcaaattacgtcaagtgaagatttgggtgtggaagacagagcgagatattatgaaaaatcgggtgcgcttagagacatggtgcaaaaccacattcttcaaatggtggcgctgcttgcgatggaaccgccgatcaagctgaacacggaagagatccgcagcgaaaaagtgaaggttctcagagcccttcgtccgattcaaaaagacgatgtcgaccaattttttgtgcgcggccagtatgacgcaggagtcgtcgacgaaaaacatgttccggcttatcgcgatgagcaaaacgtagcaaaagattcgaatacggaaacgttcgttgccggcaaactgctgatcgacaacttcagatgggccggtgtgccgttctacatccggacaggcaaacggatgcagaaaaaatcaacgcagattgtcgtccaatttaaagacattccgatgaatctttattacggaaacggcaacacgatgcaccctaatctgctggtgattcatattcagccggatgaaggcatcacccttcatttaaacgcaaggaagcttggaggcggcacttttgcccagccgatcaagctcgactactgccataactgcggggacggcatcaacacgcctgaagcttatgaaaagctgattttggactgcttgcacggagacgcgacaaactttgcccactgggatgaagttgcgctttcctggagttttgttgatgcgatatctcaaaactgggaggaaaacaaaaccctttcccctaactataaggcgggctccatggggccgaaagcttctgacgacctgctcgcaaaagacggctttcattggtggccgctttaa

SEQ ID NO: 2983 - DNA, 1965 bp, Bacillus licheniformis
atgactgagcagctttcggaaaaagatcagcaggaactgctggagaaatacgatcctgaagcgggaacgagaaagctcaaaggattgacaggggccattgcatttgccggcctgctcgctttttctttgtttcaattatacacagccatttttggcgtttttccggctcaaattcaaaggtccgttcatttagggtttgcgctcggtctgatttttttgctgtttccggcgacaaaaggtttgcggaagaccggcaaattcaaagtcgcctggtatgacgcaattttagccgtgttaggagcaggcgtcggcgcttattgggtcgccaattatgaaacgattgtgggcgggatcggattgatcacggaaactgacttttatgtcgggctgttggccgtcctgctcgtattggaagcgacgagacgggctgtcggactgccgattacgatcatcgccggcctgtttcttttgtatggcctttacggctcgtatcttccgggctttttgtctcacaacggcctgacgatggaacggctcgttcagacgatgtattttacgacggaaggaatcctgggcacgccgctcgctgtgtcctcgactttcatcttcctgttcatcctgttcggttcttttcttgtcaggacaggagtggggcagtattttaatgaccttgccgtagcgatcgccggacgaagcacgggcggaccggcaaaagtcgcgattttttcaagcgcccttcagggaacgatcagcggcagctctgtcgccaatgtcgtcacttccggatcgtttacgattccgatgatgaaaaaactgggctataaaaaagaattcgccggtgcagtcgaagcttccgcatctaccggcggacagctgatgcctccgatcatgggagccgccgcctttttaatggttgagttcatcggcggaggcattacgtactgggatatcgcgaaagccgcggcgatcccggctgttttatactttacgggcatctggatcatgacgcactttgaagcgaagcgcctcggcctgcgcggactaacgaaagaagaaatgccgaaccgcaaggaagtattcaaaaagatttatttgctgcttccgatcatttcggtcgtcgttttgttaatgtcgggcatcacggtcatgcatgccgctttgtattcgatcgttctggcgatactggtcggtttgttcaataaagaaacgcgaatgggcgttaaagggattgtgctggctcttgcggaaggagcgagaatggcgctttccgttgcggcggcaacggcagctgccggcatcatcgtcggagtcgtcacaaagacgggtctcggcctcaaacttgcaaacggcctgctcgatttggcaggaggcgcattattgccttcgctctttttgacaatgatcgccgctcttgttctcggaatggggtcgccgacgacggcaaactatgtcattacgtcgacgattgccgcgccagccttgattttgctgaatgttcctgatctgtcggcccacttgttcgtgttttatttcggcatcgtagctgacattacgccgcccgttgctttggcagcatttgcagctgcgggggttgcgggaggagagccgatcagaacggggatcaattcagcaaagcttgcgattgccgcttttatcatcccgtatatattcgtcctgtctccggagcttctcatgattgatgcgcattggtatgaaattctctgggtggtctttaccgcattgtccggaatgatcgccatcggcgctggcatgatcggattctggatgagaaaagtgttctggtttgaaagaatactggcggctgccagcggtcttctgctgatttatccagaaggctattccgatatgatcggcctcggcatattccttctgctgttcgtccttcagctgatgtggaagcgggacaaaagccatccggaagagatgcaggccttgaaagcataa

SEQ ID NO: 2984 - DNA, 519 bp, Bacillus licheniformis
atggggaaattaaaaatcataaaacggcttgtgccggcgctgatcattgccgtttttgcagcggcatgcctgattccttatcagaccgccgtcgtgttcgagaaagaggacagcggcgagatcatcgcttttcttcccctccaaaagaagaaaagctttgatgtggtctatacgcattccatccatcggacagaagtgatcgaatcgtatgtgtgggaaaaagggatgattcggcagaccgctctgacctatcatgatccggccgtcggaatgcccgcaaacgcagaacaaggtgaaaggctcgacatcaaaaacggcgtctacaccatttcgaacatgaagaggacctttccgttcatcgatatgcggatcggcagggtgagggcgaatcacaggatcaagtattcaggcgctgaacatgagttaaagcggtacatccgtcccggcacatggacaaggatgagtgtccgaaaactaaatgtcttgcaacaactgaggggagtgaagatcaatgactga

SEQ ID NO: 2985 - DNA, 990 bp, Bacillus licheniformis
atgaaaaagtggaaaagcctatcatggatggtattgctgctgacgctcgtcatgggattggctgcgtgcggaagcaacaatgcatcaggaaataaggacggcggatctgcgtcaaaaggatcaggaaactacagtctgctgacagggggaaccggcggtacatattatccgcttggcggtcagtttgcaaacctttgggaggatgccacagaagacaaatttacgacgcagactacaggggcttctgctgaaaacatggcaactctgcaaaaaggggaagctgaagtcgctttttcccagactgacattgccacttatgccatagaaggcaaagagatgtttaaagaaaaaattgagggaatcaaggcgattgccgccctgtatcctgaaactgtacagattgtgacaacagaaaaaagcggaatcaattcggttgaggatttaaaaggcaaaacggtttccgtgggtgctgcgggagcaggggtcaacattaatgccaagcagattttggaggttcacgggatgtcttttgacgacatcaaaccgcaaaacctgtcttttgaagaatcaaccgacggcattcagtcaggcgctatcgatgccgcattcatcacggctggaacgcctacaggcgctgtcgaagggctttccgcacaaaataaaatcaaaattataaacattgaaaaagacaagcagaaaaagctgattgaaaagtatccgttctatgcggaggatacgatcaaaaaaggaacctatggcatcgggagcgatgtgaacacggtcgctgtcaaagcgatgctcgtcgcatccgacaagatggatgaggacaccgtctataaaatgacgaaagcgctgtttgaagccgataaaatcaatcatgcgaaaggcgagtttatcaagcctgaaaccgcgcttgaaggattgggcgatatcgacattcatccgggagcggctaaatacttcaaagaaaaagggatcgaaaaatcgtaa

SEQ ID NO: 2986 - DNA, 714 bp, Bacillus licheniformis
atgagaaaatacgaatatatttcaaacgaaatgaggaggcggattcaggaggaatactatccgattgatcagcccatacctgatgagctttctctcgccaaggaattttcctgcagcagaatgacgatgaaaagagccctcgatattcttgtgtcagaaggcatgctgtaccgcaagcgcggacacggcaccttcattgtaaaatcatcgattcagcagcttcccgtcagtgtaacagaccgcgaaaaccttgggctgaccaagcttcttgccaacaaacaaatcgaaagccgcatcattcaatttgacgtcgaattcccttcagatgaagtggcaaagcaattgtcaatcgaaaagaccgttccggtgtatcatatcatcaggctcagaaaggttgaaggcgaaccgtatgtcattgaagaaacgtatatgccttcgaacgtcatctctgaattaaatgaagacgtccttcacggctccgtttaccggcacatcaccgagacgctgaaactgacaatcgccggatcgcaccggaagatcagggcggataagtcgagtgcactcgaccgagagtacttggaatgcgcccctgacgatccggttcttgaagtcgaacaggtcgcttttttaaatacgggggaaccgtttgaatattcttttgcaaggcatcgctatgataagtttgtgttttcgagcgtccatattcggaaatga

SEQ ID NO: 2987 - DNA, 1416 bp, Bacillus licheniformis
atgtcaaaaacagaaccgcagctagaacaaattcaataccgttttccaaatggcttctggtgggggtcggcggcttccgccactcagactgaaggagcggcggccgaaggaggcaaaggaaagaacatttgggatcactggtacgaaaaagagccaaaccgattttttgacggagtaggccctgagaagacttcgcgtttttacgagacttacagagaagatattcagctgatgaaagagcttggccaccactcttttcgtttctccatttcgtgggctcgtctgtttcctgatggaaaagggcggctgaacaaagaaggagctgccttttataaccgagtcatcgatgaactgcttgcggctggcatcgagccttttgtcaacctttatcattttgacatgccgcttgcgctccagcaaatcggcggatgggaaaacaggcaagtcgtcgatcactttgcttcatacgcggaaacgtgcttcaggctgtacggggaccgagtgaaaaaatggtttacccacaatgagccgatcgttcctgcagaaggcggctatctatacgattttcactatccgaacatcgtcgactttcaaaaagccgtccaggtcgcataccatgaaattctttcaaacgctaaagctgtcgaagcttatcgcagactcgggggcgacggcaaaatcggcatcattttaaatttaacgccgtcctacccgcgaagccagcatccggcagatgtaagagcatctgaaatagccgacgctttctttaaccgatcgtttcttgatcccgccgttaagggtgagtttccgcagcttttaacagatatattaaaagaagaaggctatttgcctgtcatggaagaaggagacttggagctgatcaaaaatcacactgtcgatctgctcggcatcaattattatcagccgagacgggtgaaagcgaaggagcacctgcctcatccggacgcgccttttatgccggaacggttttttgaccattatgaaatgcccggacgaaaaatgaaccgccaccgcggctgggagatatatgaaaaaggaatctatgatattttaatcaatgtcaaagaaaactacggaaatattgaatgctttatttctgaaaatgggatgggcgttgaaggagaagaacgtttccgcggcgaagacggcatgatccgcgatgactacagaatttcgtttataaaagaacacttaaaatgggtgcacagagccattcaggaaggagcgaatgtcaaaggctatcatctttggaccttcatggacaactggtcatggacgaacgcctataaaaaccgctacggatttgtatctgtcaaccttgacaaaaacggcgaacgaacgattaaaaaaagcggatactggtttaagaaagttgccgagaacaacggtttttaa

SEQ ID NO: 2988 - DNA, 1317 bp, Bacillus licheniformis
atgtttgaaaaattgagcaacctcttggtgccgattgccgggaagctgaataataaccggtatttaggcgtgctgagggatgcatttatgctggcttttccgctcaccattttcggatcgatcattgtcgttttaaccaatttgccgtttctcaataaaatgatgagcaaatccgcgcttgaaacgttccagtcggctttaagcatagcgccgagcgcaacgatcagcatcatgtccgttttcgtcgtattcgggatcgggtattatttgtccaaaacttatgaagtcgaagcggtttttggaggagtcgtcgctttggcatcgttccttctgctgactccgtttgtattaaacggcgaaggaggggaagtgattccgaacgtcatcccgattgacaggctcggtgcgaaagggatgttcctcggaatgattaccgcctttacatccgctgagattttcagattttttgtccagaaaaactatacgatcaaaatgcctgccggcgttccgcctgctgtagcaaaatcttttgccgcgctgattccggcggtgatgaccttgtccgtctacttggtgatcaatatccttgtaacccaagtgttcaatacgaatatgcacgatttaatttacaacctggtgcaggctccgcttgtcggtcttggaagcggtatcattccgaccttgattgccatatttttcactcagctgctctggtttttcggactccacggacaaattatcatcaactccgttatggatccgatctggaatacgctttcgatcgaaaatttgaatagctataccgcaacaggagaagtgccgcatattatcaataagcagtttatggaagtctacaccgtcggaatgggcggaaccggcatgaccttggccgtgattattgcgatcctgctgtttatgaggagcaagcagatgaagcaggtcgcaaaactcggagcagccccgggaattttcaacgtaaatgaaccgatcattttcggtctgccgatcgtcatgaacccgctcatttttattccgtgggtcatctcgccgatgatcgtcactttgattacgtatttcgcgatggcgtccgggcttgtaccgccgccgaccggggtcacgattccttggactgtgccgatctttatcagcggaatgatggcgaccaattcgcttgccggcggcattcttcagattgtgaatttagccgttgtctttatgatctggttcccatttttgaaattcatcgaccggatgaatatgaaaaaagagcaggagatcaatgaagcggaacaagaaaagacaacactaggactttaa

SEQ ID NO: 2989 - DNA, 333 bp, Bacillus licheniformis
atggaaaaattaaagctcgatgaattaacaggcgaacaaatttgctttcagctcattcttcacagcggaaacgcccgcagcaaggttattcagtccatcagggaataccgcgacggcagcgttcagaaagcagaggagctgctacaacaggcagaagacgatttgcagcagtcccacgatattcattttcaaatgatccaaaaagaagcgggcgggggaaaaaatgagttctctttgctgctcttgcatgccgaggaccatttgatgtcgacgctcacgatgaaggaactcgtttctgaattattggaattgttcaaagagaaaagtctatga

SEQ ID NO: 2990 - DNA, 309 bp, Bacillus licheniformis
atgaagaaaattttactcgcatgcagctctggaatgtcgacaagcctccttgtcaccaagatgcaggaatacgcgcattcaatcggtgatgaggcaaaaatttgggcggtcggacaggaccaggcgaaaaaagagatggcagaggcaaacgtcgttctcatcggcccgcaaatgagctttttaaaaggcgagctgcagaaggaagctgaacagtacggtattaaggttgatgtgattgatatgctggcttacggaatggctgatggaaagaaagcttatgaacaggcgctaagcctgatcggggattga

SEQ ID NO: 2991 - DNA, 1662 bp, Bacillus licheniformis
atgggtttcttacgcaacagaatcgtcggcattacactggcaggagcagtcgctttaggatcggcgggaacaggcagtgcggcaatggaaacagcgaaaaaaaaggaagagccgaaggtcaaaaacgtgatcatgatggtcatggatggaacaagctcttctgcatcaactttggcacgctggtataaaggcgaaccgctcgcaatggaccagatcgtcagcggcggtgtccggacgtattcggcagaatcggcgatcactgattctgcacctgcagcaactgcgatggcaacgggacgaaaatcaaattcttcctatatcggtgtgctgccttcaaaagtgaacacaccaggagtcgagaaggtccgtgaaaaagatcattaccggcctgtagcaaacgtgctggaaggcgcaaaacagaaggggaaagcaaccggcatcattgcaacatctgaaattcagcatgccacgcctgccggctattccggccatcataaagaccgcaataattttgaagtgctcggtgaacagcaggtttatcaaaacatggatgttgtccttggcggaggaaaagaatcgcttcagccgggtacaaaggataaaagccgcaaagacggtgaagaccttgtaaaagtgctcaaagataaaaagtacgatttcgttgaaacgaaagatcaactcctcaagtcaaaatcgaaaaaaatctggggcgccttctcacagcgcgatctcgcgtatgacatggaccgccgcgcaacgcatccagagcagccgactattgcagagatgacgaaaaaatcgattcagacgctttctaaagacaaggacggtttctttttattcgtggaaggaagcaagcctgactgggcagcgcatcaaaacgatccgatcggcatgatcagcgatgtattggcgtttgataacgcggtgaaagaagcgcttgatttcgctaaaaaagataaacatacaatggttattgccgtctcggaccatggcaacagcggcatctccatcggcaacagcaacacgacgaaaggctatgacacaacaccggtatcagcctatgtcgatccgctgaaaaaagctaaaatgacggtggaaggcgcaactggcaaattaaaagacgacttatcgaatatcgaagaagcggcgaagctttacggacttgatgatttaacgccggcagagaagaaacagctgaaaagcgtgaaaaacaaaaaagaagcggcttcattatttaccaagctgctcagcaaccgggccaacatcggattcacaacaggcggtcatacgggtgaagacgtcttcctgtattcgtatggtccagaaaagccgcagggtctcgtcgaaaacaccgatatcgccaaaacgatggcaaaggcaatgggcttcaacttagacaaattaacaaacgaattatttatcgaagcaaaacaggcatttaaaaaagccggagccagcgtaacgatcgatcaaaaagatccggctaacccagttcttgtcgcagcgcgcaaaaaagcaaaagccgaaatgcctgtgaacaaaaacattatcagaatcaacgggaaggaatacgaactagacagcgtgattgttgaaagcaatggatccttctacgtgcctaaagaagcagttcagctattcaaaaaatacgccagataa

SEQ ID NO: 2992 - DNA, 786 bp, Bacillus licheniformis
atgtatccaagtttagagggaaaaacggtcgttatcacaggggcgggtacaggtcttggaaaagcgatggcactgcgcttcggtgctgaaaaggccaatgtagtgatcaattatttcaaggaagaagaaaatcccgaagagacggtggagaaaatagaaagcagcggagcgcgcgcgattgccgttcaaggagatgtctcaaaagaagatgatgtgaaagcgctgatcagacaggctgttgattcattcggttccgttgatgtgatggtgaacaacgccggggtggaaaatgaagtaccttctgaggatttgtctctggaggactggaaccgcgtcatatcaaccaatttgacggggatgtttctaggatgccgggaagcgatcggctatatgctcgaccataatattaaaggctcggtcatcaatatgtccagcgtccatcagcaaatcccgtggccgcattttgtccattatgcggcaagcaagggcggggcaaaactgctgacggaaacccttgctttggaatatgctccgaaaggaatccgggtaaacgcgatcggccccggtgcaatcgatacgccgattaacgccgaaaaattcgctgatcccgaattgaaaaaaggcgttattgaattgattccgatagggtatatcggaaagccggaggaagtcgcagcctgcgcggcctggctagcatctgaagaagcaagctatgtgacaggcctgacgctgtatgtagacggcgggatgacaaaatacccgggattccaagcgggaaaagggtga

SEQ ID NO: 2993 - DNA, 1410 bp, Bacillus licheniformis
atggcaaaacaacaaataggtgtagttggtttagcagtaatgggaaaaaacttggctttaaacattgaaagccgcgggttttcagtttctgtctacaacagatcaagcgagaaaaccgaagagtttctgaaagaagccgaaggcaaaaacgttgtcggtacatacagcattgaagagtttgttgaatctcttgaaaaaccgcgcaaaattcttttaatggtcaaagctggaacaccgacagacgcaacgattcaatcgcttctgcctcatcttgaaaaaggcgacattttgattgacggcggaaatacatattataaagatacgcagagaagaaacagggagctggccgaaagcggcattcacttcatcggcaccggcgtttccggcggtgaagaaggcgctctgaaagggccgtctatcatgccaggcggacaaaaggaagcccatgagcttgtcaagccgattcttgaagctatttctgccaaggtggacggcgaaccgtgtacgacatacatcggtcctgacggcgccggccattatgtaaaaatggttcataacggcatcgaatacggcgatatgcagctgatctcagaatcctactttattttgaaacacattgtcggtctgtcatcagatgagcttcacgaagtcttttccgagtggaataagggagagcttgacagctatctgatcgaaatcacggctgatattttcacgaaaaaagacgaggaaaccggcaagccgcttgttgacgtcatcctcgataaagcaggtcaaaaaggcacaggaaaatggacaagccaaagcgctcttgacctgggcgttccgcttccaatcattacggaatctgttttcgcccgcttcatctcttccatgaaagaggagcgcgtcaaagcgagcaagcttctggcaggacctgaagcgaaacctgccgctgagaacaaagaagagctgatcgaagcggtcagaaaagcgctcttcatgagcaaaatctgttcttacgcccaaggctttgctcaaatgaaagccgcatcagaagaatacggctgggatttgaaatacggcgatatcgcgatgattttccgcggaggatgcatcatccgcgcggcgttcctgcaaaaaatcaaagaagcgtatgaccgcgatccagagcttgacaacctgcttcttgacccgtacttcaaaaatatcgttgaaagctatcagggagccctccgcaaaacgatttctcttgcggttgaacaaggaattcctgtaccttgcttctcaagcgctctcgcttactttgacagctaccgcactgccaccctgccggccaacctgattcaggcgcagcgcgactactttggcgcccatacgtatgagcgtacagataaagaaggcattttccacactgagtggatgaaataa

SEQ ID NO: 2994 - DNA, 1257 bp, Bacillus licheniformis
ttgtctgctgataaacaaaaggggagagtcatctttcatatcgatatgaacagcttttacgcgtctgttgaaatggcgtatgacccttcgctgaaaggcaggccgctagccatcgcgggaaatgcgaaggagcggaaaggaatcgtcgtcacgtgcagctatgaggcgagagcacgcggcgtcaaaccgcccatgccgctctgggaagcgaagcggctctgtcccgagctgatcgtcaagccgccgaatttcgaccgctacagaagctcttcaagagaaatgtttcaagtgctcagggagtacacggaccttgtcgagcctgtttcgatcgacgaagggtacatggacttaacggatacgccatacagaaatcgggcatgcgaaacggcaaaggaaattcaggagcgccttcaaaaggaactgctgcttccgtcaagcatcgggatcgctccgaataaattcctggccaaaatggcttcggatatgaaaaagccgctcggcattacgattttgagaaagcgtgaagtgccccggattctttggcccatggacatcagcgagatgtacggagtcggccggaaaaccgccgaaaagcttaagacgctcgagatcgaaaagatcggcgatttggctgccgcagatgagtatgctttaaagcgcctcctcggcatcaacggcccccgtttaaaaagaagggcaaacggcatcgacacaggagaagtgaatcccgacagaatatacgaattcaaaagcgtcggcaattcctcgaccctcccgcatgacagcacagatgagaaagagctgttcggactgattgacaagctttcaatctcagtaagcgacaggctgaagcgaaaagaggtcatggcagcaaaagttttcatcatgatccgctttgcggactggacgaacataacaagaagcaagacccttctgaatccgaccgattcaaaagacgaaattgcgaaggaatcgaaagcccttttcaggcagcattggcacggaagccctgtcaggcttttgggcgtgacgggaacagacctcgtcaatcgaaaggaagccgtcaaacagcttgatttgttttcctttcatgaggatgccaaagatgagccgatccaaaaagtgatggccgaactgaatgaaaaatatggaacagacctcatcaaaaaaggggtcaggattgtgaaaaaagaaagcaaaacgagcggaacaagctttaacaaagattttttccaagacgagagacaagatcaatag

SEQ ID NO: 2995 - DNA, 288 bp, Bacillus licheniformis
atgattcttgaatctttcaacgatgctttttttctgattgagtttttcacaatcgtcctccccgcactgacggcgatcggtatcgccctgatcctgaaggattgcagtacgggagacagctggaaaacgaaacggtttgaagaatatcatgcaatacagtttgtttctgcagtcgattttctcatcatcctatatcatcgcattacggtatggataagtaaagtcattcgcatgaaagcttcatcgaacgacgatgaagaccaccgtttccttcttctttcaatttaa

SEQ ID NO: 2996 - DNA, 822 bp, Bacillus licheniformis
ttgaacacgaaactaaagcaattgtttgcgactgcaatgtttttgatcatgactatgtttataggtgaacaagcttcggcagccaccggcagcaccggaggaagcgacaacttcttccaccattatgtcgtggtgcctttttcagagctgattaagggaatcgccggaatcttccacggaaactacggattgtcgattatttttgtgaccatcatcgtccgggttctcgtttttccgctgtttgccaaccagtataaaaagcagcgggcgatgcaggaaaaaatggcgcttgtcaaacctgagctggatgcgattcaaagcaggttaaaaaagacgaaagaccccgtgaagcagagggaaatccagcaggagatgatgcagctttaccaaaagcacaacatcaatccgctggcgatgggctgtctgccgatgctgattcagtttccgattctgatcggtttctattatgcgatccgctcgacgcctgaaattgcttcgcactcttttctctggtttaacctcgggcattctgatattatcgtatctttaagcgccgggttcatgtattttatccagttctatgtgtctcaaaagctgaacgcacagaacgcccaatcaaatccggcggctcagcagtccgccaaaatcatgggcttctttttccctgtaatgatgacgatcttttcgatcaatgtccctgcagccctgccgctgtactggctgacaagcggactgcttctgacgattcaatcggtcgttcttcatcaagtttaccaaaaaaacaaaaaagccattcagcctgctgaatcggctacaaaataa

SEQ ID NO: 2997 - DNA, 1119 bp, Bacillus licheniformis
atgaataaaaaacgcttgttagaagagtttttagaacttgtgcaaattgattccgagacaaaacatgaagctgaaatctgcaaggtgctgaaagaaaaatttgcggcgcttggaatggatgtcgtggaagatgacacaaagccaaaaaccgggcacggagcaggcaacctcgtgtgcacgcttccgggaacgaaagaagcggacacgatttactttacatcccacatggatacggtcgtacccggaaaaggcgtaaagccggtcattgaagacggatatgtcaaaacagacggcacaacaattttgggagccgacgacaaaacaggccttgcagcgatgctagaagccgtaaaagtgctgaaagaaaaaaacattccgcacggaacgatccaatttatcattacggtcggtgaagaatcggggcttgtcggagcgaaggctctagaccgttcgctgatcaaagccgattacggatatgcgcttgattccgacgggaaggtcggcaatattatcgtggcagcgccgacacaggcgaaaattagagcaactgtctatggaaaaacggctcatgccggtgtagagccggaaaaaggagtctcagcgatcacgatcgcttcaaaagcgattgccaaaatgccgcttggccgcatcgacgaggaaacgacggctaacatcggccgctttgagggcggaacgcaaaccaatatcgtctgcgatcaagtcgacattcttgctgaagcccgttcgcttgttccggaaaaaatggaaaagcagacggaaaaaatgaagcaggcgtttgaatcggcagccgccgaaatggggggcagagccgaggtggaaatcgaagtcatgtacccgggctttaaatacaaagacggtgatcttgtcgttgaaattgccaaaaaagccgccgggaaaatcggccgtccgtacgagctgttgacgagcggcggaggaagcgatgcgaacgtcatcgcaggccacggcattccgactgtcaaccttgcagtcggatatgaacagatccatacgaaaaacgaaaaaatgccgattgaggaacttgtcaaaactgcagaaatggtcgttgccattattgaggaagtagcgaatcgttcataa

SEQ ID NO: 2998 - DNA, 1530 bp, Bacillus licheniformis
atgaatatgtttgaaagagtcgacgatttaaacaacagccgccaaaaagcttcgctcggaggcggccaggaacggatcgacaggcagaagcaaaaaggcaagctcaccgccagagaacgaattgatcttctgcttgatgaggggacgttcactgaactgaatgcctttgccagaagccggcagtccggcggcccgttaggcgacggggttgtcacgggattcggaaagatcgacgggcggcccgtttatctattttcccaggattttaccgtcaccggcggagcgctcggagaaatgcacgccaaaaaaatagcggccgtcatggatcttgccctcaaaaataaggcgccgttcatcggtctgaacgactcaggtggtgcgagaattcaagagggtgtgctatcattagatggatacggtcatattttttaccgaaatgtcctttgctcaggcatcattccgcaaatctctgtcattctcggcccttgtgcgggcggcgcggtttattcccccgctttgaccgacttcgttttcatgagcgaaaaaaccggacagatgtttattaccggtccgaaagtcatcaaaacggcgacaggcgaggctgtcagctccggtgaattggggggcgcctatatacataattcaatcagcgggaatgcccatttttccggggattccgatgaggccgtcctccatgaggtgcgcaagctcttgtcctacatcccccagaatcacgaagaaaagcctcccgccaaggcgagaaaggcgaaagatcatgagataaggcctgctttaatgacgatcctgcctgaagacggtcagcgtccgtatgacgtcaaacagatcatcgcggaaatcgcagacggcggaacattttttgaagtgcagtgccattttgccaaaaacgcggtgatcggttttgcaaggatagcgggggaaacggcggcggtcgtggccaaccagccgaagtatttagccggaagcctcagcatggatgcggctgacaaaatcgcccggtttatccgtttttgcgattcctttcagatcccgattttgactttggttgattgtcccggttttcttccgggaatacgcgaagagcacggcggggtgatcaggcacggcgccaaaatcctttacgcgtatgcggaagccactgtcagcaaggtgacggtcattttaagaaaagcatacggcggagcatatgtcgctttaaacagcaaggcgcttggagcggatgccgtgtttgcgtggccgaatgcagaaattgcagtgatgggcgcctcggaagctgcagacgtgctgtttgcgaaggaaatcgaacggtcagacgacccgcgggccgcccgggaggaaaaaatccggaagtgcatgcaggcttcaagcccttttaccgctgcaagatacggcatggttgacgatatcatcgatccgaaagagacgcggaagaagctgatccaaacgtttgacatgctgaagagcaaaaaagaaatccggccggacaaaaagcatggaaatataccgctttaa

SEQ ID NO: 2999 - DNA, 138 bp, Bacillus licheniformis
ttggtcaatctaatgaaacagggagaagcttgtgcggttttttctattcttcccggaagcctgagcccgaaaaaagcaggcgtttctccgaaaaaagaatcgcctgctttcatgatctgtattaaaaaatcatgctga

SEQ ID NO: 3000 - DNA, 960 bp, Bacillus licheniformis
atgtttaaaataggttatcgcacattaaaaacagcgcttggaacagcattggccatctatatcgcacagctgctcggcctccataattttgtgtcgacagggatcatcacgatcctctgtattcaagtgacgaaaaaacggtctcttcaggcatcatgggcacggtttgcggcatgcatacttgcgatcgtcttttcatgcgcattttttgagctgatcggctatcatcctgctgtcatcggtctgatgctgctgttctttattccgacaaccgttcttctgaaaataaaagaaggaatcgtcacaagttcggtcatcattcttcacctttatatgtcggaagggatcaccctttctctcgtttggaacgaattccttatcatcattacgggaatcggcgtagccctgctgatgaatctgtacatgccgagcctcgataatgagctcaaacagtatcagcagaaaatagaagataactttgccaagattttcgaagaaatcgaacggtatttgctgactggggagcaggattggacgggaaaagagattcctgagacgcaccgtttgatcaatgaagcgaagaccctggcataccgcgatgtggaaaatcattttctcaggcacgaaaacctctattatcactactttaaaatgagagaaaagcaatttgaaattatcgaaagggttctgccgaaaatcacgtcgatttcgatgacggttgaacaggggcagatgatcgcggcgtttctccatgatttaagaggagccatccatcccggaaatacggctcataaatttttgaagcggctcgtgaaaatgagagaggaaatcgaagagatggagctgccgacgacacgagaagaatttgaagcgcgcgctgctcttttcatttttctcggcgaaatggaacagtatcttgtgattaagagttactttaaaggtattaaatctcctgcataa

SEQ ID NO: 3001 - DNA, 723 bp, Bacillus licheniformis
atgattaatgttcgcaatctctcaaaatctttcggaaagcacgaggtgcttaaacatatttccgtttcctttgaaaaaggcgaagtagccgcagtcatcggcccgtcgggatcaggcaagtccacgtttctgcgttgcttaaacctgctcgaaaagccgacggagggcagcattttcattcaggatcaagagattacaagcccgaaaacaaatgtgctgaaaatcagagagaacatcggcatggtctttcagcattttcacttgtttccgcataaaacggttcttgaaaatattacgtatgcacctgtccatgtcaaaaaagaaagcaaacaggcggctgtgaaaaaagcggaagaactgcttgagaaagtggggcttctcgataaaaaagatgattatccgaaccgtttatcagggggacaaaagcagcgcgtcgcgattgcgagggcgctggcgatgaatccggatatcatgctgtttgacgaaccgacatcagctcttgatcccgagatggtcaaagaagtgctccaagtgatgcaggatttggcgaaaaccgggatgacgatggtgatcgtgacgcatgaaatgggatttgccaaagaagtcgccgacagagtgcttttcatggatgaaggaaccattgtagaagacgacgatcctaaagcgtttttttcttctccaaaatcgaaaagagctcaagactttttagagaaaatactataa

SEQ ID NO: 3002 - DNA, 663 bp, Bacillus licheniformis
atgaattttcttgatttttctagtacagtacccgaaatgcctttcatcctggaaggcttgggcgttaccttaaaagtggtcgcggctgcggccgtgcttggatttttgctgggggttttgattacgcttttaaaaatcagttcgatcaagcccctcgcatggattgcagacttttacacttccatattccgggggacaccgctcgttctgcagctgatgatcgtctattacggactgcctcaggtgctgggctttgatattgatgcttattgggcggccgtcatcgcattcggcttaaattccgctgcttatgtatcagaaatcatcagagcaggaatcaatgcgatcgacaaagggcaaaaagaggcggcgatggctctgggcgtcccgtatgcaaagatgatgaaggatctcttgctgccgcaggcctttaaaaatatcatgcccgcgctgatcaacgaatcgattacactgacaaaggaatcggctgttgtcaccgtcatcggactcggcgatataatgaggcgaagctatcaggcgggagctgcgatctacagcccgcttgagccgatgctgtttgcaggcctcatctactatgtgctcgttttgatcctgacgtttgtcggcaaagcgattgaaaggaagctgaatgtcaatgattaa

SEQ ID NO: 3003 - DNA, 768 bp, Bacillus licheniformis
atgaaaaaatggatgttactggtagtggcagcatgtgtcacatttgcattgactgcttgcgggacgagcagcagctctgatgataaaaaaacattggtgatgggaacttctgccgattacccgccttttgaatcgaaagacggggatcagattgtcggttttgatgttgatctggccgaagcactggctgaaaagacgggccatgaaatcgaagtgaaagacatggacttcaacggcttggtgaccgctcttaaaacaaacaaagtcgacattgtgctttcaggaatgacgccgacgcctaaacgcaaaaaacaggtcgatttttcaaatgtctactatacggctcacaacatgatcgttacaaaaaaatcaagcggcatcaaatcgcttgacgatctgaaaggaaaaacggtcggcgtacagcttggctccatccaggaagaaaaagcaaaggagctcacgccggattacgatttaaaagttgaaaaccgcaaccgcatttcggatttaactgaagaaatcaaagcgggccgctttgacgctgcaatcattgaagatatcgttgccgaaaaatatattaataaaaatgaagaactggttggctacaatctgccgaaagaaccggatgaaaaagccggctccgcgatcgcctttaaaaagggaagcgatttgaccgagaagttcaacaaagcgcttgaagaaatggagaaaagcggagaacttgataaactgaaagaaaaatggttcggcggagaaacaaaaaagtaa

SEQ ID NO: 3004 - DNA, 123 bp, Bacillus licheniformis
atgctttttgtatgcaatcagaaagataaaggcacaggcgttcaattggtatttaaaggcttatttaaaggttttttagttatttttcaaaatggtattgcatccgcctcggaaaatgtttaa

SEQ ID NO: 3005 - DNA, 438 bp, Bacillus licheniformis
gtgaacatggattttaatctgtttatgaacgatgtcgtacgccaggccagacaagaaataacggctgccggctacaccgaattgaaaacgcctgaagaggtcgatgaagcgctcacgaaaaaaggcactacgcttgtcatggtcaactccgtctgcggctgtgcaggggggattgcaagacctgccgcgcaccatgcggttcattacgataagcgccctgatcatctcgtcaccgtttttgccggacaagacaaagaagcgacggcaagagcaagagaatattttgaaggatatccgccttcttctccgtcattcgcccttttgaaagacggcaagattttaaaaatggtggagcgccatgaaattgaaggctatgagccgatggctgtcatcaccaagcttcaaggactgtttgaagaatactgtgaagaagtataa

SEQ ID NO: 3006 - DNA, 903 bp, Bacillus licheniformis
atgaaccgaaagaaagcaatgctgatttacaacgggaatgcagggcaaaaaaatgttgaaaaaacactcggtgctgccgtaccggttctttcacaagctatagacgaactcatcgtgaaaccgacgagaaaaaagcgcgatgcgttcgaattttgcctggagatcggggaggatatcgggcagttgtttatcttaggcggtgacgggacggtgcatgaatgcattaacgggattagccagcttcaaaccaagccagatatcggcatcctccctggcggtacatgcaacgacttttcgagggcgctccgcattccccagaacattgaaaaagcggcggaagcgctcgccaatggaaatcccgtcccggtcgatgttttaaaagcgaatgatcattattgtctcaacttttggggcatcggattgatcacggaagcttccagccatatcaatcaaacggaaaaagcgctgctcgggagaatcagttattttacgagcgcactgcggacaatctccaatcttgagcccttctctttccgactgtcgatcgacggagaagagtttgctgacgaagcggttatggtcgtcgtgctgaacggcccctttatcggaacgaacaaaatcccccttccgcagctgagcatcaacgacggaaaagcggacattctcgtctgccggaatacgaatctggctgcattgaaagagctttttgcaatggatgatcccgaatgggattcctttaaaggcgagctatcctattatcaggggcaaaccgttcgaattgaaaccgcccttcccatggaagccgatacagacggcgaaatctgcacaaaaacgccggcttcaatcgaggtgctgaacgggcacctccggatgctcacccccttagaaaaagaaaaaagctga

SEQ ID NO: 3007 - DNA, 1281 bp, Bacillus licheniformis
atggcagtggaacaaatgacaatgccgcagctcggggagagcgtgactgagggaaccatcagcaaatggctcgtcagcgtcggagatcacgtcaacaaatatgatccgattgctgaagtgatgacggataaggtcaatgctgaagtcccttcatcgttcacgggaacgattgccgagctagtcgggaaggaaggcgaaactctgcaagtcggagacgtcatctgcaaagtcgaaacaaatgaagaagcgaaaccggaggctgaggctgtttccaagccagatcaagaggaagcggagccggccaaaccggaggcgaaagatacaactcagaaaaaacgttattccccggcggtgctgagacttgccggagagcacaacatcgatttggagcaggtggaaggtacaggcgccggcggacggatcacaagaaaagacatccagcgcatcattgcttccggagctgttcctcaaactgatgcagcgccggaaaaacagccgggtgcaaatgccgcgggagcgattgaacctgatcaaaaaccggcgcaagccgcacctcaagctgcaccgcctcaaagtgcggccggagacgttgagattcctgtaactggaatccgcaatgcgattgcgaccaacatggtcagaagcaagcatgaaatccctcatgcctggacgatgatggaagtggatgtcacaggtcttgtgagctaccgcaacaaaataaaaaacgaattcaagaaaaaagagggcttcagcctgacctttttcgcgttttttgtcaaagcagtcgcacaggcgctgaaggaattcccgcaaatgaacagcatgtgggccggagataaaatcattcagaaaaaagacatcaacatctcaattgcagtagcgactgaagatgcgttatatgttcctgtcatcaagcatgccgatgaaaaaacgattaaaggcatcgcaagggaaatctccgaactggctcataaggtcagaagcggcaagctgaccagcggggatatgagcggaggtacgtttacggtcaataataccggttcgtttggatcggttcagtcgatggggatcatcaaccatccgcaggctgccatcctgcaggttgaatcgatcgtcaagcgtcccgtcgtcatggagcatggcatgatcgcggtcagggatatggtgaacctatgcttatccctcgatcacagagtgcttgacggcctcatttgcggcagattccttgcccgtgtgaaagagattttggaacagatcgatgatcatacgtccatctattaa

SEQ ID NO: 3008 - DNA, 984 bp, Bacillus licheniformis
atgccagttatgtcatatatagatgctgtcactttggctttgaaagaagaaatggaaaaggatccccgcgtctttgttttaggggaggatgtcggcaaaaaaggcggtgtattcaaggcgacagccggtctttacgaccagttcggcgaagagcgggtgatggacacgcctttggcggaatccgcaattgccggcgtcggaatcggggccgccatgtacgggatgagaccagtcgctgaaatgcagtttgctgattttattatgccggctgtcaaccagattatttcggaagcggcaaaaatccgctaccgctccaacaatgactggaactgtccgatcgtcatccgcgcaccttacggcggaggcgtgcacggcgcgctgtaccattcacagtcggttgaagccgtgtttgccaatcagcccggcctgaaaatcgtcatgccttcgacgccttatgatgtcaaagggcttttgaaagcggccatccgcgatgacgaccctgtgctgttcttcgaacataaacgggcataccggctgatcaagggcgaagtgccgagtgacgactatgtgctgccgatcggaaaggcggacgtgaagcgggaaggcgaagacattaccgtcatcacatacggattgtgcgtccatttcgcccttcaggctgccgaacggcttgccaaagacgggatttccgcacatatccttgatttaagaacggtatatccgctcgatcaggaagcgattattgaagcggcttccaaaacgggcaaagtgcttttgatgaccgaagatacgaaggaaggcagcattatgagtgaagtggccgcgatcatttcagagcattgcctgttcgatttggatgcgccgattaagcggttggcgggccctgatgtcccggcaatgccgtatgctcctacaatggaaaaattctttatggtcaatccggataaagcagaagcagcgatgagagaattggctgagttttaa

SEQ ID NO: 3009 - DNA, 993 bp, Bacillus licheniformis
atgggcaataaccgtcatgaagcagtgggattaacagatgaacaagcaatcgacatgtacaaaaccatgcttttagccagaaaactcgatgagcggatgtggctcttaaaccgttcaggcaaaattccttttgtcatctcttgtcaaggacaggaagcagcccaggtcggagcggctttcgctttagaccgggagaacgattatgtgcttccgtattacagagatatgggcgttgtgcttgcttttggaatgacggcaaaagatttaatgctgtcggcgtttgcaaaagccgaggatccgaattcaggaggaaagcagatgccaagccacttcggccaaaagaaaaaccggatcgtcacgggctcttcgccggtgaccacgcaagttccgcatgcggtgggcgtagcgcttgccggaaggcttgacaagaaagacattgcaacttttgtgacgttcggcgaaggctcttcaaaccaaggggacttccatgaaggggcaaactttgccgccgtgcataagcttcccgtcatttttatgtgtgaaaacaataaatacgcgatctcggttccttatgaaaagcaggtagcttgcgaaaacatttccgaccgcgccgtcggttacggcatgcctggcgtgaccgttgacggaaatgatccgcttgaagtctacaaagctgttaaagaagcaagggaacgggccggaagaggcgaagggccgacattaatcgaaacgatatcataccggctgaccccgcactccagcgatgatgacgaccgaagctacagagagcgcgaagaggtggcggaggcgaagaaaaatgatccgcttaacaaattcgcacaatacttaaaagaagcaggtcttctggacgaccagtctgagaagcaaatatcggatgagatcacaaacatcgtcaatgaagcaacagattatgctgaacatgcaccttatgcagatccggaagatgcgctgcggcatgtttatgcggagtaa

SEQ ID NO: 3010 - DNA, 1422 bp, Bacillus licheniformis
atggcaactgaatacgatctcgtgattcttggagggggcacaggtggctatgtggccgccatcagagcctcgcagctggggctgaaaacagccgtcgttgaaaagcagaagctcggcggcacgtgccttcataaaggctgcatcccgtcgaaggcgctccttagaagcgcggaagtatacaggacagcaaaaaaggcggacgaattcggagtggtcattcctgaagtcggactgcggttttctcaagttcaaagcagaaaacaaaaaataattgaccagctgcacaacggtgtcaaacacttgatgaaaaaaggaaagatcgatgtttacgaaggaatcggacggattctcgggccgtcgattttttccccgatgcctgggacggtttccgttgagatggcgaacggggatgaaaatgagatgctcataccgaaaaacgtcatcatcgctacaggctcaaggcccaggtcgctgccagggcttgagcttgacggagaaaacgttctgtcatcagacgaagcgcttgaacttgagcagcttccggcttccatgctgatcgtcggaggaggtgtcatcgggatcgagtgggcttccatgctgaacgatttcggtgttgatgtcaccgtcattgagtatgcagaccggattttgccgactgaagatgccgatatttctagggaaatgcaggcgcagctcgcgaaaaaaggcatcacaatgatcacgggagcaaaagtgctgcccgacacattggagaaaggcgatgcggtcagcattcaagcggaaaaagacggagaaaaacaatcctattccgctgagaaaatgctcgtatcggtcggaaggcaggcaaatattgagggtatcggtctggaaaacacggatatccaggtggaaaacggctttatcgtgacaaacagcatgtaccagacaaaagaatcccacatctatgcgataggagatgtgatcggcggccttcagcttgcacatgtagcttctcacgaagggattacggccgttgagcatattgctggtgaaaacccgcacgccatcgattattcgcttgtttcaaaatgcatctattcaagccctgaagccgcatcggtcggcttgacagagggtgaggcgaaggcgcaggggaaaagcgttaaagtaggcaaatttccgtttcaggcgattggcaaagcgctcgtgtacggtgagacggacggctttgtcaaaatcgtcgccgatcgcgaaacagatgacattttgggcgttcacatgatcggcccgcatgtgacagacatgatatctgaagccggtctggcaaaggtgcttgacgccaccccgtgggaagtcggtcaaacgatccacccgcatccgacgctgtcggaggcgatcggagaagccgcccttgccgtggatggaaaagcgattcatttttag

SEQ ID NO: 3011 - DNA, 1107 bp, Bacillus licheniformis
atgcaggtacaggaaaaacgtattctcgtcatcaatccgggatctacatctacaaagatcggcgtttttcatgatgaccgttcgattttcgaaaaatcaatccgtcatgacgaggctgagctacagcaatatcagaccattattgatcaatattcgttcagaaaacaggcgatactcgaaaccctgcatgaacagggaatcaatatttctaaattggatgccgtttgcgccaggggagggctgcttcggccgattgaaggcggcacttacgaagtcaatgatgcgatgattgtcgatttgaaaaacggctatgcggggcagcatgcatcaaatctcgggggcatcatcgccagggagattgccgacgggttaaatattcccgcttttatcgtcgaccccgttgttgtggatgaaatggctcctatcgcaaaaatttccggcaccccggctattgaaaggcgcagcatttttcacgcgctcaaccaaaaagcagtcgcaaggaaagcggcttggcagtttgggaagcgttatgaagatatgaaaatgatcatcacccacatgggaggcggcattacgatcggcgtccattgccgcggccgggtgatcgacgtcaacaacggcctccacggggaaggtccgctcagtccagagcgggccggaaccattcctgcgggtgatctgatcgatatgtgcttttccggcgaatatacgaaagacgagctgatgaaaatgcttgtcggcggcggagggcttgccggctatctcggcacgacggatgcggtaaaagttgagaaaatgatcaaggaaggcgatcaaaaagctgcgctcatctatgaagcgatggcttatcaaatcgccaaagaaatcggggcggccagcgccgtcttaaaaggagaagtcgatgtcattattttgacaggaggactggcatatggaaaatcgtttatttcctcgatcagacaatacatagactggatttcggatgtcgtcgtctttccaggagaaaatgaacttcaagcattggctgaaggtgcatttcgcgtattgaacggcgaagaagaggcaaaacagtatccgaaccagaggagggaaagtcatggcaactga

SEQ ID NO: 3012 - DNA, 1095 bp, Bacillus licheniformis
atggaactatttcgatatatggaacagtatgactacgagcaattggtattttgccaagataaacagtccggtttaaaagcgatcatcgcgattcatgatacgacgctcgggccggctctcggcggcacaagaatgtggacatacgaaagtgaagaagccgcaattgaagatgcgctgcgccttgcgcggggaatgacctacaaaaatgcggcggccggactgaacctcggaggaggcaaaaccgttattatcggagatccgcgcaaagataaaaacgaagaaatgttccgcgctttcggccgctacattcaaggcttgaacggcagatacatcacagccgaagacgtcggtacaaccgttgaagatatggacatcattcatgacgaaaccgatttcgttacaggcatttcacctgctttcggttcatcaggaaatccttctccggtaacagcttacggggtatataaagggatgaaggcggcggcgaaagcggcattcggaacggattcgcttgaaggcaaaaccgttgcggttcaaggcgtcggaaacgtggcctacaacctgtgccggcacctccacgaagaaggcgcgaaactgatcgtgaccgacatcaacaaagaagcagttgaacgtgcagtcgccgaattcggcgcccgcgccgtcgatccggatgatatttattcgcaggaatgcgatatatatgcgccgtgtgccctcggagcgacaatcaacgatgatacgattccgcagctgaaagccaaagtgattgccggggcagccaacaaccagctgaaagaaacccgccacggtgatcaaatccacgacatgggcatcgtttatgccccggactatgtcatcaatgccggcggcgtcatcaatgtcgctgacgagctttacggctataattcggagcgcgcgctgaagaaagtcgaaggcatctacggaaacattgaacgcgtccttgaaatttcgaagcgcgaccgcattccgacatacttggccgcagaccgtctggcggaagaacgaattgagcgcatgcgccaatcgagaagccaatttttgcaaaacggccatcacattttaagcagacgttaa

SEQ ID NO: 3013 - DNA, 912 bp, Bacillus licheniformis
atgaagctgaaacaactattgcaaaaagcggcggagcttgacaataaaacggtcgccgtcgcacatgcggaagatgacgaagtgctgcaagcggtcaaacttgcggtcgacaaacaatttgcccggttcttgctgatcgggcacagagaaaaacttagacatatgatgacagagcagaatatttcaaaacggcacgtggatatcattcattcggaatcgccggcggattctgcgagaattgccgttcaagctgtcaaaagcggcaatgcggatgttcttatgaaggggaatgtcccgacagctgtgctattaaaagccgttttgaataaagagtacgggcttcgttcctcgcacgtgctgtcacatgtagcagcatttgaagtcagcgggtttgagaggctgatttatgtaacagatgcggcgatgaatatcagccccaagcttgatgagctgaagcagattttagaaaacgcagtcggcgtggcgaggtcggtcggcgtgcaaatgccgaaagtcgcttgtcttgccgcagtggaaacagtgaatcccgcgatggaagcgacattgaatgcagctgccttgacgcagatgaatcatcggggccaaatcaaaaactgcgttgttgacgggcctcttgcattggataacgcgatatcgccgcttgccgcccggcataaaaacatttccgggatcgtagcaggcgaggccgatatcctgcttgttccttcaattgaaacaggcaatgtcctttataaatcattgattcattttgcgggtgcaaaagtgggagccattttagcaggggcaaaagcacccatcgccttgacaagcagggccgattccgcagaaaacaagttgtattcgattgctttggcgctgtgtacgtctgaagcacgacatgaggaggaataa

SEQ ID NO: 3014 - DNA, 2070 bp, Bacillus licheniformis
atgatgcaaaaagtactgatcgttggtgctggaaaaggggggaccgccctcttggatttgctgctgaaaacaaagacgatgcatatcgaggcggtcatcgataaaaatccggaagctcccgggcttttcgtcgcgcagaaaaacgatatcgaaacggcactcgactggacgccatacatcacagaacagatcgacatcatcattgagacgaccggagacgccggcgtgttaaagcagctgatgcgaaaaaagcacgacagaacgatcgtggtgccgggatcgctcgcttatatcatctctcagctgatgaatgaaaagcagcagctcatccaaatgttaaaagagcagacgtataaacacgaccgtattttcaactcgatgaatgacggcatgatttttatcgacattaacgaagagatcattttgtttaacaaaatggcggaggttatgaccggaacaaagcgcagcgaagcgataggccagcatattcaaagcgtgatcccgacgacgaagctgccgcgtattctcaacacgagagagcctgagtatcatcaaaaacaatttctccatccgaacaggcagattgtcacgacccgaattccgattattgatgacggaggaacgctcctcggggcgctcagcatatttaaggacattaccgatgcggtcgagctggctgaagaggtgaccaacctgaaggaagtcagaacgatgcttgaagcgatcattcaatcttccgatgaagcgatttcggtcgttgacgaaaacggaaacggaatgatgatcaacagggcatatacgaagatgacaggtctgacaaaagaccaggtgatcgggaagccggctaataccgacatatctgaaggcgagagcatgcatttgaaagtgctcgaaacgaggcgccctgtcagaggggtcagaatgaaagtcggcccgaataaaaaagaagtgatcgtcaatgttgcgccgattatcgtcgacggcattttaaaagggagcgtcggcgtcattcacgacgtatctgaaattcaatcgctcacaaacgagctgaacagagcacggcagattatccgtacacttgaggcgaaatatacatttgccgacatcatcgggtcaagcgagcagatgctcgtcgcgctggaacaggcgaaattgggggcgaagacgcctgcgacgattttgctgagaggcgaatcgggaacgggtaaagagctttttgcccatgccatacataacgaaagtgaccgaaagtataataagtttgtccgcgtcaattgtgcggccatatcggaatcactgcttgaatcagagcttttcggctatgaggaaggcgctttttcaggtgcgcgccgcggcgggaaaaaaggattctttgaagaagcgaacaacggaagcattttcttggatgaaatcggcgagctctcgctaaacacacaggcgaagctcctccgcgttcttcaggaaaaagaaatcgtcagagtcggcgggaccaaaccgatccctgtgaacgtccgggtcatcgcggcgactaacgtcaatattgaaaaggcgctcgctgaaggccggtttcgcgaagacttgtactaccggatcaatcgctatccgatatcgattccgccgctcagacagcggaaagaggacattgaagccttgagcaggcatttgatagggaagatcaaccaagagtacgggcgcaatgtaaaggggcttacgaaaaacgccctcaaatcgctaaaagcgcggaagtggccggggaatgtcagagagcttgaaaatgtcctcgagcgggcgatgatttttttaaaaccgcaaatggaatggattgatctagaacatcttcctgaagcggaccgtccgagaaaaaaggtggaagccggcgaagctttccctgaaattgaagatgaaaagctgtctgatgcggtcgaacggtttgaagctcatatcattaaagaaacgcttgaaaagcatcaatataacagaacgaaaacggcaaaagctcttggaatcagcattcgcaacctctattacaaaatggataaatacaaccttgcaaaagatagcatgcaataa

SEQ ID NO: 3015 - DNA, 255 bp, Bacillus licheniformis
atggggagaatgatcgcactgctcgttttgctgatcccgggaggcctggctgctctcggaattaaattgatgcgcgacacggttttcggcattttgatcggcccgtttcagatcctttggcttcaggggctggcggggttcatatgcttcgcaggcggcctttatttgttaggcggatttattctatacagagacagaaaacgcaaccaagtaagcccccgtttcagaaaaaagcagagcggccgcgaggtgtga

SEQ ID NO: 3016 - DNA, 726 bp, Bacillus licheniformis
atgacgaaaatatttgcacacagaggggcttcaggcacttttcccgaaaatacaatggcggcgtttaagcatgcggcggccattggtgcagacggcatcgaattggatgttcaaatggcaaaagacggacgtcttgttgtcattcatgatgaaaagcttgacaggacgacttcactgaaagggtatgtgaaagatcttacatatgaggaaataaaacatggagacgcaagccaccgttttgccgaaaaaaccggttctgttcctgtgccgacccttgaagaagtgtttgagtgggcggcagatgctgaatttcttcttaatgttgaattgaaaaacagcattatccgctatgaagggatggaagaaaaagtgatgtcgatgattgaagcgtacgaccttcaagaccggatcattctttcatcattcaatcatgaaagccttgcgttatgccacagactgaatccaagtattgaattggctgcgctttacatggatgtcatctacaagccggaggaatacattgagatgattccggcttcaggatttcatccgtatcgccgttcaatgtcggatgacacgatcaaaaacgcccatttgaaagaaaaagcggtcaggccgttcaccatcaaccgtgaagaggagatgaaaaagctgattgctgcgggaatagacggtttcttcaccgactttcccgaaaaagcgttaaaattaaaggccgagatgtga

SEQ ID NO: 3017 - DNA, 621 bp, Bacillus licheniformis
gtgaaactgttaataaagagttttgttttgctgctgttttcgtttatggcggcttttccagctgcttttgcggctgagccgctttccgggaagacggtatatgttgacgcaggtcacgggggtgaagacagcggtgctgtcggaaacgggctgcttgagaaagatgtcaaccttgaagtggcaatgctgattgatgaaaagctgaaagaagaaggagccgacacagtcgcctcaagaacggatgatacgtttttgacgctggaagaccgggtggccaaggcgagcaaaaatgcttcagacttgtttatcagcattcatgcaaactcggccgtccctgaagcgtccggtacagaaacatatttcgattccacgtatcaagccgctgacagcgaacggctggcatctgacattcaagagcggcttccggatgcgctgggcactcgggacagaggtgtaaaagaatcagggttttatgtcatcaaaaattctcaaatgccgagtgttttagtcgaactgggctttatcacaaacaaaactgatgcagataaactcgaaagtccggaatatcaggaaaaagctgcagacgcgattgctgacgctgtcgtatcttattatgaataa

SEQ ID NO: 3018 - DNA, 320 bp, Bacillus licheniformis
atgaggaaaggagtcatccttgttctgttcgctatgctgttatggcaggctgcggcacaacgcagcataatgggcaaagcggtgatgagagccgaaaaggaacaggcgaggaaacgctcgtgaaagaaggcacctttgtcggtttggcggaccagcataccgtcgccgtcaatattgacggcaaagaaacgatgtttcaggtccctcccgaaaaacgggacaaatataaagggatcgaggatgatacaaaggtggaagtggagtacacgaaagcagaggacggaacattacagcttgaagatatgaaaaagaaagaatga

SEQ ID NO: 3019 - DNA, 204 bp, Bacillus licheniformis
ttgttagaagccatccgcgtaaaaacgtctgtgaaaaacgatctacccaaggcgaaaaatggctgtaaactggaagaaatcagatctttttcatcatttttatttttttgtataaaaaaacgtcttttttcttatgaaaaaagacgttttattcggctttcgctttatatgatccagtctatgacagcaatgctccgagcgtga

SEQ ID NO: 3020 - DNA, 405 bp, Bacillus licheniformis
atgatctttacgaaaacagatcttcgctatccggtgaattttttcgggccagggttgaggattaaccattacggattgctcatcgtaaacagcaatgcaaaaataggtgcaaactgtgacattcatcaaggggttaatatcggacaaaatcacgctcgccgcgatgttcccacaatcggagacaatgtctggatcgggccgggggcaaagctctttggcgacattcacattgctgacggcatatcaattggcgcaaacgccgtggtcaacaaatctttcactgaggaaaatattacaatagccggcatgcctgccaaaaagattaaagaggcgccgtcaaataaagaccggaagcaagctgttcagcggcaaatacaagcatgggaaatggagcagcgctgctga

SEQ ID NO: 3021 - DNA, 294 bp, Bacillus licheniformis
atgaaggtcaataaattattaactggtacgactctggctgttggtttacttatttctgcagcgccggtatttgctgcatcgcattcatctgaggtgattgcacatccgactgctcaatatatcaattgtccaagtgacttgccaagctcattcaaaagcagtaaatcatcaaaatgtgtaaaatcatcttctggagttttcagtaacaaattttctgatagcgatggaacatggtatttcaaagggaaattttacagtaatgtttttaatacttgggttggtttttatgaagga

SEQ ID NO: 3022 - DNA, 801 bp, Bacillus licheniformis
gtggagaaaattaaagtatgtgttgctgatgataacagggagcttgtcggcctattaagcgaatatatcgagggacagagcgacatggaagtgcttggtgtcgcatacaacggacaggaatgcctttctttgtttaaagacaaggagcccgacgtgcttgtgctggatataatcatgcctcatctcgacggattggccgttcttgaaaggctgagggaatcgcagcttaaaaagcagccgaatgtcatcatgctgacggcgttcggccaggaagacgtgaccaaaaaagctgtagatttaggcgcgtcgtattttattttgaagccttttgacatggagaatttagtcggacatatccgccaggtcagcggaaacggatctcaattgacacaccgtgccccgtcctctcaaagcagtgtgcttcggccgcagcctgaatcgccgaagaaaaacctggacgccagcatcacgaccatcatccacgaaatcggcgtacctgctcatattaaaggctatttgtacttaagagaagccatctccatggtatataacgacatcgaactgctcggcagcattacaaaagtgctttatccggatatcgccaaaaaattcaacacgactgcaagccgcgtcgaacgggcgattcgccacgccatcgaagtcgcatggagcagaggcaacatcgactcgatttcgtcacttttcggctacacagtcagcatgtcaaaagcaaagccgaccaatagtgagttcatcgcgatggtcgcagacaagctgagactggagcataaggcttcttaa

SEQ ID NO: 3023 - DNA, 1284 bp, Bacillus licheniformis
gtggatgttgaaaaaatcagaaaagctgtgggtataattctccttgtttctttaataagtgtaggattttacaaaccggtgaaagaatacattgtaataccaaaaaatttgaacatttttgagacgggtacccgtgcggttgaaacgagcttatccgtcagtactccgaaagatggatcatcagaagcattcacattgaaagaaaatcaaaacgaagtggaaataaaaggcgaaaagaatggaaaggcagaactcgtctatgactttgccggatttccggttaaaaaaacgaaagtaaatgtcctgcctgatttgaaagtggttcccggcgggcagtccattggtgtaaaacttcattccgttggtgtattggtcgtgggttttcatcaaatcaatacctctgaaggcaaaaaatcgcccggtgaagcagccggaatcgcggtaggcgacattatcaccgaaatcaacggcacgaaaatcgagaaaatgaatgacattaccccttttattcaaaaggccggaaaaacaggagaaaccttacatctgtcgataaaaagagataaacaggaaatcaaaacgaagctcgttccgaaaaaagaccaggctgaagacaaatacagaatcggcttatatatcagggactctgccgcaggaatcggcacaatgacttttttcgagccgaaatcgaaaaaatacggagcgcttggccacgtgatttcagatatggatacgaaaaaaccgatcgttgttgaaaaaggacaaatcgtgaaatcgaccgtcacctcgattgaaaaaggaacaggcggaaatcccggagagaaactggctcgtttcgcatcagaacgaaaagtgatcggcgatatcaacagaaacagtccattcgggatcttcggaacgcttcacgagtcaattaaaaaccgcatcgctgacaaagccattccgattgcattttcagatgaagtaaaagaaggccctgcccaaattttaacggttattgaaaacgacaaagtcgagaaattcgatattcaggtcgtcagtacgacacctcagaagtttccggccacaaagggcatggtgctgaaaatcaccgacccgaggctgttgagtaaaacaggaggcatcgttcaagggatgagcggaagcccgatcatccaaaacggaaagatcattggcgccgtaacccacgttttcgtcaatgatccgacgagcgggtacggtgtgcatattgaatggatgctgtctgaagcgggaatcgatatttataaaaaagaaaaagcaagctga

SEQ ID NO: 3024 - DNA, 1731 bp, Bacillus licheniformis
ttgttagctgaattatcgatcaaaaactttgcgattatcgaagaattaaccgtttcttttgaaaaagggctgacggttctaaccggtgaaacaggtgccggaaaatcgatcatcatcgacgccgtctctttgcttgtcggaggccgcggatcgtccgaatatgtcaggtatggcgaaaaaagggccgaattggaagggcttttcctccttgacggcggccatccggtttttgatttgtgcacagagctggggattgaagcctcggacgacatgatcgtcatgagaagagatattaacgcaaacggcaaaagcatctgccgcgtcaatggaaaacttgtcaccattgccgcattgcgggaagtcggcagactgctgcttgacattcacgggcagcacgacaatcagctgctgatggaggacgagcaccatcttcagcttctggacaggttcgcaggagaagaaatcgagaatgctttaaaagcgtatcaggaagtttacagccgctacatggatgtcatgaagaaggtgaaagagctttctgaaagcgagcaggaaatggctcacaggctcgatttaatacagttccagcttgacgaaatcgaatcagcaaaccttgagccgaaagaggacgagcttcttcaggaagagcgccgtcaaattgcaaatttcgaaaaaatatacgaagcgctgcaaaatgcctataatgcgcttcgcaatgagcaggccgggcttgactgggtcggcatggcttcaagcgagcttgaaaacgtctcaggcattaatgaagggctcaataaagtatctgaatcggtagccaacgcttactacattctcgaagattcaacctttcagatcagaaatatgctggatgaactcgaatacgaccccgagcgcctcgattatatcgaatcgcgtttaaacgaaatcaaacagctgaaacgcaaatacggcgctactgtcgaagacatccaagcttattcggctaagatagaggaagaaatcgaccggatcgaaaaccgggacagccacttgcaggctttaaaatcacgactcgaatcaatcggcaaggatgtggcgattgaagcagccaatgtgtccgaaatcagaaaaaaatgggcggaaaagctggccaaacagattcagcaggaattgaaagatctgtatatggaaaaatcgacatttgatacggaatttcatgtgaaaaaagcggaacgggatgatgatgcacccgtcgtcaacggaatgtctgttcagctcacaaagcacggcattgacaccgttcgtttcctgatctccacaaacacgggagaaccgcttaaatccttgtcaaaggttgcttcaggaggagagctctcaagaatcatgctggcgatgaaaagcattttctccgctcagcaggatgttacatcgatcattttcgatgaagtggacactggtgtaagcggaagagtcgcgcaggcgatcgctgaaaaaatacaccgagtctctatcggctctcaagttttatgcattacccacttgccgcaggtggccgcgatggctgacacccaccttttgatcacgaaacagtcgaaagacgggagaacaacaacaagcgtcacacctttgtcaaaacaggaaaaaatagcggaaatcggccggatgattgccggcgttgaagtaacggatttgacgaagcgccatgcgaaagaacttttaaatcaagctaagctagtcaaaaccagcggataa

SEQ ID NO: 3025 - DNA, 450 bp, Bacillus licheniformis
atgaacaaaggtcaaaggcatattaaaatcagggagattatcaccgcgaatgaaattgaaacgcaggatgagcttgtcgatattttaaagaaagacggctataatgtgacgcaggccaccgtctcacgggatattaaagagcttcatttggtgaaggtgccgacaaacaacggttcctacaaatacagcctgcctgctgatcagcgctttaatcccctttccaaattaaaaagatcgttaatggacgcattcgtcaaaatcgactcagccagccatctgattgtgttaaaaacaatgccgggaaacgcgcaggcgatcggggcgctgatggacaatttggattgggaagaaatcatgggaacgatctgcggagatgataccattttgatcatctgccggacgcatgatgatacgaaagtcgtacagaagaaaatattggagcttttataa

SEQ ID NO: 3026 - DNA, 846 bp, Bacillus licheniformis
atgacaggaaaaaaagaacggctcgacgttttattagtagaaagagggttaatggaaacgcgggaaaaagcgaaaagagccatcatggccggcattgtctatacgaatgaaaacagactggacaagccgggcgaaaaggtcgaccgcacgatcccgctgaccgttaaaggaaacccgttaaaatacgtctcaagaggcggattaaaacttgaaaaagcattaaaggagtttcagctctccgttcaaggcaagctgatgattgacatcggctcgtccaccggcggctttacagactgtgcgctgcaaaacggcgctctttgctcatatgccgttgatgtcggttataatcagctcgcctggaagctgaggcaggatgagcgggttgttgtgatggaacgcaccaatttccggtattgcacacctgccgattttacggaagggctgccggagttcgcgacggtcgatgtctcttttatctcactgaaaatcatcctccctgtgctgaagaacattttagtgccgggaagcgactgcatcgctctcgtcaaaccgcagtttgaagcagggcgggaatccgtcgggaaaaaagggatcgtccgcgatcccctcgtccataaagctgtgcttgatgacatcagccggtttgcggctcgagaaggatacgactgccgaaacgcctcgttttctccgattaccggcggcgacggcaacatcgaattccttctccatttgcattgggacggagaggcgcaatccggaacgccgatagcggaagaaacgatcaatcaaattgtcgaagaggctcacaagacattaaaagcgaaaaaaccggatcagcgtgattaa

SEQ ID NO: 3027 - DNA, 1902 bp, Bacillus licheniformis
ttggatctgttatcgataaaggaccctgcatttttgaagaacctttcaaatgaagaactggaaagcttgagcgctgaaattcgccgttttttaattgaaacgctttctgaatccggagggcacattggtccgaatctcggcgttgtcgagcttaccattgcattgcataaagaatttgacagcccgaaagataagttcttgtgggatgtggggcatcaatcgtatgttcataaactgttgaccggccgcggaaaggacttcgccacgctgcgccagcataaagggctgtgcggttttccaaagcggaatgaaagcgaacatgatgtctgggaaacgggccacagctcgacttctctctccggtgcgatggggatggcggctgcgagagacttaaaaggcacaaacgaatatatcatcccgatcatcggagacggtgcactgaccggcggcatggctcttgaagcgcttaaccatatcggccatgaacaaaaagatatgattgtcattttgaatgacaacgaaatgagcatcgctccaaacgtcggagcgattcattccatgctcggaaggctgcgtacagccggaaaataccaatgggtcaaagatgagctcgagtatttgttcaagcggattcctgctgttggcggaaagcttgccgctacagccgaacggattaaagacagccttaaatatctgctcgtatccgggatgttctttgaagagcttggatttacgtatttagggcctgtagacggccattcctacgatgaactgtttgagaacttgcagtatgcgaagaaaacgaaaggcccggtactcctccatgttattacgaaaaaaggaaaaggctacaagcctgcggaaactgataaaaccggaacatggcacggaaccggcccatataaaatcgataccggtgactttgtcaaaccgaaagctgctgcaccatcatggagctcgctcgtaagcgaaacggtcaggaagcttgcccgcgaggatgaacggattgtggccattactccggccatgcctgtcggttcaaaacttgaagggtttgcgagcgaatttccggagcgcatgtttgatgtcggcattgcggaacagcatgcggcaacgatggcggcgggacttgcgacacagaatatgaagccgtttctggcgatctattcgacatttcttcagcgcgcctatgaccaggttgtccatgatatctgccggcaaaatctaaatgtatttatcggcattgacagagcaggtctcgtcggcgccgacggggaaacacaccagggcgtgtttgacattgcttttttacggcatattccgaatttggttctcatgatgccaaaagacgaaaacgaaggccagcacatggtcaacacggctgtcaaatacgacgacggcccgattgccatgcgctttccgcgcggaaacggactcggcgtcaaaatggataaagaattaaaaacgatcccgatcggaacgtgggaagtgctgcgacctgggacagacgcggtcattttaacgttcggcaccaccattccgatggcgcttgctgccgcggaggagctgcaaaaagaaggccgttcggtcagagtggtaaacgcccgttttatcaagccgctcgatgaaaacatgctgaaggaaatcctgaacgaggggcttccgattttaacgatcgaagaggctgtgcttcaaggcggattcggcagctcgatccttgagtttgcccatgaacatcagtcttacagtccgatcattgacagaatggggatacctgatcaatttattgaacacggcagcgtcgccaagcttctggaagagatcggaatgacaaaagaagacgtcatcagacgaataagacttttgacgcccgtaaagactcataaaggaattggatcatga

SEQ ID NO: 3028 - DNA, 186 bp, Bacillus licheniformis
atgcagggtcctttatcgataacagatccaatcggatcaactcactttcagcatgatttctgcaagtatgcgccttgcttcgttttaggttttcagcttgaattattatatgatgaattcatccccatgcgcaaacttgcatatgcggacgcttcgtttgaaaaaacagccgctaacacaacgtga

SEQ ID NO: 3029 - DNA, 891 bp, Bacillus licheniformis
gtgaccggtaaacttgaaggatttttaaaatcgagaaaaacagtaattgaagagcgccttccgatgtatattaaagacttgcaagcgccgtccatcctcaaggaatccatgctgtactcattggaagccggggggaaacggctgagaccgatattggttcttgcgcttcttcatgcgtacggaaaagacgaagaagccggaattccagtcggatgcgcggttgaaatgatccatacgtattcattaatccatgacgacctcccttgtatggatgacgatgacctcagaagaggtaagccgacaaaccacaaaatttacggggaggcgacggccattctcgcgggagacgccttattaaccgaaagcttcaaaatgatcacttccaatatgccttctgatgtatccgctgaaaagcgcatcagactggtgaacgagctgatttcggcagcgggggccgaaggcatggtcggcggtcagattttagatatggaagcggaatcaaagtctgtatctcttgatgaactgcagcgaatccacgaaggaaaaacggctaaactcctcagcttcagcgtcattgcgggagccattcttgcagatgcatctgaaaaagagatcgaaaagctgcgcgaattcagccatcatatcggcatcggctttcagatcagagatgacattttggaccttgaaggctcggaggataagatcggcaaacggatcggatccgacgcttcaaacggaaagtcgacgtatccgtcgctcctttcgcttgagggcgccagccaaaaacttgatgaacatattgaaaaagcaaaacagctgatttcagagcttccgcttgaaaaagagcttatgtacgagttctgcgatatgattgccgctagggatcattga

SEQ ID NO: 3030 - DNA, 261 bp, Bacillus licheniformis
atggctgaagaaaacaaaacaaaccgggatgacctgacatttgaagaggcgatgaaaggtttggaacagatcgtatcaaagcttgaagaaggggacgtgcctttggaaaaggcgatcgactatttccaggaggggatggctctttcgaaaatatgccacgaaaaactgcaaaatgtcgaaaaacagatggacttcattttgcgggaaaacggggaattagctcctttcagtgttcgggaggaggaaaaaggtgaccggtaa

SEQ ID NO: 3031 - DNA, 1350 bp, Bacillus licheniformis
atgagtgaaatatcatttgtcacggtcacggctttgacaaaatatattaagcgcaaatttgacgtggaccctcatcttgaagatatttggatcaagggcgagctgtcaaatgttaaaatacatagcagaggccatatttatttcacactgaaagatgataacgcccgcatccaatccgtcatgttcgccagacaaaacaggaatctcgcctttacccctgaaaacgggatgaaagtattggtgagaggcggcatttcggtatatgaaccgagcggcagctatcagctttatgcaaaagaaatccagccggacggcataggtgcgcttcatctcgcgtatgaggaacttaagaaaaagctatcgcaagaaggcttatttgatgaaaaatacaagaaacccatccccgcgttcccatccgtcgtcggtgttgtcacgtctccaactggagcggctgtacgcgatgtgatcaccaccattaaaagaagatatccccttgtaaaagtgatcgtccttcctacgctcgttcaaggagtaaacgcgggcgagtccatcgtaagcagcattgaagaggctaaccgcagagacttatgcgatgtattaatcgtcggtcgaggaggaggatcgatcgaagagctgtgggcatttaacgaagaggccgtcgccagggccattttttcttctgacattccgatcatttctgccgtcgggcatgaaacggattttacaatcagcgattttgtcgccgatttgcgcgcggcaaccccgacaggagcggccgaactggccgtacctaatatgcttgatttgctggagcgtctgaaaacgctcgaagcgagaatgacaaaatcgatgcagcaggacttaaaaaagcggcaggagcgggtgaaaaaccttcagtcctcctatgccttccgatacccgaagcggctatatgcccaaaaggaacaggaattcgacctgatattcgaccgtttccaaaaacagctggcgatgaccgtcgaccgcaaaaaacaaaaactgaacgaacagacatacaagctggagatgcttcatcccgaggagcagcttaaacaagcgcgaaaaaggcatgaagagcaaacagtccggctgaagcggaatatgaaagtgcagctgaagcagattcactcgcagtttcaaacggttcttggtaaactgaatgcattaagccctctccaagtgatggaaagagggtacagtttgacatataaagaaaacgaattgattaaaagtattgaacaggttcatgaaaaagacgagatccgcgtcacattaaacgatgggacgctgacctgtgaggtactgcaaaagagaggcgaaacaaatggctga

SEQ ID NO: 3032 - DNA, 855 bp, Bacillus licheniformis
atgacagcaaccatcatcgacgggaaagaaacagcaaaggaaaagcgcgggcagctggccaaggaagttgaagagctgaaaaaacaaggagttaccccgggactggccgttattttaattggtgatgatccggcgtctctttcatatgtacggggaaagaaaaaagcagctgaagcaatggggattcgttttcagctggatcatttcgatgcaagcttcactgaacaggagcttcttgaagtgattgaccagtacaatcaaaatgacgactttcacggaattcttgtccagctgcctcttccggatcatatttccgaacaagcggtgatcgagagaatatcccctgagaaagatgttgacggttttcatccattaaacgtagggaagatgctgcttggcgaagatacgtttctgccttgcacgcctgcggggatcgtggagcttttaaagaaaaccgagattgacctgtcgggaaaagaggttgttgtcgtcggacgaagcaatatcgtcggaaagccggtagggcagctgctcttgaacgaaaacgcaaccgttacgtactgccattcaagaacggccgacattacggctcatacaaaaaaagccgacattctgattgtcgctgtcggaaaggcgaatttcatcaaagcggatcaaattaaagagggagccgtcgtcatcgatgtcggcgtcaaccgccttgacaacggaaagctcgccggtgatgtcgattttgaagaagcgaaggaaaaggcttcctatattacacctgtaccgggcggtgtcggtccgatgacgattacaatgctggcccacaacacggttaaatcagcgaagcgtacaattcaactttaa

SEQ ID NO: 3033 - DNA, 390 bp, Bacillus licheniformis
atgaaaagaagaacagcaagagaaaaggctttgcagtcactattccagattgatgtcagtgatatagaaccgaatgaagcgatgcagcatgccttggacgggcaggaaagcgatgcttttttcgaacagctcgtttacggggtcttagagaacaaagagaaaatcgatgagatgatcaagcggcatctcgtcaattggaagcttgacaggctggcgaatgtcgaccgcgcgattttgcgtttgtccgcctacgaaatgatctttttagatgacatacctgtcaacgtctctatgaatgaagcgattgaactggcaaagcaatttggtgatgacaagtcggcgaagtttgtaaacggtgttctttctaacattaaatccgatcttgaataa

SEQ ID NO: 3034 - DNA, 411 bp, Bacillus licheniformis
ttgaaagacgacaacagcttattggaaatgagccatgaagacaatcatttgggaaaagtggaaatcgctccggaagtgattgaagtcattgccggaatcgcagcttccgaagttgaaggcgtagctgaaatgcgcggcaattttgcgacaggtgtcgtagaacggtttggaaaaaagaatcacggcaaaggcgtcaaagttgatttgtccgatgacggaattatcattgatgtttattgcgtgatgatgtttggcgtgtcgattcctaaagttgcgaatgccgttcaggataatatccgccagacgcttctcaatatgacagctctttcgattaatgaaatcaatattcacatcgttggcattcaattcgattcaaaaacgcacgaggtggaaatcgatcaagagatgtag

SEQ ID NO: 3035 - DNA, 1353 bp, Bacillus licheniformis
atgatcaaaaagctattaattgcgaacaggggagaaattgctgtcaggattatcagagcttgtaaagaactggggattgaaacggtagccgtcttttccgaggccgacagagaggcgctccatgttcagatggctgatgaagcattttgcatcggacctaagctttcaaaagacagctacttgaatataacgaacatcgtcagcgtcgccaaaatgaccggtgctgatgcgattcaccccggctacggcttcctggcagaaaacgccgattttgccgagctttgcgaagaggtaaatgtaacctttgtcgggccgacagcagacgcgatttccaagatgggacaaaggatgttgcaagggaaacaatgcagcaggccgggtgttccgatcgtaccgggctccaaaggaattattgaagatattgaagatgcggtttcattggcccgcgatatagggtatcctgtcattataaaggcaactgccgggggcggcggaaaaggaatcagggtcgcccggacggaagaagagctgatcaacggcattaaaatcactcagcaggaagctgccaccgctttcggcaacccgggtgtgtacattgaaaaatacattgaagatttcagacacgtcgaaatccaagtgcttgcagacacacacggaaacacgattcatttgggggaacgcgactgctcaatccaaagaaggctccaaaagctgcttgaagaaaccccttcacctgctctggatgaaggaatcagggagcagatggggcaggccgctgtcaaagcggctgaagccgtgaagtacacgggagcgggaacggtagaatttatttacgattaccgcgagcagaagttctactttatggaaatgaacacgcgcattcaggttgagcatccggtgacagagatggtgacgggcgttgatttgattaaagagcagatcagagtggcgtcaggcgaaaaattaaccctcacccaggatgaagtcacctttaacggatgggcaatcgaatgccggattaatgcggaaaaccctgagaaaaacttcatgccttctccgggaaaaatcgagatgtatctgcctccgggagggctcggcgtcagagtggactccgcggcttatccgggatactcgattcccccttattacgacagcatgattgccaaagtcatcacttacggaaagacgagggaagaagctgtttcaaggatgaaaagagcgctgagcgaattcgtcatcgaaggcgttcatacgacgataccgttccatctgaagctgcttgagcacgaaacattcgtaagcggagaatttaatacgaagtttttagaaatatatgatgtaatggggtcgtaa

SEQ ID NO: 3036 - DNA, 480 bp, Bacillus licheniformis
atgttaaacattgatgaaatcagacagttgataaaattaattgatgaatcttcgataaatgaatttacatacgaaaacgaaggatcgaaggttgaactgaaaaaacaaagcggaaccgtgcaaaccattcagcaagtggctgcggcgcctgttcaggcaccggctccggaagctcaggccaagcaagcgcctgttcaggatgcgcctgcaaaagaagaagcggcaaaagaaggcggaaacttccacaagatcacctctccgatggttggaacgttttatgcatcttcttcgcctgaagccgacccttacgtaacagtcggctcgaaggtaacagagtcctctgtcgtctgcattgtggaagcgatgaagctcttcaatgagatcgaagccgaagtggaaggcgagatcgttgaagtattagttgaaaacggccagctggttgaatacggacaacctttatttttagtaaaagcagagtaa

SEQ ID NO: 3037 - DNA, 639 bp, Bacillus licheniformis
atgatgctgaaaaaacaaacggtttggcttttaaccatgttaagtctcgtcgttgtactgagtgtctactacattatgtcgcccgaaggagaaaatgtcgtcacggttgatgacaaggaacaagttgccgctgaaaaagaaaaaccgatgaaagaagagcctgccaaggatggcaaagatgataccgcgcctgctaaagacaaaactgaagggaaagatacaaaagataaagaaacgtctgcgagtgagcagaacggagaggttgtcacagaggaatcatcgggtgatgaagatttattcacaacataccgcatggaaatggacgatcagcgcagcagggagagggaggaattaaccgaaatcgtcagaagcgataaagcgacggcaaaagaaaaaagcgaagcttacgacaagatgacagagctcagcgaagctgaaggaacggaaaagacccttgaaaccctcatcaaaacaaaaggctataaagacgccttggtcaacgccgacggcgataaagtcaatattacggtgaaggcgaaggagcactcgaaagccgctgccaccgatatcatcgacatcgtcgcaaaagaagtgaaaaacttaaacgatgtggctgtaacgttcgagccagcagattaa

SEQ ID NO: 3038 - DNA, 696 bp, Bacillus licheniformis
atgaataaaagaacctggatcgaaaagctgatcggccacctgctcccgaaagacgagaaagacggaaaaaagctgacgaaatatcactactttctgctgctttttgttctcggcgtttccttcatgctcgtcagccagatcttctcttccgaaccttcccaagagccagcggcagatcagccggcggcttcacaaaaagctacgtctgaaagcaccgtacagagcggtgaaggagaaaaagaagtgttcaagcccgcctcagatgacaaaccgaaggaatcgatccaagattacgaacaggaatatgaaaatcagctcaaagacatattggaaaccatcatcggcgttgaggacgtgtcaatcgtcgtcaatgttgatgcaacctcattgaaaatattcgagaaaaacagaaaaacccaggaaacttcaacgaatgagacagataaacagggaggcaagcggacggtgtctgaaatgtcttcagacgaagaaatcgtcatcatcaaaaacggagataaagagacgcctgtcgtcgttcagacgaaaaagcccgatatcaggggtgttctcgttgtcgctcagggagtcgacaacgttcaaataaaaaagaccattattgaagcagtgacaagggttcttgatgttccgagccaccgcgtcgctgttgcccctaaaaaaatgaaggaggattcataa

SEQ ID NO: 3039 - DNA, 626 bp, Bacillus licheniformis
atggaatttctgacagagtggctcacgaatattattctatttattctgatggcgatcgtcatcgatatgcttctgccgaattcgagcatgcaaaaatacgcgaaaatggtgatcagcctgctcttgatcgttgtaatactgaacccgatcttctctttattcaggacagatccggatgtgatttttgagaagcttacaaaaaacggacaagttcagtcaaacgaaataaaaaatcagctgaattcagaaaaaaaagaaatacaagcctcacaacaagcatatatcttagaacagatggctgttcaattggaaaagaacgcagagggcaggtttacaagcgacaaatacaagatagaccgagtcgaggtctcttctgacagccagctgaaaacagagaaagacctcagtaagcatgcggaagtctcggtattcttgaaaccagcatcggaaaaaacggtccaagccgtcgctcctgtcgagatcaatacggaccggagctaccagtccatgcaggaaagagaaaagaaagagacgggggaagtcagagaacagctagcaggcatctgggaaataagccccgacaagattacagttcatatcgaagggggagaacgaagcggcaatga

SEQ ID NO: 3040 - DNA, 1206 bp, Bacillus licheniformis
gtgaagcgttttctgttctggctcttggtcatcggaatcgtatgctttggagcgcataatgtacaagcttcgccaaaagaagcggagccggctggggaaaccgccgcagaagaatcggcagaagccattgcaagagagcaggctgaaggtttggaacttgaccgggtcggggagttctggaacaacattttgacagagtatgggggacaccttcccgaaagtcaaaaaggaagcctgcttgaatttgtcaaaggagaaaagcacttttcgcctgaggaatggggcaaagcgctgttttcctacttgttccatgaagtgctggctaacgggaaactgctggggacgctgatcctgttgaccatcttctgcgtcctgcttcagcttttgcaaaacgcgtttcaacaaagcaccgtcagcaaagtggcgtatgcaattgtctacatggtgctgattattcttgcgctcaacagctttcgggttgccgtcacatatgcgaatgaagcgattcagacgatgacaagctttatcctgtcgctcgtacctctgcttctggcgctgatggcgacttcggggggagccgcctcagccgcattctttcatccggtcattctttttctcatgaacacgagcggcttgtttatccaatatatcgtgttgccgcttttatttttatcagcgattttaagcattgtcagcacgatgacggaccaatataaagtcacacagctggcccagctcctcagaaatgcggcgatcggcacgctggctgcatttttgaccgtattcctcggtgtcatctcggttcagggcgcctcagccgcagtgacggacggcattactttgcggacggcaaaattcattaccggaaacttcatccccgtattgggccgcatgtttaccgaagcgacagacacggtgatcagcgcgtctctcctgctgaaaaacaccgtcgggatactcggtgtggcaatcttaatttgcatcgcagcctttcccgcgatcaaaatcctttccctcgcgctcatatacaaaattgccgcggcggttctccagcctctcggaggcggcccggttatcagctgcctggatgtcatcagcaaaagcgtcatctacattttcgcggccatggccatcgtttcgctgatgtttttcttaagcttaaccgtgatcattacagcggggaatctgacgatgatgatgaagtag

SEQ ID NO: 3041 - DNA, 366 bp, Bacillus licheniformis
atgatcgccaccttcctcagcttgattgtgaaagagcaaaaaccgacgtttgcttttttgattgtcgtttttgccggctgcacgatttttttattcttagtagatcaggtctacgaaatcattcggatgattgaaaaaatagctgccaatgccaacatcaacatgatgtatgtcgaaacgattttgaagattatcgggattgcttatattgcggagtttggcgcccagctgacaaaggatgccggacagggtgcgattgcttcgaagatcgaattggcaggcaaaatcctcatcttagtcatggctgtgcctattttaaccgtgattatcgaaacgatcatcggactcatcccttccatgtcttag

SEQ ID NO: 3042 - DNA, 207 bp, Bacillus licheniformis
atgggagtagacgtaaatattatttttcaaattgccggcgtcgggatcgtcgtcgcttttcttcacaccatactggatcaaatggggaagaaggaatatgcccaatgggtcacgcttttaggattcatttatatattgttcatggtggcaactgttgtcgatgatctattccaaaagataaaagctgtctttctatttcaaggatag

SEQ ID NO: 3043 - DNA, 516 bp, Bacillus licheniformis
atgctgaagcttttaggtgccgtgcttattttggcagcagccacatggacaggatttgaaatggcgaagcctttcagggaaaggccgaagcaaatccgccagctgttggccgctttgcagtctttggaggctgaaatcatgtacgggcatacaccgctccgtcaggcatcaaaacagatcgcacaccagcttaccgagccggtagcctctttgtttcagacatttgcagaacagcttgaaaaaggcagcgcttcagcagggacggcatgggaagacagcctggagaaagtatggcccgaaacggctcttaaaaagaaagaatacgagattttacggcaattcggcgaaacgctgggccgtcatgatctgatttctcagcaaaaacatatcaaactggcgttaacccatttagagacagaggaagctgaagcaaatctcgcccaggcgaaaaatgaaaaaatggtcaaaagccttggatttttgacgggactgctgctgattcttctattgatgtaa

SEQ ID NO: 3044 - DNA, 924 bp, Bacillus licheniformis
ttgcaccacatcacagagattctccccgatacgatcaaacgcgcgctcagcggtcttggcgaccatgaaatcgatcagatagaagaaattcgggttcggacaagtcgtccgctggaactggtgaacaaaggaaagccgcgctttctcccttatgtggcgacgcctgaagactcggcgcttcttttaaacagattgggaaattacagcatgtatacactggaagaggaattgaaaaaaggatatgtcacgatcagaggcggacaccgcgtggggcttgccggccgggttgtcgtcgaaaacggggccgtcaaaggaatcagagaaatatcatcatttaatattcgcattgccaaagaaaaaatcggcatttccaaaccgtatgtcccccatttatttcaaaactcgtggctgaacacgctgattatcggtccgccgcaaaccggaaaaacaacactgctcagagacctcgccaggctgatcagttcgggaagcggcaacgcccctgccaaaaaagtgggaattgttgacgaaaggtctgaaatcgcaggctgtgtaaacggcataccgcaatatcggctcggcgaccgggcagacatccttgacgcctgtccaaaagcggaagggctgatgatgatgatcagatcgatgagtccggaggtaatgatcgccgatgagatcgggagaatggaagacgcagaagcgctcttggaagcggtccacgcgggggtgactgtcatcgtttcggctcacggctacacatatgcagatctcgccaggcgtccatcattgaaaatgcttcaagagcaccgggtttttgagcgaatcgtggaactttccagaaagaacggtcccggcagcctgagccgcatcctaaatgggaacggagagccgctcggggcagcaaagaggatgttatcatgctga

SEQ ID NO: 3045 - DNA, 282 bp, Bacillus licheniformis
atgaagcttttctttggacaagtcaatccgacggttttgacaatggcggcgttaagggtggtatcatctttgatcgaactgacggcggctgttgtgatgcttttgacaaacgacgtcagaaaagctgtggcggtcaacagcgtactggccatggtcgggccgctcatctttattattacaatgacaatcggcatctatcagattgcagggcagctttcttacgcaaagctgattttgatctttatgggagtggttttgatcatcgcggggatctataaatag

SEQ ID NO: 3046 - DNA, 126 bp, Bacillus licheniformis
ttgtcaatacttctgacggttcttacgtatcaagagcataaaggtaacagcgggaaagagccggcttcattgaagccggctctttttttgctgtctgaaatcttttacctctcacatgccaaatag

SEQ ID NO: 3047 - DNA, 558 bp, Bacillus licheniformis
atgatttcagtaaacgattttcgcacaggtttaacgattgaagtagacggagggatttggcgcgttgttgacttccagcacgttaagccgggaaaaggcgcggcatttgtccgctcaaaattgagaaatcttcgcacaggtgcgattcaggaaaaaacattccgcgcaggtgaaaaagtggcccgcgcccaaattgaaacaaaaacgatgcagtacttgtatgccaacggcgatcagcacgtttttatggatacgacatcttacgagcagcttgagctgaacgagaagcaaatcgaacacgagctcaaattcctacttgaaaatatgtctgttcagatcatgatgtatcagacagagacgattggaatcgaacttccgaacacggtcgaactgaaagttgttgaaacagaaccgggcattaaaggcgacacagcctcaggcggaacaaaaccagcaaaaacagaaacaggccttgtcgtcaacgtgccattcttcgtaaacgaaggagatacgcttgttgtcaatacttctgacggttcttacgtatcaagagcataa

SEQ ID NO: 3048 - DNA, 1062 bp, Bacillus licheniformis
atgaaactaaacaaattgagagagcttttcggcggtttaggcattgacggtatattggtgacgagcggcgttaatttgcggtacatcaccggatttaccggatcttcaggactggcggtcatctcagacgatcaagcagtctttattacggatttccgctatacagaacaggcgagggatcaaatcaaaaggtttgacatcgttcagcatgccggcggaatcgttcaaaagaccgccgaagtgatcaaagagatggggataaacaaaatcggttttgaacaggataaaatgacatacggaacgtatgccgcctacaaagagcagcttggcgcagctgaactcgttcccgtttctcaatctgtggaaaagttgcgcttgattaagtcaagtgaagagattaagatattaaaggaagctgcaaagattgcagatgatgcattcagccatattctgacggtcatcaagcccggcatcaccgaaattgaagtcgccaatgagctcgagttttacatgcggagccagggagccgatcattcgtccttcgatatgatcgtggcgtcaggcgtacgctcaagtctgccgcacggagtggcaagcggcaaagcgatcgagaaaggcgaccttgtgacgctggactttggggcttactataaaggttactgctcggacattacgcgtacagtcgcggtaggagagccggatgatgagctgaaacgcatttatcaaaccgtgtttgaggcgcaggctatcggcatgcggagcatcaagccgggaatcaccgggaaacaggctgacgcatacacaagggactacatatcttcacaaggctacggcgattatttcggccattcaacaggccatggcctcggcatggaagttcatgaaagtccggcgctttcagcacgttctgaccagatgcttgaaaaaggcatggttgtaacggttgaaccgggaatttacataccgggcaaaggcggggtcaggatagaagatgatattgtcctgacagaggaaggaaacgaatcccttacccattccgcgaaagatttaattattttataa

SEQ ID NO: 3049 - DNA, 438 bp, Bacillus licheniformis
ttgccgcatattttaattttgaacggaccgaatttaaaccggcttggaaaacgcgaacccgatgtatacgggacagacacattaaccgatttggaacaaagactttttcaatttgccgaaggcattcagacagaattgactttttttcagtcaaaccacgaaggggacctgattgatgctcttcatgaggcagaggagcaatacgatggaatcgtcttgaatccgggggctttctcgcattacagctatgccctccgcgatgcggtggctgcaatcagcataccggtgattgaggttcatctttcaaatcctcatgcaagggaagagttccggcaccgctcggtcatcgctccggttgcaagaggccagatcaccggactcggctttgaaggttataagctggccatctcttattttatgaacacaaataacaaatag

SEQ ID NO: 3050 - DNA, 537 bp, Bacillus licheniformis
atgggtaatgaagacaatcaaaaacagccggaagagcttgagcagaataagcgtgaaaccccgatgactttcaccggaagggtgatcatgactggctttgtcggcggagtgctctggagtgcactcggtgagctggcgtacctttttaagttctccgaggtcaatgcgaacatgattctccagccttttgtcatcggcgactggaaaaacggatttctcggaacgtttatcagcatactcttgatcggagtgatttccatcggggctgccttgctttactacggcactttgaagcaggtcagaggcatgtgggcaggcattgtctatggagccgttttgtgggctgtcgtgttttacctgttcaatccgatgtttcccgatgttcagacagtggctgaattaaagagggaaacgattgtgacgacgctgtgcatttatctgctttacggtttattcgtcggctattccatttcgtttgaatacaatgagctcaattctgaaaaactgacgcgcgcccttggagaaacaagagaatag

SEQ ID NO: 3051 - DNA, 954 bp, Bacillus licheniformis
atgtcaaatcaaacaaaacagcccgcatacggagggcaggctgtcgtcgaaggcgtcatgttcggcggcaggcgccattatgtaaccgcgatccgcagaaaagacggaagcattgaatttttcaagctgcctcggaaaaccaatccgacgcttgaaaaattaaagaaaattccttttctcagagggattatcgcgattgttgaagcgagcgctaacggcaccaagcacttgaatttttcgagcgaacgctatgacctcgacccttctttagacgatcaattgaaagaagagaagccgtccaatctgacaatgatttttggtctcgccgcagtcggcgtcctgtcttttttgttcggcaagtttatttttacgctcgtgcccgtttttttagcggagctcacccgtccggtctttcagtcggacgtcgcgcagattatgatcgaaagcttctttaagctgctccttctcctaagctatatttacgctatatcatgcactccttttattaaaagagtttttcaatatcacggagcagaacacaaggtcataaactgttacgagcaaaatctgccggtcacggttgaaaacgttcagcggcagtcaagactgcactaccgttgcggaagcagctttattctattcaccgtcatcgtgggcatgtttgtttacttgcttgttcctactgaccctctctgggttcgtattttgaatagactcgcactgatacccgtcgttctcggcatttcatttgaagtcctgcagctgacaaacaaactgagagacatccctgtattgaaggcgctcggctacccgggcttatggctgcagcttttaacaacgaaagagccgtctgacgatcaggtggaagtggcaatcgcaagcttcaatgagcttcttcatatggaaaccaaagcagaggacgaacagaaggaaccttctaatatcgtaatgtaa

SEQ ID NO: 3052 - DNA, 387 bp, Bacillus licheniformis
atgaagcaacgcgtacatcctgtctcagctttaattattgcgtttggaatttttgggtttgtttatttcgccgtcacaagtccgggccgcctgctccaatacttgcttgtttttgccgcggtcggcgccatcatttatttcgtgatcaggcgcatttccaatcgcaatatgggcagtgagggagccgcttttaagaaagcagccaaacaatccaacaagcgttttcaggatcataaaaaacgctctgtaaaaggcagggtcaatcacctgagaagcgtaccgtctatcaataaatcgaagccggtattggtgaagaaaaaaagccagacccagctgacagtgattgaaggcaaaaaaagcaaaaagaaaaacagggctttcttttaa

SEQ ID NO: 3053 - DNA, 876 bp, Bacillus licheniformis
atgtacatcgacggggttttttcaggcggcggcatgaaaggggttgcgcttgtgggagcatacgaagcgcttgaaaaacggggcttccgatttaaaaggctggccggaacgagcgccggttcgatcattgcctcatttatcgcggccggctatacaagcgcggagatccgccaaatgatggaggaattaaatgaaagcgagctccttgacccgaggttttcactcttgcctttgaaattgctgcaatgggcatcgatttattggcggctcggtttatataaaggagataaattggaaaactggatttccgaaaagttgaaagcgaagggcatttcagtgttcggggatcttgaacagggaaagctgaagttgatcgcttccgacttatcgaacggcaagatgcttgtgctgcctgacgatttaaacaggtacggtttgaatccagggcgattttccgtcgccagggcggtccggatgagctgcagcatcccttatttttttgagccggtgaagctcaagtcacctctcggaatcagcgtcgtcgtagacggcggagttctgagcaattttccgatgtggctgtttacaacagaaaaaaaacggccggtattgggcatcacgctgatgcccaatgaaaaagagaggccgaagaaaacgattaaaaatgcgttcgagctgttcggggcgctgtttgagacgatgaaagaggcgcatgacgccaggcacattgccacgaaacatgagcggaacatcatttttttgcctgttgaggaagttttgtcgactgaattcgcgatgtcggcagaaaaaaaactagctctaatcgagctaggaaaaaaacgaacagaattatttttgaaacagtggacgttttaa

SEQ ID NO: 3054 - DNA, 123 bp, Bacillus licheniformis
atgcgagggtttgtcgacacgctgaagccgctgggtaacggcggtttttttcttttcgtatcattttttccggatgccgctcgttgtctcatggtctttttttctgtccgtttcttaaaatga

SEQ ID NO: 3055 - DNA, 429 bp, Bacillus licheniformis
atgacaacaccgagtatggaagattacatagaacaaatttatatgctgattgaagaaaaaggatatgcaagagtctcagatatagccgaagctctggccgtccatccctcctcggttacaaaaatggttcaaaaactcgataaagacgaatatttgatttatgaaaagtatcgcggcctcgtgctgacgcctaaaggaaagaaaataggcaagcgtttagtatacagacatgaattattggagcagtttttacgaatcattggtgttgacgaagagaaaatttatgatgatgttgaaggaatcgaacatcatttaagctggaacagcattgaccgtatcggagatcttgtgcagtattttgaagacgacagcaaaagaatcgacgatttgagaagcgtccaaaaaagaaacgaacaggaaaatcaataa

SEQ ID NO: 3056 - DNA, 837 bp, Bacillus licheniformis
atggaaaaagaaacatggcgttttatcgattcgggacgacgggatcccgcttttaatatggcgctcgacgaggcgctccttttttggcacagcgaaaataagattccgccgaccatccgcttttacggctggaatccgccaacgctttcagtcggctatttccaaaatatcgaaaaggaaatcaatctggatgccgtcaaaaaacacggtttgggctttgtgagaaggccgaccggaggaagaggcgtgcttcatgaccaagagctgacctacagcgtcattgtgtctgaagaacacccggaaatgccgaagacggtgacggaagcgtaccgcgtcatctctgaaggtattcttgaaggcttcagagagctggagcttgatgcgtatttcgccataccgagaacggaaaaagagaaacagagtctgaaaaacccgagatcttccgtctgctttgacgccccgtcgtggtacgagctcgttgtcgaaggcagaaaggtcgcaggaagcgcccagacaaggcagaaaggagtcattcttcagcacggttcgatccttcttgatctggatgaggacaagctctttgatttgtttatttacaaaaatgaccgcctcagagagcgcatgcagagaaacttcaaacaaaaagcggtcgccatcaatgagctgacgaaagaaaaagtcacgattgaagaagcgagcgaagcttttaaaaaagggtttgaaaaagggcttaacattcatttggagccttatgaactgacggaagaggaaacggaatttgtcgaagatctcgccaggacgaagtatgcgacagatgaatggaattatagaaggtaa

SEQ ID NO: 3057 - DNA, 387 bp, Bacillus licheniformis
ttgtctaccagcagcattgtcgttctcttgatttgcgccgcgctcatcatctacgcggtcgcttcatacatctatcagcagcgcattatgaaaaccttgacagaagaagaattccgggcaggctatcgcaaagcgcagctcatcgatgtgcgcgagccgaatgagtatgaaggcggccacattttgggtgcgagaaacattccgctttcacagcttaagcaaagaaaaagcgaaatccggcctgacaaaccggtttacctgtactgccaaaacaacgtcagaagcggaagggccgcccaaacgctccgcaaacacggctgtaaggagatttacaacctgaaaggcgggttcaaaaaatggggcggaaaaattaaaacgaaaaattaa

SEQ ID NO: 3058 - DNA, 885 bp, Bacillus licheniformis
atgtggaaaaagatagcgggaatcggcactgcagcggtactcacattgggtctggctgcctgcggaagcagcaataataatgaaaatgcgtcagtaggcgatcaagtcaattataaaattaccggcattgatcctggagcgggcattatgaatgcgacggaccaggcgctcaaggactacgatctcagcaagtggactgtaacgtcaggatcaagctcagcaatgacagccgcattgaaaaaagcttatgacaaaaaagatccgatcatcattacgggctggacgccgcattggatgtttgcaaaatacgatctgaaatatttaaaagatcctaaaggttcctacggcgatgccgaagaaatccatactgttacgcgcaaaggattcaaggacgaccatccgggcgcaaacaagctgctcagccaattcagctggacagaggatgatatgggagaagtcatgcttgccgttcaggaaggcaaaaaaccggaagaagctgcagcagacttcgtgaaaaaacatcaagatctagttaagaaatggacaaaaggcgtcgataaagcggacggtgaaaaaattaagctcggctatgtggcatgggacagcgaaattgcgagcacgaatgtcatcgcaaaagttcttgaagacttaggatacaacgttacgctcagccaagtagaagcaggcccgatgtggactggcattgcaaatggaagcgtcgatgcttcacttgctgcatggctgccgcaaacgcataaaacatatgctgaaaaatacaaaggcaaatacgaagatatcggtactagcatgacaggcgtaaaaattggccttgtcgttccgacatatatgaaagatgtcaattcaatcgaagacttgaaaaaataa

SEQ ID NO: 3059 - DNA, 855 bp, Bacillus licheniformis
atgtttactttatcatcgcttccccgcattcctttagccgattggatcgatcagtttgttgactggctgacggtgtcgttcggcggggtatttaacggaattgccagcggagtggaatcgtttgttgatgcgattgtccaagggctgggttttgttccgccggttatgttgaccgttatttttgccgcgctcgtctggctgatcagcaaaagaggcattgcgctgtttactttaatcggattttttatcattgattatttaggatattgggacgccatgctccagacattggcgcttgtcgtcacatccgttctgatttctgtcattatcggcattccggtcggaatctggggctcccaaaagaaaacggttcggagagtcgttacgcccatccttgacttaatgcagacaatgccggcattcgtttatttacttccggccatcttctttttcaatatcggggttgtgccgggtgttgtcgcttccgttatctttgcgatgcctccgacaatccggatgacgatcttagggatccagcaggtgcctgaagatctgattgaagctacagaagcatttggttcaacgacaagccagcggctctttaaagtgcagctgccgctcgcgacgaaaaccattctggccggtatcaatcaaagcatcatgcttgctttgtcaatggtcgttattgcatcaatggtaggcgcgcccggactcggagaagaagtttaccgggctgtgacccagctgcaaacgggtaccggtgtagaaaccggacttgcgattgttattattgcgatcgtacttgaccgggttacacaaaatataaaattgaaaaagagcagggggaatgcataa

SEQ ID NO: 3060 - DNA, 1248 bp, Bacillus licheniformis
atgaattcagacgaaaagcgaatcaagataaaagtagaaaaagtgtccaaagtgtttggaaagaatacaaagaaagcaacgcagctgcttgccgatggcaaaaccaaaaaagaaattctgaaagaaaccggggcgaccgtcggggtgaaccaagcagattttagcgtgtatgaaggtgagatatttgtcatcatgggtctatcagggagcggtaaatcaaccttggtgcggcttttaaaccgtttgattgaaccgactgcaggacatgtgcacatagatggtgacatgataacaaatatgtccaaagaccagcttcgggaaatccgccgaaaaaaaatcagcatggtctttcaaaaattcgctctgtttccgcacaaaacaattcttgaaaacacagagtacggattggaactgcaaaaagtggataaaagaaaacgccggctaaaagctatggaatcattaaagcttgtcgggcttgaagggtatgaacagcaatatccggatcagctgagcggcgggatgcagcagcgcgtcgggcttgcccgcgcattgacgaacgatccggacattctgctgatggacgaagcgttcagcgcgcttgaccccctgattcgcaaggatatgcaggatgaactcctcgatttgcatgaatcagtaggaaaaacgattattttcatcacccatgatcttgatgaagcgctgagaatcggcgatcgaatcgcattgatgaaagacggaaacatcgttcaaatcggtacgccggaagagatcttaatgaacccgtcgaacgaatatgttgaaaaattcgttgaagatgtcgacttatctaaagtgctgacggccggccacattatgaaacgggctgaaaccgtgcgcgtagacaaagggccgcgcgttgcactgacgctgatgaaaaacctggggatctcctcgatttatgctgttgacaaacacaataggctcctcggctccgtcgatgctgaaacagcgaagaaagcagccgaaaaaagccagacgctggagagcgtcatctcaagagaaatcacaaccgtagaagagaatgttgtcctgacggatatctttgaattggtctctgatgccagcattccgattgctgtcgtcgatgaaaaacagcggatgaaagggatcatcgtcaaaggcgcattaatcggagcgcttgccggaaatgaccggtatattaatgctcatgaaccagcccatgaagctgttattcaggaggtgagataa

SEQ ID NO: 3061 - DNA, 1458 bp, Bacillus licheniformis
atgaataatcaggatcaatcgcttatttttgaagtatcaaaagaagggcgggtcggctacagccttcctgagcttgacgtccctgaaacagatgtgacagacgtcattgacgaagcgtatatcagagatgaaccggcagatctccccgaagtgtccgagcttgatattatgcgccattatacggctttatctaggcgcaaccacggagtggattcgggattttatccgctcggttcgtgcacgatgaagtataatccgaagattaacgaaaaaatcgcgagaatccctggattttctgcgatccatccgctccaggatgaagcgaccgtgcagggtgcgctggaacttttgtacgacttgagcgagcatttggaagagatcacaggaatggatgaggtcacccttcagccggctgccggcgcgcacggcgagtggaccgggctgatgatgatccgcgcgttccatgaggcaaacggcgatcataaaaggacgaaggtcattgttcctgattcggcccacggtacaaatccggcgtctgcgactgttgccggatttgaaacggtcaccgtcaaatcgaatgacgacggccttgttgatctggaagatttaaagcgtgtcgtagacgaagaaactgccgcgttaatgctgaccaatccaaatacgctcggcctttttgaggaaaatattttagaaatggctgaaatcgtccataatgccggaggaaagctgtactatgacggagcgaacctcaacgccgtactcagcaaagcaaggccgggtgacatgggattcgacgtcgtccatttgaatcttcacaaaacctttacgggaccgcacggaggcggaggacctgggtctggtcctgtcggcgttaagaaggaattgataccgtatttgccgaagccggtgcttgtgaaaaaagacggacactatacttttgaccatgaccgtccgcattcgatcggcagggtgaaaccttactacggaaacttcgggatcaatgtgagggcatatacgtacattcgttcaatggggccggacgggctcaaagaagtgacggaaaacgccgttttaaatgcgaattatatgatgagaaagcttgctccttactacgatctgccgtttgaccgacactccaagcacgaatttgtgctgtcgggaaggcgccagaaaaagctgggagtcagaacgcttgacattgcaaagcgccttttggacttcggcttccatccgccgaccatctatttcccgctcaatgtcgaggaatgcatcatgattgaaccgacagaaacagagtcgaaagaaacgctcgatgcgtttatcgatacgatgatccagatcgcaaaagaagcggaggaaacgcctgaagtcgttcaggaagcaccgcatacaaccgttgtgaaacgcatggatgaaacaaaagctgcgcggaagcccgtgctgcgctatgaaaaatga

SEQ ID NO: 3062 - DNA, 1347 bp, Bacillus licheniformis
atgaagcaccgttacctgccagctacagatcaggataaaaaggagatgcttgaggcaattggagtcgagagaatcgacgagctattctccgatatacccgaaagcgtcagatttaaaggggaataccaaattaaaaaggcaaagtccgagacggagcttacaaaagagctgacgaaactcgcggctaaaaataaagatacagtgacgtacgcctcttttttgggagcgggcgtatacgatcattaccagcccgtcatcgtggatcacgtgatttcgcggtcggaattttacacggcctacacaccgtatcagccagaaatttctcaaggggagctccaggcgattttcgaatttcaaacgatgatttgcgagctgacgggcatggatatcagcaactcgtcgatgtatgacggaggaacggcgttagccgaagcggcaatgcttgcttcaggacatacaaaaaagaaaaaaatcgtcgtttcggaaaccgtccatcccgaatcgcgcgaggttctaaaaacgtatgcgaaaggacagtacatcgatgtggtagaagtcccttccaaaaacggaacagcggatcttgaggctcttgatgaagccgtctgcgaagatacagcagcagtgatcgtccaatatcccaactttttcgggcgaattgagccgctgaaagacattgaaccgatcgcccataaagggaaaagcatgttcatcgtttccgccaatccgctggctctcgggcttttaacaccgcccggggcgttgggcgctgacatcgttgtcggagatgcccagccgttcggaatccctgctgctttcggcggtccgcactgcggattctttgccgtcacgaaaaaattgatgagaaaagtgcctggccgtctagtcggtcagacggaagatgaaaacgggaaaaggggattcgttctcaccctgcaggcccgcgagcagcatatcagacgggataaagcaacatcaaatatatgctccaaccaggcgctcaacgcgcttgctgcgtcagtcgccatgacggcgctcggaaaaaaaggcgtcaaggaaatcgcatggcagaacctgcaaaaagcggcttacgcaaaagaagcagctaaacgggccggtcttgaagtcgcgtttgaggggccgatgttcaacgagtttgtcatcagactcaatgaacctgtcgaaaaagcgaatgaacgcctgcttgagaaaaatattatcggaggctacgatctcggcgcttcatatccggatttaaaacggcacatgctgatcgccgtgacagagctcagaacaaaagaggaaatcgatacactcatgaatgaattgggggatcgccatgaataa

SEQ ID NO: 3063 - DNA, 1095 bp, Bacillus licheniformis
atgcttaaacgtacgcctttatttgacctttataaggaatatggcgggaaaacgattgattttggcggctgggaactgccagtccaattttcttctattaaagaggagcacgaagccgtcaggacgaaagcggggctttttgacgtctcacacatgggagaggtcgaaatcacaggaacggacagccttccgttcttgcaaaagctgttgacaaacgatgtttcgacgctgaaagaaggcggcgcccagtatacggctatgtgctatgaagacggcggaacgatcgacgatctcctcgtctataaaaaagcggccaatgtctatatgctcgtcattaacgcagccaatatcgacaaggacgtcgattggatgaacaagcatatagagggtgacgtgtcggttcgaaacgtatctgacgagattgcgctccttgcccttcaagggccgaaggccgaagcaattttaaaacaggtcgcagatcatgaccttgcagaattaaagccgtttatgttccgggatgatgcagcggttggcagcgtgcaggcgcttgtgtccagaacgggatacacgggagaggacggctttgagatttactgccggaatgaagatgcagcctgcatttggaagctgctccttgaaacgggcaaggattcgggattggtgccgtgcggcctcggggctcgggatacgctgaggtttgaagcgaagctgccgctttacggacaggagctctcaaaagacattacgccgatcgaagccggcatcggatttgccgtcaaaacgaacaaagcctcggatttcatcggaaaagccgtcctggcaagccaaaaggaacatggagcggacagaaagctggttggccttgaaatgatcgataaaggcattccaagacacggatacgccgtctattatcaaggcgaacaagcaggcgaggtgacaaccggcacacagtcgccgactttaaagaaaaacgtcggcctcgcattgctgaaaaaagaagcctgcgccctcgacaccgtagttgaagtggagatcagaaataaacgtttgaaagccaaaatcgtgaaaaccccattttacaaacggcagccgtaa

SEQ ID NO: 3064 - DNA, 213 bp, Bacillus licheniformis
atgtccatgaaaagaaatgaatatgagcgaatgacggcaaggggagagaccggcagagggaaacctaaaagcggcgccgaaggagcaagctggggaaacagtgaatctctcaggcaaaagaactcttgcttgacgcaactctggagagagtttgtatcatattatgttttgcaaaccaccaaaggggacatctttgcttttgatgcaaagtaa

SEQ ID NO: 3065 - DNA, 1680 bp, Bacillus licheniformis
atgagaccagacattcatttcgacaacgaatggccggaacagttcaaaaagcatcttgatgaagacggcccgtgggcgaattgggagctttaccagctttcctgtgaagtgcagaaaaggcttgcgattcccacgtttgaaggcttgcaggccccataccacctccccggcttcacaccgcttccccaccagctcgaagtcgcccggaaggtggtcgaacagatgaacggaaaagccatcttggcggatgaagtgggcctcggcaaaacagtcgaggcggggctgatattaaaagaatacatgattcgcgggctggccaagaaaatattaatccttgtccccgcctcgctcgtctcgcaatgggtaaaggaacttcgggaaaagtttttaattccggccgttgaacagaaaaaaagctatgtatgggagcaatgcgatgttgtcgtctcctcccttgacacggcaaagcggtcgccgcacagagaggcggttttgtcgatccagtacgatgtggtgattattgatgaagctcacaaactgaaaaacaataaaacaaaaaattacgagtttgtccgcagcttaaagaaaaaatactgtctgatgctgacggcgacgccgatccaaaacaagatcgacgaaatatttaatctcgtctccctgctaaaacccggacacttgggaaatgaaagcaacttcaacaaagattatacaaaacagatcaattcagctgaagcacacgagcgcttgaagtcccttatcaataaagtcatgatcagaaacaggcggcatgataccggcatcacctggacaaagcgtcatgtcgaaaccgtgcctatttccttttcgcctacagaacaggctttgtatgacgagattaaaaagctgaagacaaatcatcagcattcatcaagcatgttctcaatcatgacattggagcgcgaatgctgttcaagcagggaggctgtctatatgacgctgaaaaacatgcttgaccgaaaggaccgcgaagcgccggtaatctctgaacctgtcatccaccatttgatcgaaaaggtcaacgaggtcgcacaaaattcaaaagcgctgaaagtcgttgaactcattcaagaactcgatgacaaagtcatcatctttaccgaatacagggcgacgcagatttatctgcaatggttcctccagcagaacggcatcagttccgtaccgttcagaggcggatttaaaagaggaaagaaagactggatgaaagatttgttcaggggcaaagtgcaagttctgatcgcgactgaagcaggcggcgaaggaatcaaccttcaattttgcaataaaatcatcaactatgaccttccgtggaacccgatgcgcctcgaacaaagaatcggcaggattcaccggctcggccaggaacgcgatgtctacatttacaatatggcaacaaagcataccgtagaagaacatattttaaagcttctttatgaaaagattcatttgttcgaaaaagtcgtcggagacttggatgatattttaacaaaaatcgaggtcggcaattttgaagagcacctccacgatattcttttttactctgcgacagacgaggaaatgaaaatcaaaatggaaaacttaacctctttcatctcttacggaaatgaagacgtttcaaaccatacacagataggaggctaa

SEQ ID NO: 3066 - DNA, 795 bp, Bacillus licheniformis
atgcgtcaggaagaaatctacctgtttttagaacgttttttcaccgcaaacggctgcacgatcaccgacaaaagtccaggccacatgaccgtgcagctgacggttgaggtcgataaacaaatcatgaacaggccgttttactggcactggcttgaaaagacgggaggagagccgaatccgatgaaaatcacgctgatcacgaatgaagacgaggccccttccgatatcgaaggggagtttattcattttggatcaccaagactttttcaaattttccaggcagtgcaaaaaaacggcaaatttattcgcctttatgagaaaatccgttccgaaggggctcatatccctctggaaccttggctcggcatgaatgtgacgatctcgtaccagtccgacatgaaaaaagataagcttctgtcccttggccttcacttaatcagcggccagctgaccgaatcgtttcaagagcaaatggaagcacgcgagctttcctcacagatctctgactactgttatacgatgtcgccgttgattaagccggaaagcggcataaaacggcttgagcgctatatcgaacaggcggccagaagcgaaccgcttgattgggctgaagcttccctgaaacgttggaataacgacctggcactcttaaaccaattttacgaggatactgaagaaaaaccggaggaatacgaaattgagaaaaaggccctccaaacgctttacgagcctaaaatcgatattaaagttcaaaacgggggattattttatctgcgtaaaaaaaattcaggataa

SEQ ID NO: 3067 - DNA, 177 bp, Bacillus licheniformis
atgaataaagataaaaatgagaaagaagaattggatgaggagtggacagacttgattaaacacgctcttgaacaaggcattagtccagaggaaatacgtatttttctcaatttgggaaagaagtcttcaaatccttccacatcaattgaaagaagtcattcaataaatcctttctga

SEQ ID NO: 3068 - DNA, 336 bp, Bacillus licheniformis
ttgattggccagcgtattaaacaatatcgaaaagaaaaaggctactcactatctgaactagctgaaaaggctggggtagcgaagtcttatttaagttcaatagaaagaaacttgcaaacaaacccctccattcaatttctagaaaaagtctccgctgttctggacgtctcggttcataccctgctcgatgagaaagatgaaaccgaatacgatggtcaattagatagtgaatgggaaaatctagttcgtgacgctatggcatcaggggtttctaaaaaacaatttcgagaatttttagattatcaaaagtggaagaaaagacaggaaaaggagtaa

SEQ ID NO: 3069 - DNA, 126 bp, Bacillus licheniformis
ttggcattttttacgctgaataagccgattcctcatgaacataaaaaaacggatcataaagatccgttttttaaattgcaccattatttatcttcactgtgcgctctttcgttctctttcacataa

SEQ ID NO: 3070 - DNA, 795 bp, Bacillus licheniformis
atgggtacaaagaaaaaactaggattaggcgttgcgtctgctgcgcttggactggcattagtaggaggaggaacttgggctgcgtttaacgacatcgaaacaactcaagcaacttatgcagcaggtacgcttgacttaaatgcgaaagatacatctgcaagagtgaacttgtccaacttaaaaccaggcgacaaattcactaaagatttcgagttcaaaaatgacggatcacttgcgattaaagaagtgctgatgcaggttggctacagcaatttcgttgacggaaacgcgaaaaacggtggaaaaagcacagcggaagacttcctgaaacaatttaaagtcagcgttctgactgtcggagttgaaggcggtaacggctatcctaaaaacatcattttagatgaagccaacctttatgatctgtacaatatgtccgcgaaaaaagataagaacgcatatgaaaaagtgaagaaagccattgagccagagttcctgcatgacaatggcaaaatcaatgtagcgacaatcaacggaaaaactgcgcctgaatacgacggcattccgaaagacccatatgactttgataaagttcaattggtgattgagtttgtaaatgacaaaacaacagacgccagcggtagaatggtacagaacaaatatcaaggtgattctgtacagcttgacttctcattcgaagctactcaatggaacggcttgacaatcgacggcaaaaaacatgccgatggaaaaggttatgtgaaagagaacgaaagagcgcacagtgaagataaataa

SEQ ID NO: 3071 - DNA, 585 bp, Bacillus licheniformis
atgaaacatgtgatgaaatggatcagcaatttcttatatgtgattattttcacaatcatcatcgccgcggtcatcgtcgtgatttcgacaaagtcgtccggcggggagccgcagctcttcggctatcaattgaaaacggttttatccggatcgatggagccggagtttaaaacaggttctgtgattgccgttcaaaaagttgaaaatcccgggtctttgaaaaagggagatatcattacattcatgcaagacgaaaacaccatggttacccaccgaattatcggtataacaaaaaataaatcaaatctcatgttcaagacaaagggtgacaataaccaaaaccctgattccgatccggtactggcggaaaatgttgtcgctaagtattcgggcattacggttccgtatgccgggtatttgctggactttgcaagtaaaccgatcggcacagccattttgctgatcgtgccgggactcttgttgattctttatgcagtaattactgtatccgcggctttaagagagattgaccaaaaagctaaagcaattgaagccgctggaaaagatcaatcagtttccatgtaa

SEQ ID NO: 3072 - DNA, 729 bp, Bacillus licheniformis
atgttccgattatctcgaactaggagatgccgaaaaagagccggaaaaaacattatcgtttttcaaacgctgctgatcatatacctgttaattggattggggagtcagctgtcacagcatacaaacgcatcatttcatgatgtggaaacatacagcatgacaatgaaagcggcctcaacttttcctcaagatgagaagcagtgggacgggagcgatttgaagcttcaaaagcagacgaagacgaaaggaacggtctgtgcaccgctgacattgtttgcagaatataaaaaccgcggcagtcaaatcgccgactctgaatggaagtgggagcttcataaactcggtcattccaaaaagccgctagaggacgggactgtgatcgataaaggcgtgttcaaaaaagaagccgaaagcagcatctaccggatagagtcaaagcgggcagcaaaaggagggctatacgcttttaaattgatcagacctgaaggccatccagatgttaaaaagggcaaacctttcatttggtcaaatgtaatggagcttcaagactgcaaagaagaaacaccgaagcctcctaaaaaagcttcagcaaaaccaaagcaaactgaacagactcaaacaacgcaaaagtctgagcaggatatagaggaaacaccaaaggacagtgaatccgtagataaagaaaatagaaaagaagataattcattagaaagcggggaagcgtcatga

SEQ ID NO: 3073 - DNA, 321 bp, Bacillus licheniformis
gtgctgaaaaatgtcatattatgttcttttttactgctttctagcattgggccgctcaatgcccatgcggcagcttacgaaacagcccgcatgtctaagtgggaagaaaaagcggttgaggaagcaaaaaagagatatccggaagcagaagtgcgcctcacgaaaaaagtatgggatcgaaagcgggccgatgaagcggtcaaacaataccatgtcacattgagtgaaggaaataaaaatttcggagtgtttgtcacaatttcatttgaacctgcgacacacaaaattaacaaagtcgtcgttgtggaagaatataaataa

SEQ ID NO: 3074 - DNA, 183 bp, Bacillus licheniformis
atgaaaacgaacgattatgttaaatatatgacggaacagctcgtaaaatatatggacacgcctaagcaggaaagaaaagaaatgaaagaaaaacgtaaagaattaaagccgccgtccaggatatatcaatggttcggcattcttccccttggctgtatcatgttttttaaaaagcataaataa

SEQ ID NO: 3075 - DNA, 366 bp, Bacillus licheniformis
gtgaaaaattcaaaaggattcatttatcccgctgctgttttcgcagctgtgatttgcatgctctgcgcgagtcactcagccgctttattaacgaatcagcgaacgtttgcacagcaaacaaaagaatttcacattcagcaaaaccttctccaaaatggaattctccatgccttgtcccatattcacgaagagacaaaagaaaaagttcaaaaacagcatggcttgatatcgtattctgtcagcccggctcatcagcagctcacacgagtccagattcaggtaacgacagcttccggcacagaaacaagcgctcaatttcaatatgatttaagaaatcaaaaaatcacgcagtggaaggaatattaa

SEQ ID NO: 3076 - DNA, 483 bp, Bacillus licheniformis
atgaagtatgcatctctattaaaaaaagagacagccaaaggcactgtttcaccattttgcgggcaaaggggatatacccttcttaatataatgttttccttaatggtgcacatgttcgttgcaggtacgatggcctcgatatttcatctgtttttatccccggaaagaaacggttcggatattcacccccgtgaatggacgattactgccgagcaaatattgaaggagtctaggaattcgattgacataagaagtgccggtgatcatcagtcactagcgatgacaaaccgccaaggtgacaccgttcgctatgagcaatatcagacagttattcgaaaaagggtcaatggaaaaggtcatgtgcctctattacagcatgtcaaaaaaatgaggtttatgattgaaaatcacctgctgatccttgaagcgacaagtctaagcggcaaatcataccgcacgtctattccgctctatcatatgtaa

SEQ ID NO: 3077 - DNA, 348 bp, Bacillus licheniformis
atgttcaaaaaaaataaaggctttacaacggttgaagctgtttccgcattcggcatatgggtaatgatcaccatgttattgatccctatgcttcatcagctgtcattgcagcgcgaagcgtccgaaaaagaagaagagacatatcgcatattggaggaaaagatcagccgctacacgctgaccggacggttccaggctaaagaagctgtgctttaccggaatacatcttactttattgaatggaaggagaagggagatgattatgaagtatgcatctctattaaaaaaagagacagccaaaggcactgtttcaccattttgcgggcaaaggggatatacccttcttaa

SEQ ID NO: 3078 - DNA, 414 bp, Bacillus licheniformis
ttggaaagtttaactgtattgatgatcggttctattatgttctctcttctctttgctctactgcctcccatttatgaaaaaagaatcgttcagcactttgtctcacagcttgaagaggatttgctttacgctcagcagacggctctcgtccgccatacgacggttaaggtgcagtttgactttgccggctgccgctatatcatgaagcattcggacgaaggctcatcgcctgaactggtcaggacatacagctgcaatatcgcaatcaaaaagtcgacgctcaaaccaattcttacttttaatccaagcggtgttccgaatcaagggggaaagatcgtgatcgatacacagcatgcctcttttatactgacgatctatttaggaagcggaaagattaatgttcaaaaaaaataa

SEQ ID NO: 3079 - DNA, 294 bp, Bacillus licheniformis
gtgaatgaaaagggatttacactgatagaaatgttagtcgtcatgctcgttatctccatcctgctgttgatcaccattccgaatgtgaccaagcataaccaaagcatccaaaagaaaggatgcgaaggattaatcaatatggttcaagcgcagatcacggcctatcagatggatcatgacgggaaaacgccgaacagggcggagcttgaatctgaaggttacataaaaaagaacttaaagtgtccgaatgggaaagcaattaaaatttcaaacggcaaagcacaggctgattga

SEQ ID NO: 3080 - DNA, 1035 bp, Bacillus licheniformis
atgaagattaaaatgaagtggcctgtccgggaacaggcggaccttctgaaaaaactaggagacatgatgcagagtggctatacgattttggatgctttaagtatgctgaaattgcaattgaatgaaagacgaagagcggatctgacatttgcgatggagaagctgacagaagggtgtcctgtgtttcaagttcttgaaatgatttcctttcacaaggatgctgtcaccattgtttactttgccgaacagcacgggaatttgccatttgcctttaggcagagcggagagctgcttcaccgcaagatcgctcaaagcgaaaaattaaagaaagccgccagataccccttgtttttagttttaacggtctgcgtcatcatctctattatgaaatcagcaatagttccgcaattttccgccatctatgaatcgatgaacgttgaaacgtcttttgcaacgactctcatcttttatgttttcgatcacttttatctttttttcgcgggactgccgctggttgccgcagctctatccctctattatctgtgttcattccgccataaacctccagaagacaaaatggcctttctcattacaattcccttgctgggccaaaccttcaaactattcaacagctattttttatcgctccagctgagcaatcttttgcaagcgggtctgtctgtatatgacagtttaaaagcatttgaaagccagccgtttttacgatttcataaaaatgaagcgaagcgcttgatcgagcggctgaaacagggggagagtctggagcagatgctggccggacatccgttttatgaaaatgatttagcaaaggctgttgcacacggccaactaaatgggcacttatacagagagctgtattcatatagtcagtttttgattgagcggcttgaaagaaaggccgaaaaatggacaggcctgatccagccattgatttacgggctaaccgcggcgatgatattaattctttatttgtccatgcttttgccaatgtatcaaatgatgaaccagctataa

SEQ ID NO: 3081 - DNA, 1065 bp, Bacillus licheniformis
ttgtacacgatcgaatcattaagcggaagattaattgacgaggcatatagaatgaaggcgtcagacattcatattgttcccggtgaaaaagaggcggtggtacgcttcaggattgatgacgaactgtttcaaaaagacggattaacgagaaatgagtgctctagactcatttctcactttaaatttctttcttcgatggacattggcgagagacggctgccgcaaagcggggctttaactctttatatcaaccgtgagcccgttcatttaaggatgtccactctgcccaccatccatgatgaaagcttggtcatcaggcttcttcccaagatgagcagcaagccgctcacaaagctctcattgttcccgagtgcaacattcaagctgctgtcttttctgaagcattcccacggattaatgcttttcaccggcccgacaggctcgggaaaaacgacaacactctattctttaattgactacgccaagcggcattttaagcgaaatatcattacgttggaagacccggtcgaatcaagaagcgaaaacattttgcaagtacaagtgaacgaaaaagcgggcatgacttattctgcggggttgaaggcggtgctgcgccacgatccggacatgatcatcctaggggaaattcgcgatgccgaaacagcccaaatcgcagtcagggcagctttgacgggacaccttgttctatcgagcatgcatgcgaaaaatgctaaaggtgcgatatacaggctgctcgagctcggcgttgatatgacagaaattgaacaaacattggtcgcagtcagcgcccagcgtcttgtcgatatcgtctgtccgttttgcggcgacagctgcactttgtattgcagattgtcgagaccagttagaagagcaagcgtctttgaacttttgtacggaaaaagccttaatctctgcatcgaagaagcaaaaggcagatgcggtggcatcaaaacagacaccttaaaaatgctgatccgcaagggaatagcactcggatatctgccgtcgaaaacttatgaacgctggataggccatgaagattaa

SEQ ID NO: 3082 - DNA, 171 bp, Bacillus licheniformis
atgattcgatcgtgtacaaaccattgcgcctcctttctaagcgcagtttatacgaaaaccatcggaagcatcaaatccataaaaagcgcaaatcaagccgaatacgtaacaaaaacggaatctccgaataccgatttgactattttattcgacttcaagccgctgaaatag

SEQ ID NO: 3083 - DNA, 840 bp, Bacillus licheniformis
atggaaaacaagcatgcagccctttatgagtatctggtcaaacaggcggacagaatcacagatgaatggctgtcccgaacagcgtctgaaaaagaaaaaacggcacagcaatacaaggactttatactggctgtttcaaaggtatttgccaaagatgaacaggcgctatgctggaataaagcttccgggtgcgccaaggaaattgcctacgacagggatgtcagccaaattccggttaccgaaagcataaatggttttaaagtgtgccgtgaacttttaatagatgagatcgagcaattttcagatgaacatgcaccagacagttcgaaaaaagatttttttatctggaataaacagcttcacttaatgatggatgaggtcatagagcagtttattcttgaatatgagcatacgacaaagagccaattgaaggcgcagaccgagatgattcgcgaactgagcgcaccggtcataccggtatcagagcacatcggtgtgctgccgctcattggtgaaattgatactcacagggcaacggtgatcattgaatctgcgctcacgcagtgtgctgagcttcatctctcgcatctttttattgatatttccggtgttcctgttgtcgatacgatggtcgcccatcagttgttcaaagtcgtagacagcacaaagctgcttggcgttgaaacggttctttcgggtttgagaccggagattgcccaaacagttgtgaagctcggcatggatttttcacatattaaaacagaacagagtcttgctaaggcgctttgcaataaaggcttctgcatccatgaagacggcaaggccgaagagcaggtttaa

SEQ ID NO: 3084 - DNA, 396 bp, Bacillus licheniformis
atggaagagctgaccttttattcatacccgagctgcacatcatgccgaaaaacgaaacattggctgaaagcgaaccaggttgattttacagaccggcatcttttcagggaaacgccgaaccaggatgaattgaaacatattttgtctctcacgaccgaaggaatcgatgaaatattggcgacaagaagccaggcatttaaagagttaaatcttgatattgaagaattaacggtaagcgaagtgctggaattgttaattcaaaagccaaagctgctgagacgcccgattatcgtaaacggcgataagctggtcgtcggatacaatcccggcgaactcttaaaattaaaaaacacaccttacaccgttctgtttcctgaaaaaaacgaagattgctga

SEQ ID NO: 3085 - DNA, 246 bp, Bacillus licheniformis
atgaatcgcatgttccgtgtgttaggtttctggacaggtatctttgcggtcatgttttatttaggaaatatgaaagatgcatcactgctgttcttcggtcaaactgtattttttgtgttcttatcgtatctcaacttgaccgagcggatgtacatttatattttcggtgcttacttgacaatcttttttgccgcatttacatattattctgtgttcattatggttcccggacagggaggccattaa

SEQ ID NO: 3086 - DNA, 639 bp, Bacillus licheniformis
atgaaatggagaagaatgcctttagggcctatccagacgaacgcttatattttatccaatgatgacggcacctgcttaatatttgatccaggcagcgaatcagggaagctgaatgcatacataaaagaaaacgggctgaaacctcttgccgtattgctcactcacgctcattttgatcatatcggagctgtggacaatgtcagaaaagaatggaacattcctgtatacgtgcataaaaatgaagctgaatggctgactgatccttcattaaacggttcagcgctgcttacagggcagacgatcacagcagaaaaagcagatcatctgatcgaagaagagggagaccttaaaatcggcccttttacgctccgcatgctctttacgcctgggcattctccgggcagcgtctcgtattatgccgaagaggaaaacctgatcgtttccggcgatgttttgtttaaaggagggatcgggcgtacagacctgccggggggcaatcaaaaggtgctgatggacagtattcatcaaaaactgctgacacttccggaagagacgcttgtgttaagcgggcacggccccgagacggacattgcaacagaacaggaacaaaacccgttcatcaacggatttactttgtaa

SEQ ID NO: 3087 - DNA, 129 bp, Bacillus licheniformis
gtgactagaccgaaaatgatcacgagcaacatcaatataaacccccttcgcttggatcccctgcagtatatttccaattttattttaaccgttttcatcaaatttgtcgaggacaacatgattcattga

SEQ ID NO: 3088 - DNA, 174 bp, Bacillus licheniformis
atgttgctcgtgatcattttcggtctagtcacgatattatctgctcttggggttcttcgttctcttaaacaaatcaacgttcttggcatcttgttcggcggggcggcttttttagtgttcggatggtttaccgtcatgacaattattaacagcgggtatccgacagtccactaa

SEQ ID NO: 3089 - DNA, 315 bp, Bacillus licheniformis
gtggccatagcagacgtcaccatcataccgatcggtaccgagactccgagcgtaagcgcgtatgtagcggagattcaaaccattttggaaggatttaaaaaagagggcaaaatcaattatcagctgacaccgatgaatactttgattgaaggggaactaagcgatttatttcaggtgattcagacgattcacgaagcgcctttccaaaaaggcatccacagagtagcgacaaatatcaggattgacgaccgccgtgataagaaaacgacgatggagggcaagcttgcaagcgttcagcgtcatttcagtcaataa

SEQ ID NO: 3090 - DNA, 1101 bp, Bacillus licheniformis
ttgagagtttcattattgattattgccgctctgatggccgtggctgcggctggttgcacgccgcagcatcaagaaggatcaaaaagcgttcatcatgaggagccggaagggaaaagagaaagcggtgcagcagtaaaagataaaaaagtgatagcgctgaaggaccggcactttgatgagacggcaggatggcttgataatgaaaccgttatatacaccgcaaccgatccggtcggaggaagtgaaatcaaatcatatgatatatttaaagggacgggcaaaacgatctacaagacagatgacaggctgatagcgtcggaagtcaacagtgaaaaaggcatgattcttatccaaaccgccggaaacggctctgaaatgaagttaactttgcttaatttacaggggaaacagctgtttgcaaaaaaatttcgcacgcatgagttgcaagtggactggaatcgattcgatccttctcttttatatgtcacaacattcacgaaagactggaattatgaatcaagcctaattgatgcaaaagaagagcaaacggaaaaaaacatcgcacaggccgcctttattcattggacttccgccgacacttttgaatatatcaaatggaatgaacgggaccgggaaaagccggctcctgtttattcctacagcacagcggacggacgggaaaagaagctcgcaggcgatgccgtacttctcgatattgtaggcgatatgcggctcatcgtaacgccttcatcagatcagcgccagggcacctacatattttcagacgtttcttcatcggaaaagaaaatctctttcaagttgccgctgttctcggaatatggcagcctgtcaccgatggaatacggttatgaccctcggcatgagctgttttatacgtatcagccaaatgagtcgggctccttgtatgatctgatttccgtcaacctcaaatcaggcaagcgggaagtcattcgtgaaaaagtggaaatgcttccgattaccttatctcctgacggggattatgcattgtacggctatactcaggatcaaatcatttcactcaactcaaaaacagcagcgccccttgtgaccaaagaatag

SEQ ID NO: 3091 - DNA, 1125 bp, Bacillus licheniformis
atggcattcatcaacatcaaaccggagttaaagcagaatattgaaagactgtctgacattctgaacatacccgaaccgcttttaatcagtgcaaatgcaaatgcatccgcggacgaactttattttccgggagtatcttttcatgcaggaaaaaacgttcaagcagcagaaacatatgaacagctgcaattattggcgaatcaatacacgtttgaagatgaacagtggctgacaaaaacagccgtttacgattcagcagaactgaaaaaggaaattggcagattgacggaatgctttccgtttgttacttcccgtatcatcggccgctcaagcatgggccagcctatatatgaactgctccttggagctgaaaatgccggaaaaagaacgcatatgaatgcctcttttcatgccaatgaatggatcaccacttctgttttgatgaaatggctcaaagaatactgttatcatttatgtacaggccagaccgctttaggtttttcgccgctcgatattttttcatcaacaaagctttccgtcgtgccgatcgttaatcccgacggtgttgaccttgtacttaacggccccggtcatcttgggatcgcgagagaagcgctggatgagatgaacgagcatcagccggatttccgggaatggaaagccaatataaacggagtggatttaaataatcagtttccgtctttctgggagatcgaaaaacaaagaaaaccgcctaaatccccttcctacagagactaccccggagatgaaccgctgacagaaccggaagcggcagcgatgagggatttaatcgcaaacgagccgccagaccggcttgtggcgcttcacacacagggggaggaaatttattggggatacaagggattggagcctcctgaatcagctgatgtgatccaaacatttgagcgcctgagcggttataagggcgtcagatatatagacagctatgcaggatttagagattggtttattcattattacggaagagaaggatatactgttgaacttggcaaaggaaaaaatcctttaccgctgaaacaatttgacgatatatattgtaaaagcagaggaatactttgggcatcctgtttttttgaaagctga

SEQ ID NO: 3092 - DNA, 948 bp, Bacillus licheniformis
gtgaatattaaaggtaagacgatcgcggcagcgtgttttgtactattattgatcgcagcattgacagcatgcggcaatcaaacagagagcaaagattcttcttctaaatcaaaaagcgaagaaacgattacatacaaggctgaaaacggaacggttaaagtgccgaagcatccgaagcgggtggttgtcatggctgacgattatttcggctatttcaagacactcggtctcaatgtagtgggcgcccctgacagggttttcaagaatccttatttcaaggggaaaaccgatggtgtgacaaacataggtgaaggaaattctgctgaaaaggttattcaattaaaaccggacttgattgtcgtatggacgacccaaggcgctgatatcgaaaagctggaaaaaatcgctccgacggtcgcgttgaaatatgacagtctgaatagcactgaacggctgaaggatttcgcaaaaatgacaggcactgaagatcaagcggagaaatggctggctgaatgggacaaaaaagttgcggcggccaaatcaaaagttcaaaaagctgtcgggaacaaaacggtttccattatgcaaactaacggtaaagaaatctttgtattcggcgatcaattcggaaggggaggaagcattgtttaccaagatctcggcttaaaggcgacaaagctgacaaaggaaaaagcaatcgacgaaggcccgggctacacgagcatttccttagaaaagctgcctgatttcgctggagattatatatttataggaccttgggaatcaagcggagacgacagcgccgtgcttaatacatccatttggaagaaccttggggcggtcaaaaaccaacatgtctataaaatcgaccctgtcggcttctatttttccgatccgatttcattagagggccagctcgaatttattacagaaaacttaacaaaatag

SEQ ID NO: 3093 - DNA, 117 bp, Bacillus licheniformis
atgcagcaggccggatatcgttccggcctgtttttaatgacaagaggccgtcataaaaatcatgatcaaaccgatgccggttatgatataattgataatgattctctttatcggtga

SEQ ID NO: 3094 - DNA, 1899 bp, Bacillus licheniformis
atgcgaaagtcatttttttcaaaaatttcgtttttgttaatcgcgacattgctgatgtggctgaaaacgtatgtcgtctacaaaacaagcttcaacattaaaattgaaaacttcatgcaagagtttatattgttcatcaatcctctaagctttttgctgtttatattcggaatcggcctgttttttaaagaaaaaaacagaaaccggtttattatcggggcaagcatcgtcctgacgtttgtcttgcttgccaacatgattttctaccgtttttacaacgactttttaaccattcctgttttgttccagacgaataatatgggcgatttgggaagcagcatcaactctttgtttatgccggccgatttgcttctcatcgttgatattgccattttaatttggctgtacaagcgccagcctgccaaaacaggcggaaaggcgacaagaaaggagcgcgcggcttactatctatttgtcgctgccgttttcttttttaatttagggatttctgaaacagaaagaccgcagcttttgacaagatcgtttgatagggaagttcttgtgaaaaacatcagcctttacaacttccatatctatgacgggctgatccagtcgaagcagtctgcgcagcgtgcgctggccgacagcaacagcctcacggagattgaaaactatgtcaacgcaaaccgcacggacaccaacaaggatctggccgggatcgccaaaggacggaatgtgatcctcgtttctctggaatccacccaaagctttgtcgtaaaccaaaagttaaacggcaaagagattacgccgtatttaaatgacctgattaagaaaagctacagcttcgagaatttctatcatcagacaggccaaggcaaaacggctgattccgaattcattgtcgacaactctctctaccctcttggaaggggagcggtcttctttacaaatgcaggaaacgaatatacggcaatgcctgaaatattgaagaaccacggctactattcctcgattttccatgcgaacaacaaaagcttctggaatcgggatattatgtacgaaacgtttaaatacgataagttttacgatatcaaatcctatgatgtaaacgaagaaaattcagttggatggggattgaaagataaggaatttttcgaacaaacatcagagctgatgaaagaaatgcctcagcctttttatacccgtctgatcacgctgacaaaccattttccgtttgagcttgatgaggaagataaactgatcgatgaattcgattcaaaaagccgtacgttaaacagatatttcccgaccgtccgctatcaggatgaagcgctgaaacgtttcattgaaaagctgaaagaagacggcctctacgataattctgttatcgttttatacggtgaccattacgggatttccgaaaaccataacgaagcgatgagccaattcctcggcagagaagtaaccccttttgaggaagtgcagcttcaaagagtcccgcttgtgatccacattccgggagtgacggataaagagccgaaaaccattgacacggtcggcggccaaatcgacattcgaccgactatactgaatcttctcggaatcgattcaagcgatcagatccagtttggaaacgacctgtttgccaaagacaaaacggagttcacagtgctccgcgacggcagctttattacgaaagacaaagtatacacagacggcatatgctatgataaatcgacaggcgagccgtctaaagataaaaaaggctgtgagccgtacattgaaaaagccaaacaggagctttcatactcagatcaaatcatttacggcgacttgctgaggttttatgacagcgagcgcttaaaaaagcaatctgactccaagccaaaagacgagtaa

SEQ ID NO: 3095 - DNA, 975 bp, Bacillus licheniformis
atgaatgacagctggctggtcggggtcgaccttggaggaacaacagtaaaactcgcttttgtaagcgcttatggcgaaatcctgcacaagtgggaaatcccgaccgataaatcagggaaaacggttacggtaagcatcgcgaaagccatcgacagcaaattgaacgagctcggcaaaccgaagcacatcttaaaatggatcggcatgggcgctcccggacccgtcaatacggagaccggcatcgtttataaaacgacgaatatgggctgggaaaactacccgttgaaagaccatctggaagcagagacagggatagctgcggtcattgaaaatgacgcgaacatcgcagctctcggcgaaatgtggaagggagcgggagacagcgcgaaggatttgattcttgttacattgggaacgggcgttggaggcggcattattgtaaacggggaaatcgtccgcgggcaaaacggagcaggcggtgaaatcggccacatctgttctgttccagaaggcggagcgccgtgcaactgcggaaaaagcggctgtatcgaaacgatcgcttcggctaccggcatcgtcaggattgccaaagaaaaaatagaatctgaccatcgagatacaagcttgcgtgaatgtctggacataacggcgcgcgacatctttgaagccgccagaaaaaacgatcctgttgccggcgaagtcgtcgattatgtggcgggtcatttaggaatggtcctcgctaacttggcgagctcgcttaatccttcaaagatcgtaatcggcggaggcgtgtcaaaagcgggagaaatcctgcgctccaaagttgaacaatctttcaagcgctttgtattcccgcgggccggcgaggcggctgagatcgtaatcgcttcacttggaaacgacgcaggcgtgatcggcggtgcatggatcgcaaaaaaccaatggctgaaaagccaggcgcagcctgttttataa

SEQ ID NO: 3096 - DNA, 198 bp, Bacillus licheniformis
atgaaaacagcctatgatgtacagcttttgctgaagcagtttggatgttatgtttaatttggagatcgcgagcttgaacttgaatacatgatggacgaactgaaggaaatgtttctttcaaatttgatagaaaaagaacaatgggttcaaggtgtttcaattttgcagaatgaactcacaaatataaagagaaaataa

SEQ ID NO: 3097 - DNA, 1455 bp, Bacillus licheniformis
atgaaaaaaaagcatgcggtccaaaaaaatttagcgaaaaatgttgaatatttaaatgaaaagcttggtgtcgacaaaagcttcgacatgatccggcttgatgtcgtttatgctgatagagacatgtcgctttatcttgtcgacggctttgtaaaagatgatattatgcatcatttgcttaaaaatctctcaaggctcacacctgaaaatctggaagacgatccgcttgaaaagctgatcaaaacgcatatcccatacatcgaaattgatacggaagatgacctcgacaaagcagccgaccaggtgctgtccgggccggctgtcctccttgctgacggagttgaccatgcgattattatcgatgcgcagacgtatccggcaagaaatccggaggaacccgacaatgaacgcgttgtcaggggttcaagagacggcttcgtcgaaacgatcgtgtttaacaccgcactgacgagacgaagaatccgcgaccgttccctcagaatggagttcctgcaggtcggcagaagaagcaaaacggatgtcgtcatctgttatttggaagatatcgccgacttggaaagtgtaaaaaagctgaaacaatcgcttgaagcgatcgacacggatgctttgacaatggcggaaaagacgctggaagaatacatcggcggccgtcattggaacccttatccgacggtccgctatacagaaagacctgatactgcggccgttcatttgtacgaagggcacattctcgtctttgtggacggctcgccaagcgcgctgattacccctgttactttttggcaccatctgcagcatgccgaagagtacagaaacaaacctcttgcgggtgcttatttgcgaatagtccgttttatatctgtcttggcatcgatctttttgctgccgctgtggtttctgctttccgtccatcccgatcttttgccggacgcccttgaatatatagggcctgaaaaaaaaggagcccttccgctgcttgcgcaattcatcattattgaaatcggcgtcgacatgatgcggatggctgcaatccacaccccgtcgtctcttgctacggctctcggactcgtagctgctttaatgatcggcgaagtggcggtgcaggtcgggcttttctcgcatgaagtcgtcttgtatctcgctgtcgcagccatcggcacgtttgctacgccgagctatgagctgagcatagcgaacaggcttgcaagaatcgttctcctgatcgccgcaggtgcattcggaccgatcggctttgtcattgcgatattctgctgggtgatttatctcgtcagaatgaagtcgtttcatgtgccgtatttatggccgtttattccttttgactacagagccttccgcgatatcgcaattcgcacgccgatgccgctgaaaaacagaagacccgtatttttggatccccaggatcccgaccgctga

SEQ ID NO: 3098 - DNA, 1539 bp, Bacillus licheniformis
atgtattcaatcgattatttgtattggaatttcatcgggaaccttttagacagggattttgagcttgtgcaggcacctgcttcattcggagaagcctggcttgaagcgagggggagcgcgccgtatgatttggttcgcgttttccggaaggatatcgacttcagacaggatctcgtccgcgacctggaatctctttatgaaagggcggagcgcctgagagcagcatcaggtcagcgaaagctctcgatattgaatgtctatttgtcgcaggaagcgcctgtagatgagtgggaagatgttgtcggtcatccggtcgcagataagcggatcagcatcgtgccggtttttattgatcacgcttcggctgaagaaggattacgcaaactcgccgtggctttaaacatggagccggatgagctgacaggccaaatgcaggatgccggatacgaaaatgtggaagagaagagagccgaagtattggcagcggctaaagcaagagaagaagaaaggcggcgggaagcggctgtatttgagaaaggcaaaccgatgtttacctggattttcgcagtgcttcaagtcttcatgtttctgcttctggaaatgtcgggcggcagccagaataccgaaacgctcgtccggttcggggcgaaggaaaacagcctcctgttagccggggaatggtggcggctagtcacgccgatcgttcttcatatcggattggtccatctcatgtttaatacatttgcattattgtctgttggagccgcagcagaaagggtgtttggatcattccgctttcttgtcatatacatatcagccgggatttttggatcgatcggcagctttctgttcagtccgtatccgtctgcaggggcttcgggagccatcttcggttgcttgggagcccttttgtacctggctttttcaaaccggaaagcttttttaaaaacgatcggaacaaatatcattgtgatcatcattctgaacctcggcctcggtttcaccatttcaaatgttgacaatgctggccatatcggcggattgatcggcggtctcctgacggccttggcggtcggaatccccggaaaaaaaaggccgctccagcggctggcaggctgggtcctcatctttgtcatcggaggaggggccctgtactttgggacacattcggctccggtgcagaaaaatgccatgctgcatcaggcggcgaaatggtatgaagagggagagtatgaaaaagtaaaggatgctttgaaggaagcgggctcaaaaccggacgcttccagcgacactttaaggctgctcgcttattccgaaattcggctcggcgagtatgaaaacgccgagaaaaggtttgaggccgtcgttgaaaaagatccatcggaccacgcctctctctatagtcttgcctggctttatacccaaagaggcgagcttgccaaagccgagcagtccattgaaagagcgttggcagaaaagcctgatgaagagatgtataaaaagcttcgggacgaaataaagaaagaaagcgcccggtaa

SEQ ID NO: 3099 - DNA, 174 bp, Bacillus licheniformis
atgagaaaagttacgtttattgtagtaggcgtcattgcagcccttgtattttttcaaaaccgttatcgtgttatcaatttcattcttggtcaaaaccaaatccgccactatttcatccatttgatgatgagaattccgttttttcgcaataagtttatccagcaggcattctga

SEQ ID NO: 3100 - DNA, 573 bp, Bacillus licheniformis
gtgaagcgttctttacgaagcgaggtcagaaagaggctggctaacatgccggaacaggagtttcacctaaaggcggaagcgattcaccggaagcttttccaatcaaaacagtggaaaaaagcgtctgttattgctcttacggtatccagaaatcgcgaagtaccgacaaaaccgattatcgaacaggcccggcttgaaggaaaaacggtgtgcattccgaaatgtatgcctgaaacaaaaaagatgcactttcgcagctatcaggatgaaagcgatcttgaagtcgtgtattttggcctgcaggaaccgatcgtacacaaaaccgagcggatggaacccgaagacatcgacttcatccttgtgccgggaatttgctatgaccggagaggatacagaatcggctatggaggcggctattatgacagatacctggccggctttacaaaagataccgcgtcgcttgccttcgagtgccaagtgatcggtcatgttccaaatgagccgcacgacatcccggtcaagcaggttttgaccgaagacgccgtttacaactgcctcgacactgctgaataa

SEQ ID NO: 3101 - DNA, 1113 bp, Bacillus licheniformis
ttgatcaacgtattgctgctgtcgctggaaaatcccctttcatcgaagagcggagcggggcgctatgtgaaaagccaccttgaactattgcggaacgaagtcagctttaccgtctgcacgacggctgccgggcaaaacagcaatggatgggaaacgctggagattccgcttgatttaaaagcgttcgcttcttttgaagaggcggtagccgccatgaattttcagatgatcaaaatcgtgctggagcatagaggacaatttgatttcgtccatgcaaacgatggtgtcaccgcgcctgccgccgtttatctcagcgaggtgctggcggtgccgctgatttccacggtgcacggccttgaaagcggccgaaaaaaggcagcagacggatatgtccacccatacagggcaatcctcgaacggcttctggctgaaaaaagcgatcaaatcctcgtgctgagcagcatgatgaagtcagacatgcaaaaggcgttttcgctttcttttgagcaaatccgggtcattccacatccgtgcataaaaagccgcacggtgaaaaaacgaatgaaaagcgcgccctactttttttcctacggaagatttgttccggaaaaagggtttatcgaattgctgcacgtctttcagaagctacgcagccggcgtcctgatcttgaacttgtcattgccggggaagggccgcttcaaagcgggatcgagaccatagcaaaagaattgggcattaaggacagtgtgaccattcttcctttcctttgtgaagaggaaagagagagctggctggcattttgtgaaatggctgtttttccaagttcttatgagccgttcggcattgctgttcaagaaagcatggccgccggcgctgccgtcgctgccggaatcaacgggggctggaacgatttcgttatcgatcgggtgaccggctttcgaattgattttagtgatccgcataaggctgcaaatgcgctcgcagaaattgtcggcaataaggagcagctgctcaaggtcggacaaacggcaaaggcttatatatttgatttgcatgatcctggatatgtaaaaaatatgtttttgcatcatgtatatcatacgtctttttaa

SEQ ID NO: 3102 - DNA, 498 bp, Bacillus licheniformis
gtgaaaaggacaatcatcgggaaaaaaccttttcaacatagtattcgaggcgattcttcgttttgtaacgatattttaaaaataacttcgccggatcatgaaaccgttcggctgagctgggaaatctcagaggctgcgctttcagcggctgaagcggtgctgtttgaaaatattagagacgtcgaaaagcaaatccttctcttttgcgtaaaaaacggagagcgcagcgcacggacgatccataccggtgcatttaaaggggaggcctcggttttccccgctgcaggaaacgctttctacaaagcggaataccggatatacaattcgctcaacatgtcactggccgttctctcatccgactgcttctaccttggggaaaacggaatccattcaaacagcagctgttttcagcatcaagacaatcagcaggattggacgactcaattttccgcatatacgagatattctttaatagaaggaaaggagcggccccgttga

SEQ ID NO: 3103 - DNA, 366 bp, Bacillus licheniformis
ttgaaggtgatgaacgtggaaattgctatcattgcgctgctcgttgtcagtattgcgctgattgcattctcatattttcaaagagaaccgatcaaggaagttgaacaggagttggaaacccttcagctgtccgccatgcaggaaatctataaactgaaaaagaagatgaccgtgcttgaggaagagctcctcgattcaaatgtggtcgtccgcagaccgaatgccggaatcagccagcatattgcgaagcagattctttcaaaatatcaaaacggcatgtctgtagacgccatcgcaaaagctgagcacgtatctgtcgaagatgtcaaagcgatcattaaagacaatgagagggtgcttgtatga

SEQ ID NO: 3104 - DNA, 480 bp, Bacillus licheniformis
atgaccagacaaagtgtacaagcatttgccggaggaatgattttggctaccgccgttcttgcaggcgcattttatttgacggataacggaaaagctgaagcttccaaggaggctcaaaacatcagcgaagccgatgtcaaaacctatttaaaggacaatcagcaggtttcgctgaaacgcgaggaataccaacagctgctccactataaagagaccgcgctgaagcaggatgctgcgtctcaaaacaaaaaagagcaggatgatgcgaaaaaaggttccaagtacaagcttgaaatcaaaagcggcatgagcacggctgagatagcagacctccttgcaaaaggaaaagtaatttcttccgccgatgacttcaaagattatgtgaaaaagaccggaaacgaatctaaaatccgcgcaggtaaatacgaactgaagcgcggtgacagcttgaaaaacatcgtcaaaacgctgtccaaataa

SEQ ID NO: 3105 - DNA, 780 bp, Bacillus licheniformis
atgagcgctgtaacagctgtaaagccagaagatgtataccagatcaacgacttgaatttatggtacggcgaacatcacgcattaaagaacattaacttgacaatacccgagtacgaaattaccgccatcattggaccgtcagggtgcggaaagtcgacattcattaaaacgctgaatctcatgatcaatatggttccgaatgtcaaaatgaccggagagatcagttacaacggaacgaacgtactcaacagcaaagtcgaccttgtcgagttacggaaaaaagtcggcatggtgtttcaaaaaggaaacccgtttccccagtcgatctttgataatgtcgcatacggaccaagaatccatggattgaaaaacaaaaaagaactgaatgagagagtggaaaaggcgcttgtggatgtagcgctgtgggatgaagtgaaagaccgtcttcattcccaggcgctcggactttccggggggcagcagcagcgcctctgcatcgcaagggcgctggccaccaatcctgacgttctcttgatggatgaaccgacatccgcccttgatcccgtttcaactttgaaaatcgaagagctgatgctcaagctgaaagagaaatatacaattgccatcgtcacgcacaacatgcagcaggcctcgagaatttccgatcaaacggcgtttttcctgatgggcgagctgattgagtgcaatgatacggtcaaaatgttttcaagtcctgacgatcatcggacgaaagattatataacaggccggttcggatga

SEQ ID NO: 3106 - DNA, 828 bp, Bacillus licheniformis
atggctcaggttcagatgccggttttggaaaccgtgcgcgacaatatcggaatcgctccgttccctgaagcgaaagagcatattttagaagtgaaaaatttaaatatttactatggagaaaagcgggccgtcaacgacattcccatgtgtattgacaaacatgcggtcacggctttgatcggtccgtcaggctgcggaaaatcgacttttttaagaagcatcaaccggatgaacgatctgattccatcagccagaacatccggagaaatacggtatgaagggcttaacatccttgattccaatatcaatgtcgtcaatctgagaagggagatcggcatggtatttcagaagccgaacccctttccaaaatcgatttacagcaacattacccacgcattaaaatatgcgggcgaacggcggaaatccgtgcttgatgagatcgtggaagaaagcttgacgaaagccgcgctgtgggatgaagtgaaagacaggctgcatgagtcggctctttcgctgtcaggcgggcagcagcagcgtctctgcatcgcccggacgctcgcgatgaagcccgaagtcctgctcttggatgagcctgcttcagcgctcgacccgatttcaaacgcgaaaatagaggaattaatcgtcggtttaaaagaggaatactcgatcatcattgtcacgcataacatgcagcaagcttcaagaatttccgatcaaacggcgtttttccttaacggagatttaatcgaatacgatcgtacggaaaagatttttatgaatccttcagaaaaaaagacagaggattacatcaacggcagatttggataa

SEQ ID NO: 3107 - DNA, 888 bp, Bacillus licheniformis
atgaacagcaaagtaacagatcgtttagcaaccggtgtttttggattgattgctgcggtaatcgccgctattcttgtcggtttgttcgcttatatcatcatcaatggtgtttcgcatatcagcctcagctttttaacttcgcgttcaagtgcgctgtcaagcggcggaggaattcgagatcagctgttcaactcgttttatattctcgtgctgacgatgctgatcacggttcccctgggagtcggcgggggaatttatatggcggaatatgcgcccgcaaacaaattgaccgattttatccgtgtctgtattgaagttttgtcatcccttccttcgatcgttatggggatgttcggcatgctgatgtttgtaaatctgaccggatgggggtacagcattatcggaggagcgcttgctttgacgattttcaacctgcctgtcatggtcagggtgacagaagatgcgatccgctccgtacctaaggagcaaaaagaggcttcccttgctttaggcgtgtccaaatggcacacgattaaaacggtattgattcctggcgcggtgccgtccatcatcacaggcgcgattcttgcgtcgggccgtgtatttggcgaagctgccgctttgctgtttacagccggactaaccacgccgagactgaattttgccgattggaatccgttttctgagacatcgccgctcaatattttcagaccggctgaaacgctggccgttcatatttggaatgtaaacacacaggggatgatccccgatgctgaagcgatcgcaaacggcgcatccgccgttctcgttctgtccgtcttgatctttaacctggcagcccgatggctcggctcttttattcataaaaagttaacggcaaacaaataa

SEQ ID NO: 3108 - DNA, 930 bp, Bacillus licheniformis
atggttcaaaaaatagagaaactgtccgcgaaagagcggctgatcagctccaagcataatcgcaaaatggatgaaatccgcgggaggattttggttgcgtcgtgcgcctttatcatgatggcggcggcgatttcgatcacaatttttctcggaaataaggggttgcaatcttttctggccaatggtgtaagtccaattgagttcttaaccagtctagattggaatccaacgaacgaaaaccctgaatacggagcacttccgtttatactcggatcttttgcagtgacccttcttgcatctttgattgctgcaccgctaggaataggaggtgcgattttcatgacggaaatcgcgccatcatggggcagaaaagtgctgcagccggttgtcgaattgcttgttggcattccttccgtcgtttatggattcataggccttacagtgttagtgccgttcatttcacagtttaagtcaagcggatcgggccacagccttctggcgggaacgatcgtcctggctgtcatgattttgccgacggtcacttcgatttcaacggatgcgctcatgtcgctgccgaaaaatctccgcgaaggatcatacgcattaggcgcaacccgctggcagacgatccgcaaagtgctgataccggcagcgctgccttcgcttctgacagccgtcgtcttgggaatggcgagggcgttcggcgaagcgctggccgtgcagatggtcatcggaaattcccgaaatctgtttgagagccttttagaccctgcggggacattgacaacgatcattacgttgaacatgggccatacaacatacgggagcgtggaaaacaatacgctctggtcaatggggcttgtccttctgatcatgtcgttcttgttcatcctgctcatccgctatctgtcatccaggaggaaactgtaa

SEQ ID NO: 3109 - DNA, 918 bp, Bacillus licheniformis
gtgaaaccatttaaaaaaatcacactgatgttcatcatgtccgttttagttgtcttcgcagcagcttgtggaagcagcagtacaaacaacaatgcagacgaaggcaaacaaagcgataaaacagagaataaggcttcaggttctttgacgatttcgggttcttcggcgatgcagcctcttgtcttagcagcggctgaaaaattcatggatgaaaatcctgatgccgatattcaagttcaggctggaggttctggtacaggcctttcccaagtggctgaaggcacagtccaaatcggaaactccgatgtctttgccgaagaaaaagaaggcattcctgccaaagaacttaccgatcatcaagttgcggttgtcggaatggcagctgccgttaaccctgaagtaggcatcgatgacatttcgttagaagatctcaaaaaggtattcacaggtaaaatcaaaaactggaaagaactaggcgggaaagatcaaaagatcacccttgtcaaccgtcctgattcttcaggaacccgcgcgacttttgtcaaatatgcacttgatggagagactccagctgaaggaatcacggaagattcttcaaacacagtgaaaaagttaatcgctgaaacgcctggtgcaatcggatatcttgcgttctcgtatatcaaggatgatactgtcactccgctttcaatcgacggcgttaagccgacagccgaaaatgtacaaaaaggcaaattcccgatctgggcttaccagcattcttatacgaaaggcgaacctgaaggcttggcgaaagaattcctcgactatttgatgagcgatgacattcaaaaatccatcgtgacggagcagggctacattccagtaacagacatggaagtaaaacgcgacgcggatggaaagcaaactgataaataa

SEQ ID NO: 3110 - DNA, 2121 bp, Bacillus licheniformis
atgatgaacaaaaaaatgaaaaatgaaaaacgcaaatcgctccccatcaggttgaacatattgttccttctcgcttttattattttcaccatcgtcgtcgtgcgcctcggcatggtgcagatcgtctttggcgaagactatacgaacgaagtgcagaagcaggaagaagtcgatgtctcgacaagcgttccgcgggggaaaatatatgaccggaacttgaatacgatcgtgaaaaataaaccgatgaatgccattacatacacaaggacatcatcgacctctcaggaggacaggctcaaaatagcaaaaaaacttgcagaaatgatcaaaatcgatacagataaaataacggagcgcgataaaaaggactactggattttaacgcgcccgaaagaagccgagaagctcatcaccgatgaggaccggaaaaaagtcaaggacggcaagctgaaggaagacgatttataccagctgcagcttgacaggatcacggaagataaactgaatgaattgacagatcaagatttgaaagtcttggcaatcaagcgtcagatggattctggatacgcgctgactccgcagtatattaaaaacaaaggtgtaactgcaaaagaaatggcggttgtcagcgaacacctggacgagctcccgggagtcgatgtgacgtctgattggaagcgggattatccttataacggtctgctcagaacgatgatcggcagcatatccgattcaaatgaagggcttccgaaaagcctgcttgatcattatttgtcgctcggctacaaccggaatgaccgcgtcggaaaaagctacctcgaagccgaatatgaaaatgtgcttcagggacagaaagagaaagtgaaaaatattaccaataaatcaggggatatcgtcgatacggaagtcatttccgaggggaaaagcggaaaggatttagtcttgacgattgatgttgatatgcaaaaagcgattgaaaaaattgtcgaggatgaactgaagtctgccaaagccaagcatagcgctccgcttctcgaccgcgcattcgtcgttatgatggatccgcgaaacggggaagtgttatcgattgccggcaaacagcttaaaaacgaaagcggcaaattaaaggttgacgactatgcgctcggcgcgatgacgtcttcttatgcgatgggctcggctgtcaaaggggccactgttttaacaggtctgcagacgggagccataaatttaaatacgacttttcttgatgaaccgctctatatcggaaaaggaaaaccgaaaaaatcttgggcgagcaacttgggaacactgggtatccagggagctcttgaaaagtcttcaaacgtgttcatgtttaaaacggcgatcgcccttggtaaaggccaatataaggcgcatcagccgctcgaccttcaaacaaaagcatttgatacattcaggtattatttcagccagttcggcctcggcgtcaaaaccggaatcgatctgccaaatgaagcttcaggctacaaaggatctcaaagactgcccggtttcctgcttgacttttccatcggacagtatgacacatacacaccgctgcagctggctcagtacgtgtcaacgattgccaatgggggataccgcatgaagccgcagcttgtgaaagagatcagagagcccgattcgaaaaaaggaatcggagccgttacacagtctgtgcagcctgaagtattgaacaaagtggacatgagcgatgaatatataaaagaagtccagaaaggattcaggcgcgtaatgacaaaaggtacggcagcgggacagtttgcctctgcttcatataaaccagctggaaaaacaggaacggcccagtctttctatgacggaccggacaaatcgaaaacgggaacatcgacatacaatacaacgcttgttgcctacgcaccttacgataatccggaagtcgctatttccgtcgtcgttccttgggtttataatgactatggccagagatattcgatcacaaacgaaatcggccgaaaagtgcttgataagtattttgaactgaaatcaaaacaatcaaaagaaaatactgtcgaaaaaaataaagacaaaatcgaaaaagaagctacagaatag

SEQ ID NO: 3111 - DNA, 1287 bp, Bacillus licheniformis
atgagcagaatcaaaaacataataggcgatgtggaattaaacagggacctcctgctgctgcttgcagtcggcggcctttattctcttagcattgccctttccaatacgtttgtgaatgtatatctgtggaagcagtccggacagtttgtcgatttggccatttataatttgtcgatcgtcgtgatgcagccgattatctttatgttcgccggccgccttgccaaaaaaatcgacagggtttttatactcaggtttggcgtttcgtttttagctgtattttatttaactgtgctgttggcgggggaaaatgcgggatcacggctggtgctgctcggaagtgtgctcggaattggctacggattttattggcttgcgtttaatgtcctgacatttgaaatcactgagccggacacgagagatttttttaacgggttcctcggcattttaaattccggcgcgggaatgatcggtccgattgttgccggctatgtcatttcaaggcttgccgacaacacgggatacacggtgattttcagcctgtccttggctttattttcagtggccgtcattacgagcttttttttaaaaaggcgtgaatcgcgcggccgctacattttgaaaaaaatctggacggaacgaaattcagacccgaattggcgcagcattacaaatgctcatttttttcaggggctgagagaagggattttcgtttttttaatcaatgtctttgtctttatcacgacaaagagcgagttggcattggggaagttcggcttgattaattcagctgtttctttttttgcatactatttcgcaacgcggcttattaaaaagggagcgcgcaaaaaggcgattttaatgggcggtctcgtcctgttcggcgctctctttctgattttgtttcatatgacgtatgtgacgcttttgctgtatgctgttgcgattgctatcggctatccgattttgctcgtaccgtattcatcgctcacatatgatgtgatcggtaaagcgaggtatgcccggaaagcgcggatcgaatacattgtcgtcagagaagtttttttaaacatcggacggattgtctcgattttggtttttttgctgctcgtgtcgcttctgaaggaggacttgggcattccggtttctctcgttttgctgggggcaggccacacgctgatctactatttcgtcaaagatatccgtctgacagagcccgcccgcgaaacggtcggaaaagatgcgcataaacaaacagctgaaccgaattatttagaaggaaaaaggtaa

SEQ ID NO: 3112 - DNA, 171 bp, Bacillus licheniformis
atgtacttcagagcaaaagaaacgaaaaacaaacagaccggcttttcgccggtctttcagcagacgctccgcttcgcggacaacataaaaaggcccgcttctcgcgggcctcttttctcaagctggattattttgcttcgctgtaaaggcgtgcaacttcatcccagttaa

SEQ ID NO: 3113 - DNA, 609 bp, Bacillus licheniformis
atggcttacaaacttccagaattaccttatgcttacgatgcgttagaacctcacatcgacaaagagacgatgaatattcaccatacgaagcaccataacacatatgttacaaaattgaacgaagcggtggcaggcaaacaggatcttgaaagcaaatctgttgaagagcttgttgcaaaccttgatgcagtaccggaaaacatccgtacagctgtccgcaacaatggcggagggcatgccaaccactcattgttctggaaacttctttctccaaacggaggaggcgctccaactggtgaattggcagaagccatcaacagcaaattcggcagcttcgatcaattcaaagaagactttgcggctgcagcagcaggccgtttcggctccggctgggcatggcttgttgtcaataacggagagcttgaaatcacaagcacgccaaaccaagattctcctctttcagaaggcaagacacctatcttaggtcttgatgtatgggagcacgcatactacctgaattatcaaaaccgccgtccagattacattaaagcattctggaacgtcgttaactgggatgaagttgcacgcctttacagcgaagcaaaataa

SEQ ID NO: 3114 - DNA, 483 bp, Bacillus licheniformis
atggatgttttgtattggatcatcattgcggcaatgttcgtcattgctttcatcggccttgtctatcccattattccgagcgtcgttttcatcgtagccggctttgttctatacggatttttatttacattcgggcattactcctacctattttggatcattgaaggcatttttacagccgtattgtttgccgccgactatattacaaatctcctcggcattaagcgctttggcggcagcagggcagcgatatggggcagcacgatcggccttctggccggaccgtttgtgataccggtggcgggcattattttgggtccctttatcggggccttggcgggtgaggtgattgtccatcagaaggatttgaaaacggcggccagaatcggaatcggttcattgatcgggtttatttcaggcgtttttgcgaaaagcgtgattcagctgatgatgattggctactttttatataccgtgctctaa

SEQ ID NO: 3115 - DNA, 759 bp, Bacillus licheniformis
atgaatttatttcagcgattttttaaaagtacatattcccctcaagctattgggaaaatgcgtttccaaggcataggaaaaacgattttatacgtatttttgctcagcgtgatcgccgctctcccgaacctttaccatatcagcagcggagtggtgaatacgatgaacagctttcagtcagctgtgaaagaattccccgctttctccataaaagacggcacactgcaaacagatgcaaagaaagcgattgaatcacagtcattcggatttgtcatcgtttttgatccgagcggctcttatgaaacaaaacagatcgaagacaaacgcaattccgtcggcatcctgaaagataagttcgtcatcgccattgacggccaagtccaggaaatgccgtacacaatgcttcccgaggacatgtctaaggatgatattctttctttagttgatcaaaataaagcggtgattgttcccgtcttgtgcgttctgctgttcctggcgacggcagccggaaaattcattgatgtctcggttctcgccgtcatcgggctgatcattcgcaacgggcagaagaaaatgctctcctataagcagctttgggtaatgtctgcttattccatcaccctcgcaaccgtgttttttgcaattatggacgcgctggaggcggtggttccaagtcagttcctcctgaactggtttgtgaactttatcatgctgtttctcgccattaaagaaacgccggcttctaaagcagcgaggtaa

SEQ ID NO: 3116 - DNA, 306 bp, Bacillus licheniformis
atgaaacgtgtcattgtgctgttttcgattttgctcgccctgttcattgtttattatgacttgaaatcaggcaccatccctcaaaacgccttaccggcttcaaccatggcagcggaagctccggctgcaagcctgcaatataagtccgttacggtaaagcccggacaaacggtattttcaatcatcgggaacagcgccgttccggctgacaaaatagccgaagattttgaagagctgaatccgaatgttgaggcgggccgcattcaagcaggtgtcacctacaagtttcccgtttatcctgattaa

SEQ ID NO: 3117 - DNA, 1113 bp, Bacillus licheniformis
gtgagtgaaatcacacatcgtacaaaaacgcgtcccgttaaagtgggacctttaacaataggcggcaataacgaagtcgtcattcaaagcatgacaacaacgaaaacacatgacgttgaagcaaccgtcgccgaaatcaacagactcgcggaagcaggatgtcaaatcgtccgcgtcgcctgtcctgatgaacgggctgccgacgccattccagagatcaaaaagcggatatccatccctcttgtcgtggatattcatttcaactataaattggcattaaaagcgatcgaaggcggagccgataaaatccgcatcaatccgggtaacatcggccgccgcgaaaaggttgaagcggtcgtcaacgcagcgaaggaaaagggcattccgatccggatcggcgtcaatgcaggctctctggaaaaacgaatccttgagaagtacggctatccgacagcagacggcatggtcgaaagcgccctgcaccacattaaaattcttgaggatctcgatttccacgatatcatcgtcagcatgaaggcgtctgatgtaaacctggcgattgaggcatatgaaaaagcggctaaagctttcgattatccgcttcatttaggcatcaccgaatcgggaacgctgtttgccggtacagtgaaaagcgccgcgggtctcggcgcgatcctttcaaaaggaatcggcaatacattgcggatttctttaagcgcggacccggtcgaagaagtaaaagtcgccagggagctcctgaaatctttcgggctcgcttccaatgcggcaacattgatttcctgcccgacttgcggccggatcgaaatcgatttgatcagcattgccaatgaagtcgaagattacatcgcgaaaatcaaggcgccgatcaaagttgccgttctcggctgtgccgtcaacggtcccggagaagcgcgcgaagccgatatcgggatcgccggcgcacgcggcgaaggacttctgttccgcaaaggcgaaatcgtccggaaagtgcctgaagaaacgatggtcgaggaattgaaaaaggaaatcgacaagctcgccgaagagcattatgccaaacaagcggcagaaaaagaaaaattaaacacataa

SEQ ID NO: 3118 - DNA, 372 bp, Bacillus licheniformis
atggaaagagatcaaaatgttcgcgatcgtaaccgagcaggttatgatgctgacttagtcgatgcgactttagataatgatgaatttttagaagaaacagcagcagaagttgccccgacctatcgtacggataacggggacaacggcgaagcgcgtaacgatgccgatgctgccggcggacgtgtaaccggatatattgcgcttgcgctttcgattatttccttgtttatgcttccagtgctgttaggaattgcagggatcattgtcggttatatagccagaagacaaggagcagctggcttaggagcatgggcaatgggtatcggtgcagtttccttggtgcttggcatattcatcaccccgtttttctaa

SEQ ID NO: 3119 - DNA, 585 bp, Bacillus licheniformis
atgttacatttaggaatcgatattgatggaacgatcactgcccaggatacttttgttccctatttgaacgagtcgttcagcctctccattacattggaagatattaaggaatatgacctgacaaagctgctgaatatatctcaagaagatttttggaaatggatgaacgaaaacgagccccgcatctatcaggaagcattgctggctcaatatgccaaacagacgctggatgagctgaaaaagcagcataagctgatatatattacagcaagaagacatcacctggaggatatcacctatgactggttcgagaaacgcgacattcattatgaccatatagaacttgtcggcggtcacgataaattggaagccgtcttcagacatgagattgatgttttctttgaagaccaccacgggaatgcaaccatgatcgcaaaagaagcaggcattcctgttctgttgtttaatacgccgtacaatcagcttccgaccgattcaaacatcgtcagagtcgacagctggcttgaagccgccgaatggctgaaaaagaacgagaaaacgcttaaagccgcaaaaagcatgtaa

SEQ ID NO: 3120 - DNA, 432 bp, Bacillus licheniformis
gtgaacgtacaggaagcgcttgatttactgaaggaaaaaggatataaatatacaagcaaacgggaggatatgcttcagctgtttagtgattcagataaatatttaacggcgaaaaatgtcctttccgctttaaatgatgattatccggggctaagctttgatacaatctacaggaatttgtcgctgtttgaagaactcggcattttggaaacgactgagctttccggtgaaaagctgttccgttttaaatgttcttctgctcaccaccaccaccattttatttgcatggtgtgcggcaaaacgaaagaaattgagctatgtccgatggaaaagctgacagacgatcttgacggctatcagatcagcggccataagtttgaaatttacggaacctgcccgcgctgtgaagaagaaagcacggaagcgcagtaa

SEQ ID NO: 3121 - DNA, 861 bp, Bacillus licheniformis
atgctgacacctttttttcattatgagtttttgcaaaacgcttttatttcaggaatattaatcggcctcatcgcgcccttgctcggcgtattcatcgttgtcaggcggctgtcgctgatcgcagatgcgctcagccacgtctctttagccggcatagcagcgagcctgtatgcaggcaaacagtttgcagtgttcgcaggagtcagcccgatctatttcggaatggcgttttccgttgccggctctttaatcatcgagaggctgagaacggtttataaacattaccaggaactggcgattccgattatcatgtcggggggaatcggcatttccgttatttttatttcgcttgccgacggattcaatacggatctgttcagctatttattcggcagcgtcagcgctgtttcacgggaagacatgctggtgatcgtcggcatttccgcagccgttttgatcgtggtgttttcccttttcaaagagctgtttcttctgtcgtttgatgaagagcatgcaaaagcttcagggatttccgcaaagtggattcattttatttttattttgatcgttgcgcttgttatcgccgcctcaatgagaatcgtcggtacgcttctcgtttcagcgctgatgacgctccctgtcgctgcgagcatgcgcattgccaaaggatttaagcaggcgattttcttatcgatcctgttcggtgaactttccgtcatcgtcggccttgtgcttgcctatcatctcgatcttgcaccggggggaacgatcgtgatgctgtcgatctttatcctgatactgtgcatcagttataataaagtcaaaaggaggattcgccgtgaacgtacaggaagcgcttga

SEQ ID NO: 3122 - DNA, 777 bp, Bacillus licheniformis
ttgaaacaacctattattgaaatgaagcatgtatcatattcctatgatcatcgcaatgtgatagaagatataaatttgcaaattgaagaagggacttttctcggcctggttggtccaaacggatcgggaaagacgacattgctgaaatgcattttggggctgattaagccgcagacaggcgaacttaaactgtttggcgttcctctcagaaaatttaaggactggagcaaaatcggcttcgtatcccaaaaagcaaacagctttaacaccggttttcccgcttccgtttatgaagtggtggcaagcggtttaaccgcaaagctcggcttattcagacgcatgtccaaagccgataagcagaaggtggatgaagcgatcgaagctgtcggcatcacgtccctgaaagacagaaacatcggcgagctttcgggaggacagcagcagagaactttcatcgcgagagcgctggtgagcgaaccgaagctgctcattcttgacgagccgacggttggagtcgatcaaaaaacagttgaagggttttacaagctgctggagaaattgaatcgtgaaaaaggcattacgctcattcttgtcacccatgatgtcggcacggtttccgataaagtcacacacgttgcctgcatgaataagcatcttcattttcacggcaatacagaagagtttgagtccatgacagatcaagacttgtctcaattttacgggcatgatgttcaagccatcagccacaatcaccatcatcatggaggacacgaataa

SEQ ID NO: 3123 - DNA, 150 bp, Bacillus licheniformis
atgcttcatttcaataataggttgtttcaattcgttcaccttcaaattctccagaatcattacgatttatcgcacaaaaagaaaatggcagccgaaaagcagcaagccattttcacgattgaccagttcatctttaaattatacatataa

SEQ ID NO: 3124 - DNA, 885 bp, Bacillus licheniformis
atggcaaagactcaaaaacagcataaaaaagaatcagcggtcaaaaaagcgtttaggatcgtcatgattcttatcggggctgcctgtgctgccgccagcatcgaattatttctagtgccgaataacatcatcgacgggggcattatcggcatttcattaatattggactacctctttaaagataacccgtatatcaacttcgctctgctcgtcgtcgttctcaacatcccgtttatgttttcaggctacaaacacatcggaaaaacgttcttaatttcaacactaatcggaatcgtcagcttgtcaattattgaaacactgttgcatcatgtagaaggggttacgactcagcccgtcctggcagccgtattcggcggtcttctgctcggattcggcgtagggcttgttattcgtaacggcggttctatggatggaactgagatactcggcattttgcttacgaaaaagctgccgttttctgtcggcgaatttgtcatgttcgtcaatgtctttatttttgcatgggcgagctttgtgtttggccttgagcaggctatgttttcggttatgacatattatattgcgatgaagacgattgatgccgtcattcaagggcttgaagagacgaaagcggtcatcatcgtttcagatcaatacgaggagatttccgattcgctgctgcatcgcctcggccggggaacgaccaagctcaaagggaaaggcggctattccgacgaggacacagaagtgatttatgccgttgtgaccaggcttgaagtgacgaagctgaaatcgattgtcttcgatattgatcacaatgcttttataacgattatggacacgcacgaaacgcgcggaggaaagtttaaaaacgccatccattag

SEQ ID NO: 3125 - DNA, 255 bp, Bacillus licheniformis
gtgattttatttcaaaagatcgtgctgcagcgtttaaatcaggtcacggctgacgaggtgctgaagtacgctaaacaatacggaattcaagtaacaagaaaacaggcgcttgaagtggaaaagcttgtgaaaggaaaaaacatcaatatttttaatgaagaagaacgcaataaactgctcaagcaagtggaagcggtcacttcaaaagaagcggtgcagctattgaaccagctgtttgctcaatacgtatcataa

SEQ ID NO: 3126 - DNA, 894 bp, Bacillus licheniformis
ttgttgaaaatcggttcacacgtctcaatgagcggaaaacatatgctgcttgcggccagtcaggaggcaagctcctacggcgccaatacatttatgatctatacgggagcgccgcagaacacgcgcaggaaaaaaatcgaggatttgaatattgaagcgggaagggctcacatggaagagaacggcatctctgatatcgtcgttcatgccccgtatattatcaatattgccaatacaacgaatccggccacatttgagctcggtgtcgagttcttgcgttctgaaattgaaaggacgtcggcaatcggcgccagacaaatcgttcttcacccgggagctcatgtaggcgcaggcgcagaaacgggcattcaaaaaatcatcgaaggattgaacgaggtcatcgacccgaatcagaatgtgcagatcgctttggaaacgatggccgggaaaggttcagaatgcgggcggacgtttgaggagcttgcacagatcatcgacggcgttacacacaacgagcatttatccgtctgcttcgatacatgccatacccatgacgcgggttacgatgtagtatccgactttgacggtgtcttaaacgaattcgataaaattgtcggaatcgaccgtttaaaagtgcttcatattaatgacagcaagaatgtcagaggtgcgagaaaggaccgccacgaaaacatcggattcggagaaatcggttttgatgcgctccaatacatcgttcaccacgatcagctgaaagatattccgaaaatccttgaaacgccttatgtaggagaagataaaaagaacaaaaagccgccttaccggtttgaaattgaaatgctcaaaaataaacagtttgatgaagagctgcttgaaaaaatcaagcagcaataa

SEQ ID NO: 3127 - DNA, 1320 bp, Bacillus licheniformis
atgaaacaaacgaaatttgaaatgtacgatttaaagccgtttattatagaggctgttcaccacttgggattttatgagccgactgatattcaaaagcggttaatccctgcggcgctgaaaggagagagcgcgatcgggcagtcgcagacaggtacgggaaaaacgcacgcctatctgctcccgcttttaagcaggatcgatcctgaaaaagagttcgttcaagtcgtgattacggctccgacaagggagctggccaaccagattcatcaggaagttctgaaaatcaccaagtttttagggcctgatgaagcgattcgttcgaaatgtttcatcggcggtaccgataaacaaaaatcgattgacaaattaaaaacgcagccccatctggtggtaggtacgccggggcgaattgcagacctgatcagggagcaggcgctcgatgttcataaagccggttcgctcgttattgacgaggcggacttaatgcttgatatgggatttttggaagatgtcgattttatcgggtcgcatatgccggaaggcttgcagatgcttgtattttccgcaacgattcccgaaaaattaaagcctttcctgaaaaaatacatggccaatccgaggtatgcacatgttgagccgaagcacatcacggctgaaaaaatcgaacacgtgctgataccttccaggcacagggataaaaatgagctgttgctcgaggtcatgacccatttaaatccgtatttggcgattgttttcgccaatacaaaaacaacggccgacgagatcgccgcttatctgacggacaaagggatgaaagtcggacttctgcacggggggcttacgccgcgggaacgaaaaaaagtgatgaagcaaatcggcgatctggaattcacctatatcatagccactgatttggctgcaaggggaatcgatattaaaggcgtcagccatgtcattaactatgaactgcctgatgatcttgacttttacgttcaccgcgtcggccgtacagcgcgcgccggaacatccggaacagcgatgacgttttatgatacatctgatgaagatgcacttgtgaagcttgaacagatggggatcgtgtttgaaaacatgaggattgaaaaaggcgagtggaaaaagatcgatgaccgcaagcgccgtcagaaccgaaaaagaacgcctgatgaaacggatgaggtcgccaagcggcttgtgaaaaaaccgagaaaagtcaagcctggatataagaagaaaatgcagacggaaatccaaaaaataaaaagacagcaaaaaagaaagcaatttagaaaaggaaagtag

SEQ ID NO: 3128 - DNA, 648 bp, Bacillus licheniformis
atgtttcagcaacagccgatgagaaatcagccaagaccgcaggcgccgcaaaggcccggcagagccttgatgccgagacatccggggatgggaatgcagccccctcaagcgcagcagcgtggcctgcagcagatgtttcagccaatgggcgccgcccagcagcaagcaggcgcgcgaggaggagggattcaggggttgctctcgaaatttcttcccggatctgccgcatccgggggaacaggagcgggtctcggcggaaccggaagcggccttggaggcattcagggtctggccaatccgtctaccatttcaaatatgctcggcaatgttcaaaaagcgctcggcgtagcccagcaagtaacaccgatgattcagcaatacggaccgctcgtccgcaatctccccggaatggtgaaaatgttcagacagctgaattccgatgatacggaagcagaagacggcgaacaacaaaaagacgaaccggaacacaagaccgaaacgagcggcgaaaagaaagaagaaattaaagtgtcatccaaaaaacccgaaaaatccaaacccgaagaaatcagaaaaaaacagagccgttcagcccctccgtctgcaaaaagaaaaaccggaggatctaaacctaaactgtatatataa

SEQ ID NO: 3129 - DNA, 945 bp, Bacillus licheniformis
atgaacgtaattaaaatatcgccgcgcggctattgctacggtgtcgtcgacgccatggtcatcgcaaaaaacgcggctctcgataaaagtctgccgagacctatttatattttaggaatgatcgttcacaataaacatgtcacagacgcatttgaaaaagagggcatttatacgcttgacggcccgaacaggctcgagattttgaatcaggtcgacaaaggaacggtgatcttcaccgctcacggcgtttcgcccgaagtccgcaaaatagctgaggataaaggtcttgtcgcgattgacgccacctgccctgatgtgacaaaaacacacgatttaatccggaaaatgaaagccgaaggctatcacgtcatctacatcggaaaaaaaggacacccggagcctgaaggagcggtcggcgtcgccccggatatcgttcatcttgttgaaaccgaagaagatgtggaaaggctggacattgaagcggagaaactgattgtcacgaaccaaacgacgatgtcccaatgggatgtccacgatattatggaaaaggtaaaagaaaaatatccggatgttgaattccaccaggagatttgcctggccacccaagtgcgtcaggaagcggtgtccgaacaagcgaaaaaagccgatttgacgatcgttgtcggcgatccgaaaagcaataactcaaaccgcctcgcccaggtctccgaagaaatcgcgggcacgaaagcataccggatcggtgatttaagcgaattaaagctggaatggcttgacggcgtagaaaccgtcgctgtaacggccggcgcatcgacaccgaccccgattacaaaggaagtcatccgctttttagagcaattcgatcatgaagatccgtccacatggaagatcagtcacgaagtaccgctgcataaaatcttgcctaaagtaaaagcaaaaacctga

SEQ ID NO: 3130 - DNA, 1122 bp, Bacillus licheniformis
atgacaaaaacgataaacgggcatgaaatcattcaattgtttgaacagttctcgcctaagtctttagccgttgaaggagataaaatcggcctgcaaatcggcacgctgaacaaaacggtggccaatgtcatggtcacgcttgatgttctcgaagaaacggttgatgaagcgatcgcaaagaacgttgatttaattattgcgcaccatccccctgttttcaggccgctgaaacatgtcatcacagatcagcccggcggaaggctgatcgaaaagtgcatcaagcatgatatcgcggtttatgcggctcatacgaatctcgatgtcgctgacggcggtgtcaacgacatgctagcggaagcgctggaattaaagaacacaaaagttctggttccaacctatgaagagccgctgaaaaaacttgccgtctatgtcccgaaagattatgaagaacaggtacgcacagctcttggagacgctggagccggccatatcggcgcctacagccactgtgcgttttctgcagaaggagtcggcagcttcaagccgctatctgaagctgatccgtttatcggcaagcggggcgagcttgaacgggtcgaagaggtaagaatcgagaccgtttatccggcgggtattgaaaaatccgtgatcaaagcgatgagtgaggcccatccgtatgaagaagtggcctttgatatttatccggtcgagcagaatccgcttcaaaaagggctgggccgcatcggtgaattgaatgaagagatgacactcgaagcgtttgcccgatatgtgaaggaaaagttggaggcgaacggagcgcggatggtgggcaagtctgatgcgaaagtgaagaaggtcgccgtattaggcggtgacggcaacaaatacatccatcatgcaaaacgtatgggcgctgacgtatatgtcacgggagacctgtatttccatacggcgcacgacgccatgatgatcgggctgaatgtagttgaccccggccattatgctgaacaaatcatgaaaaacggggttgcaaaaaagctgacagcgatgtgccgggagaaaaaatttgatgtctcggtctttccatcggatacgaatacgaatccgtttacgtttgtataa

SEQ ID NO: 3131 - DNA, 714 bp, Bacillus licheniformis
gtgaatgaattgaagttatcgaaaaggctgcagactgtggcggaatacataacaaaaggggctgttgtggctgatatcgggtctgatcatgcgtatttgccttgctattgtgtgctgaatcgcctggcaagcgccgcgatcgccggagaaatcacagatggtccgtttctttctgcgaaacagcaggttgagaaactgcagttaagttcgctcatatccgtcaggaaaggagacgggcttgaagtgattgaaaagggcgaagccgatgtgatcacgattgccggaatgggtggctcgctcattgctcacattctaaaaacgggcaaggataagctctcaggtaaggagcgtttggttttacagccgaatatccacgctcaacatattagagagtggctctaccaggaaggctatgcactgatcaatgaagagatccttgaagaagacggcaagtactatgaggttctcgtggctgaagcgggcgatcgggatgcggcttacgatggggtttcctttgcggcaggcatgcttgtcggcccatttttggtcaaagaacaaaatgatgtttttatcaaaaaatggtcgcaggagctgaaacatacggaaaacatctatcgacaaattgaagcggctcctccgagtgaagaaaatcgacaaaaattgcttgagctgtcagaacggatagagatcttaaaggaggtacttagaagatga

SEQ ID NO: 3132 - DNA, 725 bp, Bacillus licheniformis
atgaacatcaacaatatacacgattttaatttaaaccaagaaaatgacttcttaacgatacaaacaaaactaaaaaaacatatcaatctagaaaaccccatcagtaaagacgctctgcaaacctgtgcgggggttgatttagcttattgggagaaagatggtgaagcatttggtgtctgcagcatcatcgtgctggattttcatacgaagcgtgtcattgaaaaagtacattgtgcagggaaaatcgccgtgccttatatcgcagggtttcttgcttttagggagctgccgcttattattaaggcagctaaaaagctgacgattgaaccggatgtttttttatttgacgggaatggctatctccatattaaccatattggattgcgacacatgctgcgttttttctcgaaaagccaacgatcggcattgcgaaaacttacttgaaaataaaacaaactgattttgtgatgcctgataataaattcggcgcttatacagatattgtgattgatggcgaagtctacggacgtgcggtgcggacaaggcaagatgtcaaaccgatatttctatcatgcggacatttgattgatttagacagcagttatgacatcgcgatgagcttaatcaatcgagaaagcaggctgccgattccggttcggctcgcggatcttgagacccatactttacgtggatattacagagagaatccaaaattgaccgagtag

SEQ ID NO: 3133 - DNA, 555 bp, Bacillus licheniformis
ttagtttttgtgttagtacttggagattttttaggaaataacatttatgaagataaggtagggatttttcattttttatatgccatcggattgtggacgtttcttatgttgggaatagagtttatgactctaaaaaataaatcgacacgttctctcttattaggcaatcctaacatcatcattcgagatggtgttatggacagaaagttacttacaaagaacaaattggatgtaaatcaagtattgagtatactccgtcaaaataatgtcttttcagttcgcgaagtcaaatacggtatattggaagctaatgggcaaataagtttattattaaaatccaagtatcaaaaaccagatctcaatcttccagaaagtccagtagacctcccaacatcgttaattatagatggggaaattttatgggataatttacatgaactcggatttgatcaacagtggttagataaccaattaactaccaatggatatgataatgtaaagcgtatactttacgcagattggcgagagagtgaaggcatacatgtaagtcctaaa

SEQ ID NO: 3134 - DNA, 1494 bp, Bacillus licheniformis; identical to SEQ ID NO: 2289

SEQ ID NO: 3135 - DNA, 675 bp, Bacillus licheniformis; identical to SEQ ID NO: 2290

SEQ ID NO: 3136 - DNA, 861 bp, Bacillus licheniformis
gtgcctgaatggttagaggtggtaatacggtcattattatttgtcgttgtcctgtttttaatcacaaaatggttagggaaaaagcaactttctgaactttctttttttgaatatgttgtaggtattacaattggaagtattggcgcagaagttatcacaggacttgaacggaacatgtttaacgggataatcggaatcgtggtcttcgcggcaataccctttttagcaggtttgctttccttaaaaagcaaaggctttcgcaattttatagaaggaaaagcaactgtatttatcaaagatgggaagattatggaagataatttaaaaaaggaaagatatacgacagatgagttactggaattgcttcgaaagaaagatgtctttaaggtagctgatgtggaatttgcggtattagagccaaccggggatctaagcgttatgctcaagaaagaaaaccaacctttgacaccgaaagatgtaaacttgactgttgcttccgttaaggaacctcagaccgtcattatggatggagaaatattagatgagcctctgtctacaattggtagaagtcggggttggttaaaaaccgaactagaaaaacaaggggtgacgattgagaatgtttttattgggcaggtagattcttacggacaattaacaattgacctttttgatgataaactccaagtcccgtcccctcaagaaaagcctttaatactttctaccatgaaaaagtgtcaagctgacttggaatcgtttgctcttggaacggaatcaaaagaggccaaacaaatgtataggttaaacagtgaaaaattacaagaagccattgataaagtgacccctattttaaaaggataa

SEQ ID NO: 3137 - DNA, 204 bp, Bacillus licheniformis; identical to SEQ ID NO: 2292

SEQ ID NO: 3138 - DNA, 351 bp, Bacillus licheniformis; identical to SEQ ID NO: 2293

SEQ ID NO: 3139 - DNA, 1020 bp, Bacillus licheniformis; identical to SEQ ID NO: 2294

SEQ ID NO: 3140 - DNA, 480 bp, Bacillus licheniformis; identical to SEQ ID NO: 2295

SEQ ID NO: 3141 - DNA, 474 bp, Bacillus licheniformis; identical to SEQ ID NO: 2296

SEQ ID NO: 3142 - DNA, 204 bp, Bacillus licheniformis; identical to SEQ ID NO: 2297

SEQ ID NO: 3143 - DNA, 891 bp, Bacillus licheniformis; identical to SEQ ID NO: 2299

SEQ ID NO: 3144 - DNA, 207 bp, Bacillus licheniformis; identical to SEQ ID NO: 2300

SEQ ID NO: 3145 - DNA, 471 bp, Bacillus licheniformis
atgaggagatataaaagtatggttgcacttttccttcttctcacccttaccggttgctggagcagatatgaagtgcaaaacatgaactatgctacggctgttggaatagactatgtcgatggccaatacaccatgtatttgcaattgcttgatttctcgacagtggccaagctggagggacagcaaaaagcggagcagcccccggtttgggtgggcaaaggcgaaggttcctcgtttacggaggcggcaaatgatttgtacagtacatcacaacaacgcttaaacttgggacaaatctctgccattttgttcagcgagagattgatgaaggaaaacaaagtcggagaagtgctggaattgatcaaccgttatcgtgaaataaggtacttggcctggctgtttagcacaagagagcctcctgaagaaatcttgctggcaaccccattttttagattttcgccaaatgcataa

SEQ ID NO: 3146 - DNA, 1043 bp, Bacillus licheniformis
gtggaagaagtgggagtcaatgtggcgttaattcggaaacgaatcaaatcaaccagcatggtttatgaaacgaaaaaagtaggcgttcgcacgaaaacaaccgttgcaattctttacatgcgtgacattgttgatcctaagattgttcaagatgtaaagaataaattagatgatcttcacattgacggagcgtttagcgctttagcgccactcagctagaagaattaatggaaccgacaaaagcattgtttcctttgatggggtatacaggcagagcagactttaccgtgaactgtatgctcaatgggcgtgtagcgttgattgtggatggtacaccggctgcgttgattgcgcctgccaatttatttttgcttgtgaaagcacccgaagatatccactttactgctttggcagctacatttggtcaaacgcttcgtttacttggcttgtccgtatcgctactgcttcctgcattttttgttgccattctttcctatcatcaagatcagctgccctattatctacttgccactttggggattaaccggttgggaatcccttttgatgtggcagttgaaatgtttattgcacttctcttcttagaaatcctgcgggaagctggtatccgattgccttctgcggtcggctccacggtaacggttgtaggaggacttatcctgggggatgcggccattcgtgctggattcttatccccaggtatcgttgtcatcggagcaattacacaaatctttggttcaactttatcgagcctatcattggctggaacgattagtaccttacgcttttttcttttcattctgtctgccacgcttggcatttatggcttctttcttggattatttattgtgctcagccatttagcctcattgcgttcatgcggcttgccttacttggccccaatatcacctccatttaaagacttggccaacgctttgtttcgattaccttggccatggcgaaacactcgaccggacatgttgaagacacgagattctacaaggcaaggggacaggcataaatga

SEQ ID NO: 3147 - DNA, 300 bp, Bacillus licheniformis
atgtttaaattatatttagatcctggtcacgggagaatggacccaggatctattggcaatgggatgcaggaaaaagaaattaccttaaatatttcccatagcatccgaaatctcttggaaaaccattatgaaggcctgcaaattaaaatgagtagaacagcagatattacgcgcagcttgaaagaacgtacagatgatgcgaatgctttcggtacgggggccaaaggatggatttgtggaagaagtgggagtcaatgtggcgttaattcggaaacgaatcaaatcaaccagcatggttta

SEQ ID NO: 3148 - DNA, 454 bp, Bacillus licheniformis
ttgaaaattccaaagacagccaaagttagtatcccctttccatccgtatgggggattgatgcttctattgcggggagatccattattagaggtatacttaccattgattccattgtagacaacaaagtagtaggtacagttaattttcgtggtatacctattccgattaatgggtattgggacgaaagcgctaaacaaataagtttcgattcaccatatgcctccttttttggcaacttgacaataattgatgagaccgctataagcattcggcatttcattttaagtggacggtttataatgaaacctccctctttgctggctggtgaatacggaaattggattgctacaacctttacaacccgtttgggacctcccatatatactaatgttttaccacctgttggtgccttttcagtctcaagtatgctcttgggacagcaattgttttaat

SEQ ID NO: 3149 - DNA, 576 bp, Bacillus licheniformis; identical to SEQ ID NO: 2304

SEQ ID NO: 3150 - DNA, 2959 bp, Bacillus licheniformis
atgaaaattgcgagaggtagagaattgcttacactggaacagaggcaggattttatgcaaatccctgaagatgaatggatattggggacctacttcactttttccaaacgggatttagaaatagttaataagcgaaggagagaagaaaaccgtttagggtttgctgttcaattagctgttcttcggtatcccggttggccatacactcatatcaaaagcatcccggaatcagtcatacattatatatcgaaacaaatcggtgccactccatcttcgattagtctttatcctcaaagagaaaatacactttgggatcatttgaaagaacttcgaagtgaatacgactttgtaacttttactctaagagaatatcgaatagcatttaagcatcttcatcaattagcttttgaaaatggcgatgccatacatctactacatgaatgtatagattttctaaaaaaaaacaaaatcatactgcctgctattactacacttgaaagaatggtgtgggaggcaagggcaatggctgaaaagaaactgtttaatactgttagtcaatctcttacaaatgaacaaaaaggaaagcttgaagagatcattacttcgcagcatccatccgaatccaataaaacgatattgggttggttaaaggaaccgccgggtcatccttcacccgaaacatttctaaaagtaatagaacgattcgaatacatacgaggaatggaattagaaacggtacaaattagtcatttgcatcgcaatcgcctgtttcaactatctcgcttaggctcaagatatgagccatatgcattccgtgactttcaagaaaataagcgatattcgatattaaccgtctatttattacatcttactcaagagttaacggataaagcttttgaaattcatgatagacaaatacttagtctgttatcaaaaggccgtaaagctcaagaggaaattcagaaacaaaacggtaaaaagctgaatgagaaagttatacactttacgaacatcggacaagctttaatcaaagcaaaaaaggaaaaattagacgtttttgaggttttagaatccgttatcgaatggaattcttttgtctcttcggtcgaagaagctcaggagcttgcacgccctgacgactatgattatttagacttactgcaaaaacgattttattcacttagaaaatatacgccaacgctattaagggtattggaatttcattctacaaaagcaaatgagccacttttacaagctgttgagattatccgtggaatgaacgaatccggaaagcgaaaagtgcctgataactcacctgtggattttatttcaaaacgttggaaaaagcatttatacgaggatgatggtacaacaatcaatcgtcattactatgaaatggctgttttaacagaacttcgggagcatgttagggcaggagatgtttccattgttggcagcagacaatatagagactttgaagaatatttgttttcagaagatacatggaatcaaacgaaggagaatacaagattatcagttagtttatcattcgaggattatatgacggagagaaccagcagccttaacaaaaggtaaagtggttagctaccaattccaacaagttagacggggtttctcttgaaaaaggaaagctgtcaattgaacgcttagaaaaagatgttccagaagaagcaatagcgcaagcctgtatcagatgctaccaagaataaaattaaccgatttactgatggatattgcttatataacaggatttcatgagcaatttattcatgcttccaataatcgaaaaccggataaagaagaaacaattattattatggctgctcttttaggaatgggaatgaatattggtttaagcaaaatggctgaagcaacacccggacttacatataagcaattggccaatgtatcacaatggcgcatgtatgaagatgcaatgaataaagcccaagccgtattagtaaattttcatcacaaattgcaattgtcctcctattggggagacggtacaacatcctcgtccgatggtatgagaatgcagataggcgtttcatagctacatgcagatgcaaacccacattatggaactggaaaaggagccaccatctatcgttttacaagtgatcaattttcttcttattacacaaagattattcatactaattcaagggatgcgattcacgttttggatggtttgttacaccatgagacggatctaaatatagtagagcattatacagacacggctggttacacagaccaaatattcggactgacccatttattaggatttaaatttgctccaagaatacgagatttatcagactcgaaattatttacaatagataaggcaagtgagtatccaaaattagaagtcattttacgtggacaaataaatacaaaggtcattaaagagaattatgaggatgttttgcgattagctcattctataagggaaggaacagtttcagcatcccttattatggggaaattaggttcttattcaagacaaaacagcttggctacagccttacgtgagatgggccgaatagaaaaaacgatctttattttgaattatatttcggatgaatcattaagaagaaaaatacaaaaaggattgaataaaggagaagccatgaatggactggcaagagctattttcttcggaaaacaaggagagcttagggaacgaaccatacagcatcaattgcaaagagccagtgccttaaacatcattatcaatgccatcagtatctggaatactttacatctaacaaaggcagttgaatatcaaaaacggtcaggtagttttaatgaagaattattgcaccatatgtcacctctaggttgggaacatattaatttacttggagaataccattttaattcagagaaaatggtctcgttagattctttaagacccttgaaactttcttaa

SEQ ID NO: 3151 - DNA, 225 bp, Bacillus licheniformis
atgaatagtaatgatacggtaaccatgttgaatgaggaatttgagaatgatcagacaggtgaaaaggtcgaaggcattacgattatcgtagatggacaatttaaacaagttttagatatcattaaagccaaaagcgacagttaccagaattacactgaaatcatacgggacgccctttttgaaggtgtaaacagcatgacgatgaagctgagaaataaagaataa

SEQ ID NO: 3152 - DNA, 759 bp, Bacillus licheniformis
ttgtctaattccataaaatcattagaacctataaatataccgtgcggctggttcgttaaatataatgacttaaccgacacacatgaaaaagttgaaccaaataccaaattattagaattagaaaaacaaagatatcatgctgcggtcaaaatcattaaaggccaggatgaatatcttattcatatttatgacaatcatagagaaacgattgacacaatcaatgttgaagatcgcaggcagctagtaaaagagctggaacggatcatttggaaaatagaagcggcggcatttggagggaactttttcatttttgaagggcctcctgactatttacgtcttagaattcctcaaggatggaccgtctcttataataaactaattgatatcgatccagatcagttagaggaggacagtgatgactggtttaactttacgtcatcattactacagttggagcataaagaaagccgcttgattttagatgtcggctggtacgtggatattgagccttcaggcactttttatatgctattaattaagaatttggactgggaaaacccgttagaagacatggaaacgagaagaccggaaaaattagtggaccacatagaagccgcccttcaaaaagcagccgaagctttgtttgacttcagcccctcattattaatcgattttagtcagaaaaagttgtattccatgtacctagaaccagcatgttatgaagaatatataccaaaatcattggattggagtttatga

SEQ ID NO: 3153 - DNA, 405 bp, Bacillus licheniformis
atgatcacgtataatggaccggttgaagaaccaattgaaaacccgaatgatgattttataagaagtattgtatttgaaaaagacgaggattattggaagcaaggaagcggggattcatgttttgaagtagagggctgtgatgaatggttaattttcttttatgatgaaccatatgggttctttataatgagacatccagactacctcgttccaatgaataaaaatgttgaaatagaaacggtggaacatttagtaggtggggagccaatgaaggttccgtcttgcagctatgtagatcgtggtttagcttaccgtataattaatgagtttactaccactaaatcaatgccgatttttatagaatgggtagatttgtatgaaatagactttgaccatggattttga

SEQ ID NO: 3154 - DNA, 369 bp, Bacillus licheniformis
ttgattgccaagcacaggggatacgattcttatatggaagacccttttttggatcatgaagtgaaaaacgcggatttgaaaggggcggaaattgtctcggggctcaagctggaaatagataaaatcaccgtaagcatcagtgctaccgttcattggacaattgtacgctggacgattatattgataaaatatctaaagagcaaacaactaggcaaaacaccatcgactaaaagtagaactcattttgatgtaaattcaactgtcatattagaatcgcaaaaggccactatatttttaagggaagtacagtgggtcccgctcaaaaagagtacacctaaaactcttaggacatgctcaactaactcatgc

SEQ ID NO: 3155 - DNA, 510 bp, Bacillus licheniformis
atgaataatatatttttggacaatttgcaaaataaagttaaagtaggctttgttttaacagttgccgaaagagtattttctgtaatcagcaaagatgatgaaaggcatccggaaggaagagaagcattggacaaatgttggttatgggttgaatctcatgccgttactggtgatgacttatacgagctaattgataacgcagactttacaggaatttcagaatttgctgaggaagaagaagactcgaatattgccaggctgtggtcgctactagttgatgctgtcgcttatacttcttgggaagcttataaaaaagaaaaagtaaaacatttgccacaagcgttagagggtataaataaagatagcattaccatctttttaaatagtacggtggaaactggttttatcacatcgaaagaggttgaaaagataagaaagggcattgaggtttatcagagtgcaaaagaggagatccccacaaatagagaagcgtttataaagttattttaa

SEQ ID NO: 3156 - DNA, 335 bp, Bacillus licheniformis
gtgtgggagcatgttaagtcattagaaactgaaaatattgcagaaaagatatacgatttagatttagctactcagcaagatgaattatacgagtatttcggtgactatgaaaattactctgaacattttcttccgtctgattatgtagatattcatgaggagattgaaggagacctcacaatgtgtgctttaaattggttggtcaatggaaaaacaaataatttttatgaaaaggtttttgagttatataaagaaggcggatggccttgcggttggaagggaacatatcctaaaggggaatttattgtgtttgtcccatctaacagcaatgaata

SEQ ID NO: 3157 - DNA, 510 bp, Bacillus licheniformis
atgtttcaagaatgggaagaattgaatgatgatttaaaatctgcatattatttaggactttgtgaagcaatagttcctacattaaaacaatcaaatgatttcaattttataaaagaagcattagatgcctgctggaagtggcttgaacacaagaatatagaagcagacgatctttatacttacctggaaaatttagatgacacagggattttaactttaatgcagcttgaatcaaatgaagatgatctagatgcttggatatgtattgctgatgcaatatcttatacaatttacaaagcatataaatatcagaaagatgagtatttacctgaaaccatcgaatctattgattcttacgagttatttgaggaatttcatagtcactttagtttattatctaaaaatccaggtcaaaaagaaaaagcttttttgaagtttttgaaaaaagagggggagaaaaaaatttccagggagagcattcaagattttttacttaatagtgtagaataa

SEQ ID NO: 3158 - DNA, 2010 bp, Bacillus licheniformis
atgaaagtatttgaagcgcattctttaattgaagcagcgaataaccgcaagaaacaatacgaaacctttgaggatcaactgcaaacgctcaaaaaagcgtttctcggagtcgccgatttaggtgatgattttcaggggaaaggtgcggataacattaaagacttctacaagggacaggccgagatcgttgacagctggttaaagcttgttgaagcgcagattgctttttttaatggtgtatcaggtgacataaaagacaaaaagctgtccgattcttatgtggaagtctcttttttggatcatgaactgaaaaacgctgatttgaaagcgacggaaatcgtctcggggctcaagctggaaatggataaaatcatcgcaagcatcagcgatatcgttgatttggacaattggacgcttgacgattatattgataaaatgtctaaagcgcaaacaactcggcaaaacaccatcgacgctgtgaataaactggatgaatcgctcaagaccgaatacacaaacttacaagcgctcgacagcgccgtgctcggcaaatattccgggctgatggaagctacaagtcatggaaaaaccgcctcaccgatgtattttagcttgaaatcgttccactcaagcgagatctataaaaatacgatagaagtcgaaaatcaagccgccaattatattgaattcaaaaatgaacaggcagaagcgcgcaggcttcaagaaaaacaagaagaagaagcgaacaagccttgggatttaaaagcgcttgacgctgccggaacatttgtcggagaagtcagcgggtattatgattataagagagccgctgaaggcgtcgacccggtcacaggagaaaagctgacagacggccagcgtgtcgccgccggagcaatggcggcagcaggatttattccgatcgtagggtgggcaggccgagccttcaaaggcggaaaagccatttataaaacaggaaaaggactcatcgccgctgatcacgcgcttgacgcctacaaagcctcaaaaacgttgaacgtcttgaaaatgacggaaatgggcgcctacggccttgtcgcttcaaatgggttctcagaagccgtcacgggcaaggacatgtttggaaacaaagtttctgaagagaggcggaaacaaggcctgatcgaagccaccttgagcctcgtcggtgcaggtgctgtcgcaaaaacggcaaaccacggcgctcaaacattggccaaaacggccggcaaaaacattccgctcgccaaatcgccaaaagcagctctggtgcaaaaaggaaacaacatccttgaaaaggtgaaatccttccaagtcccgacaaacgtccgcgtctacgtcgaacagcctgcctccgcaacaggccaccgcatcggcaccccaattgtccgcgtgaatgttgaaaaaacgccggtgaaagagcttggaattgtgaagatggtgagtggtggggggaacgtcagtaagggagccaggactggtagtaaaatagatgttggaaaagctgatttaggtgttctgcgccaaaaatggaatgttcctaaaactgacactgttgcggttggaaagacagatgtggaaggtttggaaaatttagtatttgagggtggatcccctaaagttagaaaagaagccgggcttcccgatttagactcagtaatgccagatagacctataaaatctccaggaaaaatcgcaagtgcaacaagacatgctgaagaaggcgtgttaaatgattttataagcaaagtagaagctttaggaaaaaatcctgctgaaataacaggaacattaaaaattcaccaatctaatcctaaaggggtttgtccaacctgtattcaaggactaaataatccgaatgtaccagctggagtatttaagcaatttagcgagatgtttcctaatttgacgatagaagtaacttctgagactattcaaggaatcaagccaaacggaagattgaatttagttattaaaaatggtgaatatatttaa

SEQ ID NO: 3159 - DNA, 264 bp, Bacillus licheniformis
atgacgacaatcaagctgaaacatgaaacggtcatcaaaaagctggaggccgtaagagcggcgattgatgccctagacctgccaaaccctccgaaagctgcagggaaaaataaattgacatatacgacaaagtgccacgaacgcgagcagaacattcatcagatggtggccgattacaaaaaagccgtacacaaaaacataaaggatacgaaggaaaatgtcgatttgctgaaagagcaggacaaagcaatcgccagaaaatag

SEQ ID NO: 3160 - DNA, 435 bp, Bacillus licheniformis
atgagtcatgcgagcacattgaatcatatccacagcacgattaaccaaaagctggccgatgtagaaaggcggattgaacgagttaaaacagcaaaaaaggagattgagaaagaacacgaaaccgggattgtcgagatcaggcaaatcttgcaccctcatctgaacagccactggacaggggacttcgccaacgattttgatggcgaacgggatgaggctcatacatctatgtacaacatcgtgaacggaaagtacgaaggctatatttcccagctggagagaaaaatttttgcgctcgaagttgaaaagcacagccttgaattggcgggagcggcagctaaagaggcggatcatttgctttctctgggggaaaaagcggttgatcagttgagcgataaaatccgctcaatcaaaaacagttggagctggttttaa

SEQ ID NO: 3161 - DNA, 360 bp, Bacillus licheniformis
atgaaccgcaatccattgataccatttttgttaatcgccattatgggcataggactggtttttatcttatctataaaaggcctttatgacgcaaaagaaattgcaggcgaagggaataaaacagctcaagaagacaaagccgatgcttcgcctgaagaaatttacaaagcgaactgtgtaacctgccacggcgagaattatgaaggtgtgtcaggccctaaactgaaaggcgtcggggaccggatggatacaggtgcgattaaagaaaagattgaaaaaggcggcaacggaatgccgggaggactggtcccggcggaaaagcttgatgatatggccaaatgggtgtcagagattaaatag

SEQ ID NO: 3162 - DNA, 150 bp, Bacillus licheniformis
atggacgatgaagcgattgtttatttctcatttaaaaaccagtttttgaatacggttacaacaaccattataaagggcttttccttcgatctcaaggttataatgactcaaaatacacttttggatatttgcaaattcgaaagaaattaa

SEQ ID NO: 3163 - DNA, 1122 bp, Bacillus licheniformis
atggctgataaacaagctcacgagaccgaaactgaattcacatttgaacaggtgagggatcaattaacagaagccggcaaaaagcgcggagtgctcacatatgaagaaattgcagagcgcatgtccagcttcgatatcgaatcagaccaaatggatgagtattatgaatttttaggagaacaaggcgttgaattaattagcgagaacgaagaaactgaggatcctaatattcaacagctggccaaggccgaagaagaatttgaccttaacgatttaagcgtgcctccgggcgttaagataaacgaccctgtccgcatgtacctgaaagaaatcggacgggtaaaccttttgtctgcaaaagaagaaatcgaatacgcaaaaaaaatcgaggaaggcgacgaagagtcgaagcgccgtctcgctgaagccaacttgagacttgtcgtcagcatcgcaaaacggtatgtcggccgcggaatgcttttccttgaccttattcaggaaggaaacatgggcctgatgaaggcggtggaaaagtttgactaccgcaaaggatataagttcagcacatacgcgacatggtggatcagacaggcgattacaagggcgattgccgaccaggcgagaacgatcaggattcctgttcatatggttgaaaccatcaacaagctgattcgtgttcaaaggcagctccttcaggatctcggccgcgagccaacgcctgaagagattgcggaagatatggatctgacgcctgagaaagtccgtgaaatcctaaagatcgcccaggaaccggtttcactcgagactccgatcggtgaagaggacgattcacatctgggagacttcattgaggatcaggaagcgacttctccatcagatcatgcagcatatgaattgctgaaagaacagcttgaagatgtgctggatacattgacagaccgtgaagaaaatgtgctccgccttcgcttcggccttgatgatggtcgtacaagaacattagaagaagttggtaaggtgttcggggtaacaagagaacgaattcgtcaaatagaagctaaagcacttcgtaaattaagacatccaagcagaagcaaacgcttgaaagattttctcgaataa

SEQ ID NO: 3164 - DNA, 1824 bp, Bacillus licheniformis
atgggcaatcgtataccagacgaaattgtagaacaggtgcagaaatcagctgatatcgtagaagttatcggagagtacgtccagttaagaaaacaggggcgtaattattttgggctttgtccttttcatggtgagaacacaccatctttttccgtttctggagaaaaacagatttttcattgttttggctgcggagcgggagggaacgttttttcatttttaagacaaatggaaggctattcatttaccgaggctgtctctcacctggcggacaaatatcaaatagatctgccggagcaggtcgcagctgtatcagcatacagcacaggcagttcggatgaacagaaaatggcggaagctcatgatctgttaaagaaattttatcatcatttgctcgtcaatacaaaggaaggccaggcagcgctcgattatttgcttgaaagaggctttaagatggagcagatcgagcagtttgaaatcggatgcgcgcttgactcgtgggatttcatcacgaagtttttggaacggagaggttttgatcttgcgctgatggaaagagctggactcatcatcagacgcgagaacggcgacggatattttgaccgtttcagaaacaggattatgtttccgattcatgatcatcacggcacaacggtcgctttttccggaaggacgttcaccggggagcagccaaaatacatgaacagcccggaaacgccgctttttcgaaaaagcaagcttctctatcatttccatcaggcccgccttcacattcggaaagaagagagagccgtcctttttgaaggatttgccgatgtcatttcagccgtcacctccggtgtgaaagaatcgatcgccacgatgggtacatcgctgacggaagaacatgcgaagatcatcaggcgaaatgtcggagaggtcatactgtgctatgactcggatcatgccggttatgaagccacgctgaaagcggcggagattcttcagaaaaaaggctgcaacgtcaaggtggccatgatacctgacgggctggatcccgatgactacatcaaaaaattcggcagcgagaaattcaaaaatgatgtaataggggccagcgttacgatgatgacgtttaaaatgaactatttccgcaagggcagaaacctgtctgatgaaggagaccgtttagcctatatcaacgatgtactgaaggaagtcagccttctcagcggtcctttggaacaggaaatatacatcaaacagctggcaaatgaattttcaatctcatttgaatccttgaaggatcagctttccgtatttgaaaagcaggctgcaagccgcagcagggaaagcagccgccaggactctaaagagcggcaggcggccgtatcgcgcgcccctcggagaaagacggggcttcggccggctcatgagaatgcggagcggatgctcctggcccacatgattcatgaccgggacgtcattcgaaaggttttggaacgggtgggctttgaattcaaccttgatcagcaccgagcgattgccgcttatttgtacgccatgtatgaagaaggagcggacatttccatccaggagctctttaagagagtcgaggatcaggaacttggccagcttctgacagatatcttaatgcttcaggtgaacgaagaattaagtgaagcggaattatctgattatgtaaaaaaagtgttgaattatcgaaattggtcaatgataaaagaaaaagaagctgcaagggcggaagccgagaggcaaaaagactttatcaaagcggcgactttggcgcaggaaattgttaagttgaaccgttcgctgaaataa

SEQ ID NO: 3165 - DNA, 492 bp, Bacillus licheniformis
atggagggatggagaattagtcttcttgaaaaagaaaggacgatttttgtcgatgcagacgcatgcccggtgaaagatgaagtgctcaaaacagcggcggatttcgacgtaaaggtggtattcgtggcttcattcgagcattttcaaatcacaaggaaagaagaagagaattggacatatgtcgatccgcacaaagaagcagcggatctgtacattgccaaccatgttcgacctggtgatgtcgtcgtcacacaagatatcgggctggcatcgcttttgcttggcaaaaaggtctatgtgatgtcggagagaggctatcttttcgaagagaactccatcgatcatgctcttttccgccgtcacgtcgcacaaaaattgagaagaagcggacgttacacgaaaggcccgaaaaaactggtcaaggaagaccgggagcgatttgtcaaagagctgcaaaaaatcttgtcgaaaattgaaggatttacgtactaa

SEQ ID NO: 3166 - DNA, 813 bp, Bacillus licheniformis
atgagtaatcggacgatttatgttgtatcagactctgtcggcgagaccgctgagctcgtagtcaaagcggctatcagccagtttaacggttcatccgagcagacaaatatcaggcggattccttatgtcgaagaccgcggaacaataaaagaagtgatctcgctggcagaagcggacggcggcatcatctgttttacgcttgttgtcccggagattcgtgaatttttaatcgccgaagccgaaaaggcgaatgtcgtgtattacgatatcatcggcccgctgattgagaaaatggagtcggtctacggcttcagtgcgaaatatgagccgggcagagtccgacagctggacgaagattattttaagaaggtagaggccatcgaatttgcggttaaatatgacgacggcagagatccaaggggcatcttaaaagcggatatcgtgctgatcggcgtgtcgagaacgtccaaaactccgttatcccaatacttggcgcataaacggttaaaagtggcaaacgttccgatcgttcccgaggtggaccctcccgaagagctctttaccgttgatccggctaaatgcatcgggttaaaaatcagcccggataaactgaaccatatccgcaaggagcgcctgaaatcgctcggcctcaacgacaaagccatttacgctaatatcaaccgcatcaaagaagagcttgaattctttgaaaagatcgtcggccgcattggctgcaatgtcgtagacgtatcaaataaagcggtggaggaaacggccaacattattcacaacatgatgacaaaaagggtctaa

SEQ ID NO: 3167 - DNA, 693 bp, Bacillus licheniformis
atgttatcgacttttatacataacgaacgaattgtgagcttcggcttaaaggtggtgagtacgatcgaactaaataaacgtcaggagcatattttgcagattgtcaaagagaacgggccgattaccggagaacatatcgcggaaaagctgaatctgacgagggctacccttcgtccggatttggcaatattgacgatgtcgggatttttggaagcaaggccgcgggtcggttatttctacacgggaaagacgggcacgcagctcttggctgataagctgaaaaaactgcaggtgaaagacttccagtccattccggtggtcattcatgaaaatgtctccgtttatgatgcgatttgcacgatgtttttagaggacgtaggaacgctttttgtcgttgatgataatgccatcttagtcggtgtactttcacgaaaagacttgctcagagccagcatcggcaaacaggagctcccttcaatacccgtccatatcattatgacgagaatgccgaacattacgctttgcaggcgcgacgatttcattttggacattgccaagatgctcatcgaaaaacaaattgacgcactgcctgttgtaaaagatacagaaaaaggctatgaagttgtgggaagaattacgaaaacgaacatgacaaaaattttagtcggcttatctgaaaatgaaatcatgtag

SEQ ID NO: 3168 - DNA, 2040 bp, Bacillus licheniformis
atgagtaatcaagatttgcttttagaaatcggattagaagaaatgccggcgcgcttcatgcatgacagcatgactcagctgggtgagaagctggaaagctggctcaaggaaaaaaatattgcctttggttccgtcaagctgtataactcccctagaagactggccgttcttgtcgagaacgtggcggagaagcaggatgatgtgaaagaagaagcgaaaggaccggcaaagaaaatcgcccttgacgaaaacggcgaatggacaaaggcggccatcggcttttcacgggggcaaggagcaagtccggaagatttgtattttaaagacatcaaaggaacggaatatgtatttgtgcaaaaattccaaaaaggccaggatacgttttcattgcttcctgagctccgcgatttggtgacaagcctccactttccgaaaaacatgcgctggggcagcgaagatttaaaatatatcaggccgattaaatggatcgtcgcgctgttcggaagtgaagtcgttccgttttcagtcgctcatgtcgaaaccggacgcacaacgcagggacaccgcttcctcggaaaagcagccgacttgagcgcaccttctgaatacgaagcgacactggaaagccagtttgtgattgccgatccggccaaacggaagcagctgatcgttaagcagcttgacgaactggctgctgaaaagtcctgggacattccgagagacgaggatctgctggatgaggtcaaccatctggttgaatatccaacggtactgttcggttcttacgaagaggaatttctcgcaattcctgaagaggtgctcgtgacaacaatgaaagagcatcagcgttatttccctgtcaaagatgaaaacggcagcttgcttccttactttgtgaccgtccgcaacggagacagccgcgcccttgaaaacgtggcgagagggaatgaaaaagtgctgagagcaaggctttcagacgcttccttcttctataaagaagatcaaaaattaaacattgacgagaatgtgagaaagctcgaaaagatcgttttccatgaagaactggggtcgctcggagataaagtgagacgcactgaggcgcttgctgaacggatcgctgaagtcatcggtgccgatcaagagacggtgcagctgatcaagcgcgctgcacacatttcaaaattcgaccttgtgacacacatggtttacgaatttcctgagctgcagggcatcatgggtgaaaaatatgcgcggatgctcggtgagaaagaagaagttgcgctcgcagtcaatgagcactatatgccgagacaagccggaggacaaacgccttcatcaatcgccggcgccgtcgtcgcattggcggacaaactcgatacggtcgcttcattcttcaaaatcggcgtcattccgacaggatctcaggatccgtatggactgagaagacaggcgagcggcatcgtccaaatcctgcttgaccggaactggggcatttcattcaaagaactggctgcgtttgccggacaggaagcaaacagcgaactgctcgaattctttaaacagcgcctcaaatatgtattaacagcggaaaacatccgatacgacgtcgtggatgccgtgctcgaaagcacgaaccttgagccgtattcggctgtcaaaaaagccgccgtccttgaatcggctgcagccaaaccggaatttaaagaaacggctgaagcgctggcaagggttatttcgatcagcaaaaagagcgaaacgagcgccattgacgcttcactgtttgaaaaccctcaagaagaggagcttttcaaagcttatgaggcgtgcaggcagcaaatagagaccctttaccaagcaaaagattatgagggcgccttcagtgagctgtccaagctgaaagagccgattgaagcgtattttgatcatacgatggtacatgccgaagatgaaagattaaaagcaaaccgcctggcgcaaatggcaagcttggcggagctgatccgatcttttgcaaacatcaatgccatcattgtaaaataa

SEQ ID NO: 3169 - DNA, 888 bp, Bacillus licheniformis
ttgaatattcaagaaatgattctgaccctgcaaaagcattggtccaatgaaggatgcgtacttttgcagtcgtatgatgtagagaagggtgcaggcacgatgagcccatatacatttttgcggagccttgggcctgagccttggaaagtcgcttatgtggagccgtcaaggcgccctgcggacggaagatacggtgacaacccgaacaggctttatcagcaccatcaatttcaggtgatcattaagccgtctccagacaacattcaagagctttatttagattcattaaaagcccttggaatcgaccctctggagcatgatatccgctttgtcgaggataactgggaaaatccgtcgctcggctgcgccgggcttggctgggaagtatggcttgacggcatggaaattacccagttcacctattttcagcaggtcggcgggcttgagtgcaaaccggtttccgtggaaatcacatacggtatcgaacgccttgcttcttatatccaagataaagaaaacgtctttgatcttgaatggacgaacggctatacgataaaagacctgttcaagatggctgaatacgagcattccgtctatacgtttgagacatctgacgtcgacatgctgttcgaattgtttgcaacgtacgaaaaagaagcaaatcgccagatggatcagggacttgtccatcctgcatatgattatgttttgaaatgctcgcatacgttcaacttgcttgacgcaaaaggggcgatttccgtcacagagcgcacaggatatatcgcaagggtgagaaacctggccagaaaagtggcgaaaacgtattatgatgaacgcgaaaagttgggtttcccaatgctgaaggaggaagaggcttcacatgagtaa

SEQ ID NO: 3170 - DNA, 771 bp, Bacillus licheniformis
atgctgacgaaatgtgaaggtatcgtccttcgtacaaacgactatggtgaaacaaataagatcattacgctattgacgagagaacacgggaaaatcggtgtgctggcaaggggcgccaaaaagccgaacagccgcttgtcagcgatttcccagccgttcctttatgcatcttttttattccgcaaatcatccggcctcggcacattggagcagggcgagatgatcgaaagcatgaggaatatccgcgaggatctgtttttaacagcttacgcggcctacatcgctgaattaatcgacaagggaacggaggaaaagaaaccgaatccgtttttatttgagctgctgcttcagtcaatgaggaggctgaatgacggtacagatcccgacattatcgccaacctcatcgaagtcaaaatgctcagcgtgatggggctgtatccggagctggatgaatgtgtgcactgcaaaagcaaagacggcacatttcatttttcgatccgcgacaacggctttatctgccaccgctgttttgcgaaagatccatacaggataccgctgtctcccgcatccgccaggctgttgagactgtttttttattttgacctgtcaaggctcggaaatgtctcggtcaaacaggagacgaaggatgagctgaaaagggttattcagacgtactatgacgagtactcagggatctacctgaaatcgcggcgcttcatggaacaaatggacaatatgaaaaagatgctgggcgatgaaaacaaaagttga

SEQ ID NO: 3171 - DNA, 144 bp, Bacillus licheniformis
atgttgaattttacttggaatgtattttcacaaacaggaagcgttgacacgtacctcctttttaaagaattggaaaaggagaacctggaaagacccgaagtacttgaagaagagctagcgcaaattgactttccaattttgtga

SEQ ID NO: 3172 - DNA, 906 bp, Bacillus licheniformis
atgacacaggaaagctttaaatcaggatttgtctcgattatcggacgaccaaacgtaggaaaatctacttttttgaatcgcgtaatcggccaaaaaatcgccatcatgagcgacaaaccgcaaacaacaagaaacaaagtgcaaggtgtgctgacaaccgatacatcccagacgatttttatcgatacgcccggcattcataaaccgaagcataaattgggcgattttatgatgaaggtggcgcacaacactttaaaggaagtcgacttgatcttgttcatgatcaatgcggaggaaggctacggaaaaggcgacgaatttatcattgagcgattaaaaggagtcaagacgccggtatttttgatcgtcaacaaaattgaccggattcatccggatgagcttcttgtgctgatcgatgagtacagaaccaggtatccgtttcaggaaatcgttccgatctccgcccttgagggaaataatatcgatacgcttttaaagcaaattgaggattatttgccggaaggtccgcagttttacccgagtgaccaggtgaccgatcatccggagcgatttatcatttctgagctgattcgggaaaaagtgctgcatctgacaagggaagagatccctcacagcattgcggtctcgatcgagtccattcaagaacgggaaaacggttctgtgtatgtgagcgcgaccatcgtcgtcgagcgagattcgcaaaaagggatcgtcatcggaaaaagaggcagcctgcttaaagaaatcggcaagcgggcaagaaccgatatcgaggcgctgctcgggtcatcggtgtttttagagctgtgggttaaagtgcagaaagactggcgcaacaagatgtctcagcttcgtgattttggatttagagaagacgagtattaa

SEQ ID NO: 3173 - DNA, 411 bp, Bacillus licheniformis
ttgactaaacaagaattgattgcagaagctttaaaagcaagggaatttgcatatgttccgtattcgaaattcaaagtcggcgctgcacttttaaccgaagacggcaaggtgtacaaaggctgcaacattgaaaatgctgcatacagcctgtgcaactgcgccgagcggacagcgctgttcaaggcttattcagaaggggaaaaatcctttaagatgcttgccgttgctgcggatacgccgggtccggtgtcgccgtgcggcgcctgcagacaggtgatttccgaactttgttcgccaaacatgcctgtcatcttaaccaatctgaatggccaagtcaaagaaatgacggttcaagaattactgccaggagcattttcatcggaggacttacatgacacaggaaagctttaa

SEQ ID NO: 3174 - DNA, 381 bp, Bacillus licheniformis
atgggctctcaagatcctcataaacaaaacgaatggcgccgtctgaaaatgagtttttcaaacgcctttacaggaattatcaagacgttcatatcagagcgcaattttagaattcactgcggagccgccatcctcgtgatcgcctgcggctttttcttcaggctgacgctgatcgaatggaccgtcatcttgatcctgatcggcggaatgctcgccttggagctgatgaatacggctgttgagcatacggtcgacctcttcacaaaagagaaccacccgcttgcaaaagctgcaaaggacgcggcagccggggcggtttgcgtgtttgcagccgtttcgtgtatgattgggttacttatctttttgtcaaaattgttttga

SEQ ID NO: 3175 - DNA, 477 bp, Bacillus licheniformis
atgagtttaattctagatatcacagacgagaccggacgcgtccctgaagaccggcttgctgaaattgaaaagcttcttcaattcgcagcggcggaggaaggcgtcgcagacggcgccgaagtctcggttacgatcgtcaacaatgaagagatacaaaaaatcaacaaagagtacagaggcaaagattacccgactgacgtcatttcatttgccctcgaagaagacggcgaaggagaggttgaaattatcggcgctgatatgccgcccgttctcggagatatcatcatcagcgtcgataaagcccgggaacaggccgaagaatacggacattcactgatgagggagctgggttttctgacggttcacggctttttgcacctcctcggctatgaccatatgacagaggaagaagaaaaagagatgttcactaagcaaaaggaaattttgaatcgatatgggctctcaagatcctcataa

SEQ ID NO: 3176 - DNA, 2151 bp, Bacillus licheniformis
ttgaaaaagaaaaaaagaggcggaaagtttcggcttatccgcttgaataacgggggcttccttcccgtcattctttatgcggctttatccgcgctgatgttcatcctgctgtttttccatgtgaggccggagtccctcgacctcgatttattttcgatcagcgagaatacgatctatgcgccggcgacagttgaagaccaaaaggcaacggctaataaaaagcaggaagcgagagaggaagttcccgaccagtacactttgaaaaaagagtactctgacaacagggtcgaccttgtctcatcgattttcgacatcattaaagaagtgaaaaaagaaagcgcagaacaagagaaaaaagacaagcaggccccatctgaaaaagaccagatcaaatctgttgaagaaaagctgacttccgatgtgacggactcgctgtcacaggattcagtcaaacacctgctgagggccagcgacggagagctttccatgacgcaggattcggtcatcaccgccgtcaatgacgtgatgagcaaagaaatccgcgcaggaaagctcgatgaagcgaaagaacatgtaacgaaagaactgaagggcaattcgataccttcaaaattaaaaaacgccgctgatgaaatcggacgctttgcgatcattcccaattacgtatacgatcctgacaagacggagcagaagcgtcaagaagcggctgacagcgtacagcaggtacagatcaagcaggggcagatactcgttgaggaaaatcagctgatcgacagggaagtctatcgaaagctcgaattgacagggctcttgagcggagccaacatcttcaaacctgtcggcggactgctgcttttaatcgcgcttttcatctcagctttggtttactatttcgaaaagcaatacagcagccggattccgaaaaacaagtcgctcatgctgttttcgttgatcacagggatcgttttaatcgtcatggaagtgatcagcctgtttcagcagcttgaaatcggccatatcggctatctcgtgccgattgcgatgggcgtgatgctcattaaactgctgatcaatgaaaggctggcgatcctgtcgagcatgattctttccatttgcggaagcatgatgtttaaccagggtgtgacaggcacgttcaactatggaatcggaacgtatttcttaatcagctcgatggcgggtatactgtttttagggaagcataacgcgagggcgaaaattctccaggccggtttatttgtctctctgatcaacatcgttgttctgtttaccctgcagctgattcaaaacacggcgcaaaccgggcttgagatgggtacatatcttgtcatgggggcggtgtccggcatcggatcgtcagttcttgttctcggactcatgccgttttttgaaagcggatttggcatcctgtccacgatgaagcttctcgagctttcaaatccgaatcatccgctgctccgcaaaattctgacggaaacaccgggcacataccatcacagcgttatggtcgcgaacttatctgaggcggcatgcgaagcggtcggagcaaacgggctgctggcaagggtcggcgcctattaccatgatatcggcaagacaaagcggccccaatattttatagaaaaccaaatgaatattgataacccgcatgacaagctttctccgcagctgagcaaaaacattatcattgcccatgtgacggacggcgccgatatgctgagggatcataaaatgccgaaggagcttgtcgacatagccgaacagcatcacggcacatcgctgctcaagtttttttactataaggcgaaagaaaaaggcgatcagacgactgaagaagagttccgctatcccggtccgaagccccagacaaaagaggcggcgatcatctcggtggccgacagcgtcgaagcggccgtccgctcaatgcataaccctaatcccgaaaggattgaaaagctggtgcgcgggatcatagcggataagctgcaggacgggcagtttgacgaatgcgatttgactttaaaagagctcaatactatcgcgaagacgctctgcgaaacgctgaaaggcatttttcattcccggatagaatatccggaagctaatcctaaacagaaggtgaaacatacatga

SEQ ID NO: 3177 - DNA, 960 bp, Bacillus licheniformis
atgacagaacacttacttgcgattcatcagcaactggaaagtccgaatgaggctcaagcgctgtttgggaaccaggattcccatttgaagttgatggaggaagagctgaacatttcaattgtcacgcgcggagaaaccgtgtatgtgacaggagatgaagaaacgtttgaaatcgcggacagcctgcttgcctctctcctaaatctgatccgcaaaggaatcgagatatccgaacgcgatgtcttgtatgcgatcaagatggcgaaaaagcagaagcttgagttttttgaaagcatgtatgaagaggaaattacgaaaaacgccaaaggaaaaccgatcagagtcaaaaccatcggtcaaagagaatacatcgccgccatgaaaaggcacgacttaatcttcggcatcggcccagcaggaacggggaaaacctatttggctgtcgtaaaggccgttcatgaactgaaaaacggacgcatcaaaaagatcattttgacaagaccagctgttgaagcaggggaaagcctcggatttttaccgggggatttaaaggagaaagtcgacccttatttaaggccgctgtacgatgcgctccatgatgtgctcggaacggaccatacggcacggctgcttgaaagaggaacgattgaaatcgcgccgcttgcttacatgagggggcggacgcttgacgacgcatttgtgattttggatgaagcgcagaatacgacaccggcacaaatgaaaatgtttttgacgagattgggttttggatctaaaatggtcattacaggcgacattacgcaaatcgatttgccaaagggcgtcacatcagggcttgccgttgcaaaaaagatgctccttgatatcgagggcatttcaattgttgaactggatcagacggacgtggtcagacacccgcttgtcgcccgtattattgaagcatacgaaaagtcaaaataa

SEQ ID NO: 3178 - DNA, 1197 bp, Bacillus licheniformis
gtgaagaataaatggctttcttttttttcaggaaagatccagcttaagataacgggaaaagggatcgaacggttattaaatgaatgcaccaggcgcaacatcccgatgtttaatgtaaagaaaaagaaagacgccgtctttctttatattccgctttctgatgtacatgccttccggaaggtcatcagaggcttcgactgcaagtgcaggttcatcaaacgaaaagggtttcctttcctcgtgcagaagtctaaacggaatagcggcttcacttttggagttgctgcattttttatcatcatgttcctattgtccaacatgctttggaaaattgatattacaggagccaatccggagacagaacatcaaatcagacagcaattggatcaaatcggcgtcaaaaaaggccgctttcagttttcaatgctgaccccggaaaaaattcagcaggcgctcacaaagcgggtcgaaaacatcacttgggtgggcattgagttaaacggcaccgcccttcacatgaaagtcgttgaaaagaatgaacctgacaaagaaaaatatatcggtccgaggcacatcgtcgccaaaaaaggggcgaccatctcgaaaatgttcgtggaaaaaggcgagccgctcgtcacggtgaaccagcacgttgaaaaagggcaaatgctcgtttccgggctgatcggaagcgaagaggaaaagcaaaaagtcggagcaaaagggaaaatctacggtgaaacctggtacaagtcaacagtaacggttcctcttgagacatcatttgacgtttttacgggtaaagtaaggacaagtcacaagctatccctcggatcattttccgtgccgatctggggcttttcatttaaaaaagaagacttctcgcgcccgaagacggagaccgaaaaacactcgctgcattttatgaattttaagcttcctgtcgcttatgaaaaggagcatatgagggagagcgaacaaatcaaaagggtgtactcgaaaaaagaagcagttcttgaaggaatcgaaatgggaaaaagagacatcaggaaaaaaatcggcagcgacgggaacattatcagtgaaaaagttttgcacgaaacgagcgagaatggtaaagttaaattgatcatcctttaccaggttattgaagacattgttcaaacaacaccaattgttcaggagactaaagaatga

SEQ ID NO: 3179 - DNA, 282 bp, Bacillus licheniformis
atggcgcaaagaaaaaaccgcatcaaagcgtggctgacaagaacactggaaattccccctgatgtcatgatggatcttccgagaattacgatgataggaagacttcacatatatattgaaaaccacagagggcttttgcttttcagcgatacggaagtaaggctgatgctcaaacaggggcagtgcatcattcaaggcaaagactttgtcatcaaaacgattttgcctgaggaaattctgcttgaaggcacgattgagcttgtccgctatatcgattcataa

SEQ ID NO: 3180 - DNA, 450 bp, Bacillus licheniformis
ttgcttgatatcctgttcgacaatccgattatcatggcggccatcatcgcagccatttccttcatattcaacaagctcggaaaaaacgatgaaaatgaagaagcgaagcgaaaaccggcgcctgaacagcagaggacgcagacgccgaagccgaaacagacggcgcagcaccgtcctgcaaaaaataaaaaccagcggccggcagcgacagctgcaaacagcgcagatatggaagcagagctccgcagaatcaaagaagatgccgagcgttccatgccggccgttgaacggaccattaaaaagcagagcagccgggtgatcaaccggaagcaagagctgctcgacatgaataaaaaaacaatagttcaaggcattgtcctcagtgaagtattcggccctccgcggtcgagaaagccgcattacacaatgaggcgccggcctaaaatttaa

SEQ ID NO: 3181 - DNA, 993 bp, Bacillus licheniformis
atggatccgtcaacactgtttcttttacttatgatcgcagccggaatcatcctactagctgtcttctttacattcgtcccggtcatgctgtggatctcggctttggccgctggtgttaaaatcagcattttcacactgatcggaatgaggctccgccgcgtcattccaaaccgcgtggtgaacccgctcatcaaagcgcacaaagcgggacttgatgttgccatcaatcagctggaaagccactatcttgcagggggtaatgttgaccgggtcgtcaacgcgcttatcgctgcccaacgtgcaaacattgaacttacattcgccagatgtgcggccatcgatttagcgggccgtgacgtgcttgaagccgttcaaatgagcgttaatccgaaagtcatcgaaacgccgtttattgccggtgtagcaatggatggtatcgaagtgaaagcaaaagcgagaatcacggttcgcgctaacatcgaccgccttgtcgggggagcgggcgaagaaacgatcattgcccgtgtcggcgaagggatcgtttcgacaatcggttcttccgataatcataaaaaagtgcttgaaaacccagatatgatttcacaaaccgtattgagcaaagggttggattcaggtacagcgtttgaaattctatcgatcgatatcgctgacgttgacatcggcaaaaacatcggagcgattctgcaaaccgaccaggctgaagccgataaaaacatcgcccaggcgaaagcggaagagcgccgcgccatggcggttgcgcaagaacaggaaatgcgcgcccgcgtcgaagaaatgcgcgccaaagtcgtcgaagccgaagccgaagtgccgcttgcaatgtctgaagctctccgcagcggaaaaatcggcgtcatggactacctcaatatgaaaaacatcgacgccgacactgacatgcgcgattctttcggaaagatgacgaaagaccaaaatgaagaggatcataaataa

SEQ ID NO: 3182 - DNA, 1320 bp, Bacillus licheniformis
ttgctgctgaaaaaatttagaatttttgttgctctggcctgcggttttgttttattcttattactaggcgttcatttgaccgtgaaagcggatggagatacagtgtatgtcattccgatcgaagaaaccgttgaaaaagggctttcaaaatttcttgagcgctcatttcaagaagcggaagatatgaatgccaaacatatcatactcgatatcaatacccccggcggagcggtcgacgcagtccttgacatggctgatacgatacataactccgacattccggtgaccgcttatgtgaatagaagggctctgtccgcaggcgcttacctcgccttgaatgcagacgatatttatatggcgcccggcggaaaaatgggagctgccgcgatcattgacacgcagggaaatgccgctgacaaaaagtcggaatcgctgtggctggctgaaatggaagacgcagccaaaaaaaacggacgtgatccgaaatacgctctcgcgatggccgatgcagacgtcgatgctaaagaagtaggggcgccgaagggcgagctgctcacattaagccctgacaaagcgctgaaagtcggctattccgaaggcacagtttcgagccttgatgatcttttgaaaaagctgaatttgaaggatgccaaaatcgagcgtgccgaggtaagctttgccgaaaaggtggccaggtttatcacgcatccggtcgtgattccgattcttctttcaatcggaagcctcgggctgattgtggagctttattctcctggttttgggatccccggctttatgggactcaccgcattgctgctctttttctacggtcatctcgtcgccgggcttgccggaatggaaacgatccttctgtttgcagcaggcattattttaatcattttagagatttttctgccgggcggaatagcagggattgccggcctgatcgcaattgttgcgagcctctttttagcttcgggaagctttaaggtcatggccgtctccattttgattgcaactgctgtttcgatagcggcatccattctattgacaagggtgttgggtaagcgtatgaaattttttaaaaaattgatcttaaccgactcgacaagcacagaaagcggatacgtgtcaaatgaaagccggcgcgatttaattggcaaaatcggcgtcacgtatacaccgctcagaccgtccggaacggtcatcatcgacgatgaacggcttgatgtcgtatctgaaggctcgttcaccgcaaaggataagaaagtgaaagtggttaaagtggaaggctcacgcattgttgtgagagaattataa

SEQ ID NO: 3183 - DNA, 447 bp, Bacillus licheniformis
atgagtcttcttgagcggctgaatcaagatatgaagctctatatgaaaaaccgtgagaaagacaaactgactgtcattcgcatggtcaaagcttcgcttcaaaacgaagcaatcaagcttaagaaagacaggctgaccgatgatgaagaactgactgttctttctcgtgaattaaaacagcgtaaagactccctccatgaattttcaaacgctaatcgttcagatttagtagataaagttcaaaaagagttagacattctggaagcttatatgcctgaacagctgacggaagaagagctgctcgacatcgtcaacgagacgatcgccgaagtcggggcttcttcaaaagcggatatgggcaaagtgatgagcgctgtcatgccgaaagtcaaaggcaaggcggacggcggtctcgtcaataagcttgtcagcaaacaactgtcttga

SEQ ID NO: 3184 - DNA, 174 bp, Bacillus licheniformis
atgtcaaaaacggtcgttagaaaaaacgaatcgcttgaagatgctcttcgtcgcttcaaacgcagtgtatcaaagacaggtactttgcaggaagcaagaaagcgtgaattttatgaaaaacctagcgtaagacgcaagaaaaagtctgaagctgcaagaaagcgcaaatactaa

SEQ ID NO: 3185 - DNA, 936 bp, Bacillus licheniformis
atgatgatcttgatcttgttcgtattattgatcgttctttttctcaaaggcatgagcatgctgagaaaaggcctgatttcgctgacatttgaaaaaatcgaaaagcggctgctgtttttcacggatcatccggtgaaagcttttttggtcagtattatatttacggggattttgcaaagcagctcggcatttatggtgatcgtcatagggtttgtctcagtaggcgctctttcatttaaacgttcgattccgctcattttagggacaaacatcgggtccactttcacaacggaatttttggcggtgaagctggaatttttgatttttgcccttttggccgcaggtgcagctcttttcattgccggaaaatccccttttcggcaagtcggcgtaagcatgatcggcttgggggttatttttttctgtatcagcggtttcagccggcttgccgtgccgttgtcacagctagactcgggcgcttatatcgtgcagcttgccgaagattcatcgctttacgctttgttcatcggcaccgttttgaccgcgatgattcattccagttcggcgtgtgtcggcatcctgatgagctttatagatcaaggtgtcgtcggattgaccgaagcgatgagcgttgttcttggctccaacatcgggacatgcattacggccgtgatggcatccttcaaaggcggagctgcagccaggcaaacagcttatgcccatgttctgtttaatgtcattggtgtagcagctgtataccctctgctctcatcaatcacaggctttatctccggactgtccgaaagccccgcccagcagattgcccatttcagcctgctgttcaacgtcgtcacgtccctattgtttttgccgctctcaaatctgtttcattcgctgatcatgtttctcattccaaacaaaaaccaggcccgataa

SEQ ID NO: 3186 - DNA, 672 bp, Bacillus licheniformis
atgacaaaacaaattgcgcgaatgatcgatcacactgcattgaagccagataccgtcaaatccgaaatcgaagcgctttgcaaagaagcgcgtgtttacggttttgcctccgtttgtgtcaacccttgctgggtgaagctttgcgccgagcttcttaaagagtcagaggtgaaagtatgtacagttatcggctttcctttaggtgcagcgtctccggaaacaaaagcctttgaaaccaggcaggcgattgcagacggtgccggtgaagttgatatggtgatcaacatcggtgcactaaaagaccgcgatacgggaacagtggaacatgacatcagggcggtgacagacgcggccgacggcaaagctcttgtaaaagtcatcatagagacgtcgcttttgacggatgaagaaaaaaggctggcttgtgaaccggccgtaaaagcaggcgccgactttgtcaaaacatcgaccggtttttccggcggcggtgcgacagtccgggatataaaactgatgcgggaagctgtcggacctgatatcggcgttaaagcttcaggtggcgtccgcgataaggaaagcgcacttgccatgattgaagccggagcgacgagaatcggagcgagcgccggcgtgtcgattgtcaaagggttaacagcggatgaagactactaa

SEQ ID NO: 3187 - DNA, 1356 bp, Bacillus licheniformis
atggcaaccgttgcatttcatacacttggctgcaaggtcaaccattatgaaacagaagcaatctggcagctttttaaagaagccggctacgaaagaaaagaatttgaaagttcggcggacgtatacgtcattaatacatgcaccgtcacaaatacgggtgataaaaagagccgccaggtgatcagacgggcgatccgccaaaatcctgacgccgtcatttgcgtgacagggtgctacgcccagacttccccggcggaaatcatggcgatcccgggcgttgatatcgtcgtcggtacacaagaccgcgaaaaaatgctcggctatattaagcagtaccaggaagaaagacagccgattaacggcgtcagcaatattatgaaagcgagagtgtttgaggagcttgatgttcctgcatttaccgacagaacgcgtgcttctttgaaaattcaagaaggctgcaacaatttctgcacattctgcatcattccgtgggcgcgcggcctgcttcgttcccgcgaccctgaggaagtcatccgccaggcgcagcagctcgttgatgccggctataaagaaatcgttttgaccggtatccataccggcggttatggagaagatatgaaagactacaactttgcgcagctgttgaaagaattggacagccgtgtgaaaggtctgaaaagaatccgtatctcttcaatcgaagcgagccaaattacagacgaagtcatcgaagtgcttgaccgctcagacaagatcgtcagacaccttcacatcccgcttcaatccggctcaaacagcgttttaaagcggatgagaagaaagtatacgatggagtttttcgccgaccggctgacaaaactcaaaaaagctcttccggggcttgcagtcacctctgatgtgattgtcggcttcccgggtgaaacggaagaagaattcatggagacgtataactttatcaaagaacacaagttttctgagctccacgtcttcccgtacagcaaacggaccggaacccctgcagcacgcatggacggccaggttgacgaaaacgtgaaaaacgaaagggttcataaactgatcgctctttcagaccagcttgcgaaagaatatgcatcagactatgaaggcgacgttctggagatcattccggaagagccgttcacggaaacgggcgaagacaacctgcttgtcggctacacggacaactatatgaaagtcgttttcgaaggttcagaagacctgatcggccagcttgttaaagtgaagatcttaaaagccggctatccgtacaacaaaggacagttcgtccgcgtcgcggaagacgacgtccgcgaaaacatccgcttatcgtcataa

SEQ ID NO: 3188 - DNA, 768 bp, Bacillus licheniformis
atgcaacgatattttatcgaacaatcaaaacaagaggtcacagccgcacccgcattctcgatcaaaggcgaagacgttcatcacattgcgactgtgatgaggatgtctcccggagatgaggtcatttgctgtgcaaaagacggccatgaagcgaaatgccggatcgagtccgtcactaaagaagaggttttattgagcgttatcgaatggacgggggaaacacgcgaactgcccgtccagatccatattgcaaacggccttccaaaaggagataagctggaatggatcattcaaaaagggacagagctcggtgcaagctcgtttattccttttcaggcatcgcgctccgttgttaaacttgatgaaaaaaaggcaaagaaaaaacgggaaaggtgggcgaaaatcgccaaggaagcggcagaacagtcccacagaaacgcgattcccgatgtggcgccggttcacacgtttcaacgtttgcttgagagccttgaggacttcgataaatgtgtcgttgcatacgaagagtcatcaaagcaaggcgagacgagccggtttcaatccgtgctcaaaagcctttctgaaggatcatccgtactcatggtgtttggtcctgaaggcggatttacagaagaggaaattgaggcgctaaaagaaaaaggtgccctcgcctgcgggctcggtccgcggatcttaagggcggaaacagctccgctgtacgcgttggcggcagtttcttatcatacagagttattaagaggtgaataa

SEQ ID NO: 3189 - DNA, 936 bp, Bacillus licheniformis
atgaaatggtccgaaatctgcattcacacgacacatgaagcggttgagcccatctcgaatattttgcatgaagctggtgcgagtggagtagtgattgaagatccgcttgatttaattaaagagcgtgagaatgtatacggagaaatctaccagctcgatcccaatgattatcctgatgaaggagtcatcatcaaagcgtatcttccgatcaacagctttttgggggagaccgtagaaggaatcaaagaaacgatcaataatctgctgctgtatgatattgaccttggacgcaacaaaatcaccatcagcgaggttaacgaagaagaatgggcgacagcatggaaaaaatattatcatcccgtgaaaatttccgagaagtttacgattgttccgacttgggaagagtacacaccggttcatacggatgaactcatcatcgagatggacccgggaatggcgttcggaacaggcacccacccgacaaccgtcctttgcatacaggcgcttgaaaggtatgtgaaagaaggggattcggtcgtggacgtcggaacgggaaccggcattttgagcattgcttcagccatgcttcgcgccaaacaggttgaaggatatgatctcgatcctgtagccgttgaaagcgcccgcttgaactccaagctcaataaagtcagcgatcatatcgagattaagcaaaataatctgcttgacggcgtcgaaggcgaaaaagacatcatcgtcgccaatatcctggccgaggtcatcttgcgctttacggatcaagcatacagcctgttgaaagacggcggctatttcatcacttcggggatcatccagcagaaaaaacaggaagtcaaagatgcactggtgaaagaaggctttacgatcgttgaggttctttcaatggaggactgggtcagcatcatcgctaaaaaataa

SEQ ID NO: 3190 - DNA, 1110 bp, Bacillus licheniformis
atgagtaagcgtgattactatgaggtgcttggggtaggtaagagcgcttctaaagatgagattaaaaaagcttaccgcaagctttctaaaaaatatcacccggacatcaacaaagaagccggagcggctgaaaaattcaaagaagtcaaagaagcctatgaaacactttctgatgaccaaaaacgggcccattacgaccagttcggccacaccgacccaaatcaaggattcggaggcgacttcggcggctttgggtttgacgatattttctcaagcattttcggaggcggcgcaaggcggagagacccgaatgccccgaggcagggtgccgatctgcagtatacgatgacactgtcatttgaagaggcagccttcggaaaagagacgacgatcgaaattccgcgtgaagaaacgtgcgaaacatgcagcggctccggcgcaaaaccgggaacaaagccggaaacatgttcacactgcggcggatcaggccagctgaacatggagcagtcaacaccgttcggaaaagttgtcaacagaagagtatgtcattactgtaatggaacgggtaagcaaatcaagcacaaatgttcaacttgcggcggcacaggaaaagtgaaaaaacgcaagaaaatcaatgtcaccatcccggcgggtgtggacgacggccagcagcttcgagtagccggacagggcgaaccggggatcaacggcggtccgtcaggtgacttattcgtcgttttccgcgtccaagagcacgaatttttcgagcgcgatggagacgatatttactgcgaaatgccgctgacatttgcacaggctgcccttggggatgaaatcgaagtgcctactcttcacggaaaagtaaaattaaaagtgccggcgggcacccagacgggcaccaagttccgcttaaaaggaaaaggcgttgccaacgtgcgcgggtacggacaaggcgatcagcacatcgttgtccgcgtcgtgacaccgacgaatttaacagaaaaccagaaaaatattctccgcgaatttgcagaagtgagcggaaatatgccggatgaacaggaaatgagttttttcgataaagtaaagcgcgcctttaaaggcgattaa

SEQ ID NO: 3191 - DNA, 1839 bp, Bacillus licheniformis
atgagcaaagtaatcggaatcgacttgggaacaacgaactcatgcgttgcagtgcttgaaggcggagagccgaaagtcatcccaaatccagaaggagcccgcacgactccttcagttgtcgcatttaaaaacggagaacgccaggtgggtgaagtggcgaaacgccagtccatcacgaacccgaacacgatcatgtcgatcaagcgccacatgggcactgactatacagttgaaattgaaggcaaaaagtacacgccgcaagaagtgtctgccatcatccttcagcatttgaaatcatatgctgaaagctatttgggcgaaaccgtgtctaaagccgtgatcacagttcctgcatacttcaacgatgcagagcgtcaagcgactaaagatgccggtaaaatcgccggacttgaagttgagcggatcatcaacgagccgactgcagctgcgcttgcctacggtctggataaaacggaagaagatcagacgatcctcgtctacgaccttggcggcggtacattcgacgtttccatccttgaattgggagacggcgtattcgaagttcgctctacagcgggtgacaaccgccttggaggagacgactttgaccaagtgatcatcgatcatctcgtctcagaattcaaaaaagaaaacgccatcgacctttctaaagacaaaatggcgcttcagcgcttaaaagatgctgctgagaaagcgaaaaaagacctttccggcgtatcttctacgcaaatttccctgccgtttatcacagcgggtgaagcaggtccgctgcaccttgaattgacactgacccgcgcgaagtttgaagagctgtcttcacacttggtagagcgcacaatgggtcctgtacgccaggctcttcaagatgcgggactttctgcaagcgaaatcgacaaagtcatccttgtcggcggatcaacacgtattcctgccgttcaggaagcgatcaaaaaagaaactggaaaagaagcgcataaaggcgtcaaccctgacgaagtcgtagcccttggtgcagcaattcaaggcggcgtcatcacaggcgatgtcaaagatgttgtccttctggacgtaactccgctgtcacttggtatcgaaacgatgggcggcgtgttcacgaagctgattgagcgcaacacgacaatcccgacaagcaagtcccaagtgttctcaacagcggccgacaaccaaacagcggttgacatccacgtgctccaaggtgagcgcccaatggctgccgacaacaaaacgctcggacgcttccagcttacagatatcccgccggctcctcgcggcgtaccgcaaatcgaagtgtcatttgacattgataaaaacggtatcgtcaacgtcagcgcgaaagatctgggcactggcaaagagcaaaacatcacgatcaaatcttcttcaggcctttctgacgacgagatcgagcgtatggtgaaagaggctgaagaaaacgccgaagcagatgcgaagaaaaaaaaagaaatcgagcttcgcaacgaagcggaccagcttgtcttcacaactgaaaaaacgctgaaagatcttgaaggcaaagccgatgaagcacaggtgaaaaaagcgaatgaagcaaaagacgcgctaaaagctgcgatcgagaaaaatgaccttgatgaaatcaaggcgaaaaaagatgagctgcaagcgatcgttcaagagctttcaatgaagctttacgaagaagccgcaaaacaggctcaggctcagcaagacggcggagctggcgctaaaaaagccgatgataatgtcgtggacgctgaatatgaagaagtaaacgacgacaaagatcaaaaataa

SEQ ID NO: 3192 - DNA, 585 bp, Bacillus licheniformis
atggcagaagaaaaacaaaacgaagagctaaacgaacaagaggaactgaacgagacagaagcggagacagccgaagctgaacaaacggctgctgaagctgatgccccggcagaagaaactcaaacagaaatgcttgaaaaacaactaaaagaacttcaagaacgtcttgaagaaaaagaaaataaacttttacgtgttcaggcggactttgaaaactacaaaagacgcgcacgccttgatctcgaggctgctgaaaagtaccgctcccagcgcatcatcagcgatttgctgccggcgcttgacaactttgagcgcgcacttcagatcgatcctgacaatgagcagacgaaaagcctgcttcaaggaatggaaatggtgcaccgtcaaattttggaggctcttaaaaatgaaggagttgaacagattccatcagtcggagagcaatttgacccgaacatgcaccaagctgttatgcaggttgaggatgaagcgtacgaatcaaacgcagtcgttgaggaactgcaaaaaggctataaacttaaggaccgggtgatccgtccttctatggtaaaagtcaatcaataa

SEQ ID NO: 3193 - DNA, 1032 bp, Bacillus licheniformis
atgttaacaaatcgtcagctgttaatcttgcaggttatcgtcaacgatttcattcgttcagctcagccggtaggatcaagaacgctttccaaaaaggaagatatcacattcagctcggcaacgatcagaaacgaaatggctgacttggaagagctcggttttatcgaaaaaacccactcgtcttcaggccggattccttctgaaaagggctatcgctattatgtcgatcatctgctttcacctggaaagctgtcaaaaacggacttaaacattattcattcgattttcaaagaaaaaatctttgaactcgaaaaagccgtgcagaagtcggcccaagtgctgtccgacctgacaaattatacatcgattgtcctcggtccgagactgagtgaaaaccatctcaaacagatccagattgtaccgattcagcccaagaaggccgttgccattctagtaacgaataccggccatgtggagaataaaacgattaatttcccggcggaggtcgatctttccgatctcgagaagctggtgaatatattaaatgaacgccttagaggcgtgccgatctcagaactgaaagacaggattttcaaagaggttgtcatcttcttgaagtcgcacattcaaaattacgatacgattttgcacgcgctcggcgcaacgctggattcatctgttcaaaccgaccggctgtttttcggcggcaagattaacatgctgaaccagcccgaatttcacgatattgacagagtgaaatcgctattgtcgctcattgagaaagaacaggagattctccggctctttcagtcgactgagtccggaattaccatcaaaatcggcaaagaaaacgactatgaagagatggaaaactgcagcctgattaccgcaacatacacggtcggctcaaaacagatcggctccattgcggtcatcggaccgacgcgcatggactactcccgcgtcgtcggcttgcttcagcacgtatcatctgacttgtcaaaagcgctgacaagtttgtatgatgggtaa

SEQ ID NO: 3194 - DNA, 1140 bp, Bacillus licheniformis
atgaaagcagcatatatccatattccgttttgcgagcacatttgccattattgcgacttcaacaagttttttattcaatctcagcccgttgatgaatatttgcgttccttagagaaggaaatggccaattcaatggaggcaaccggacatccggagctgaaaacgatctttatcgggggaggaacgccgacatcgctgtcggcagctcagctcgaacggctcctggattccattcatcgcgttttgaaaccgtccgaaagccttgctgaatttgcagtggaagccaatcccgacgatttatcagctgaaaagctggatgttttaaaagctgccggtgtagacaggctgagctttggcgtgcagacgtttgaagacgagctgctgaaaaaaatcggcagggttcacgagcaaaaagacgtactcgtttcgtttgaaagagcgagaaaggcggggtttgataatatcagccttgatctgatgttcggtctgcccggacaaaccatcggccacctcgcttcatcgctcgatacggcgcttgccctcggtgctgaacactattcggtttattcgctgatcgtcgaaccgaaaaccgttttctacaacttgatgaaaaaaggccggcttcacctgccgccgcaggatcaggaagctgaaatgtacgaactcgttatgcggaaaatggaagaagcgggcatcggccaatacgaaatcagcaactacgccaaaaaaggatatgagagcaaacataatctcacatattggaacaatgaggattatttcggttttggcgcgggcgcacacggttatatcaatggtgaaagaacggtaaatgcgggccctgtcaaacattatatcgacctgattgaacaatccggctttccttataaggaaaagcacatggtcacaaaaaatgaacagattgaagaagaaatgtttctcggtcttcgaaaaactgagggagtaaacaaagagcgctttttcgaaaaatatggaagatctgttgacgatctctttccgaaggtgctccattcgctggaagaaacagggttgattgtgaacatgaacaaaaacgtgtttctaacacataatggaaaactgttgggaaatgaagtatttcaggcattcctgggtgagttataa

SEQ ID NO: 3195 - DNA, 1839 bp, Bacillus licheniformis
gtgacagataaagaaaaacgattacaaaggcagtcgagaatccgaaatttctctattatcgcccatatcgaccacggcaagtcaacgcttgcggatcgaatcttggaaaaaacggcggcaatcactcaaagggaaatgaaagaacagctcctcgactcaatggatttggaacgtgaaagaggaatcaccattaaactgaactccgtacagctgaaatatcaggcgaaggacggagaggaatatatttttcatctgatcgataccccgggacacgtcgattttacgtatgaggtttcgagaagccttgccgcatgcgaaggcgcgattctcgtcgtcgacgccgcccagggaatcgaggcgcaaacgctggcaaacgtttaccttgcgcttgacaacgaccttgaaatcctgccggtcattaataaaatcgaccttccgagcgcagaacccgaacgcgtccgccaggaagtcgaggatgttatcggtcttgacgcttcagaagccgtccttgcttcagcaaaagcaggcatcggaattgaggaaatattggagcagatcgttgaaaaggttcccgcaccaagcggagatccggaagcgccgcttcaggcgctgatctttgactccctgtatgatgcttaccgcggggtcgtcgcctatatcagagtcgtgcaaggtaccgtaaaagccggtcaaaaaatcaagatgatggcgaccggaaaggaatttgaagtcactgaagtcggcgttttcacaccgaaggccgttccggctgacgaactgactgtcggcgacgtcggattcctgacggccgcaatcaaaaacgtcggagacactcgtgtaggggatacgattacgagcgcggaaaaccctgcacccgaagccctgccaggctacagaaagctgaatccgatggtttattgcggcctgtatccgattgatacagcgaaatacaacgacttgcgggaagcgcttgaaaaacttgagctgaacgattcagccctgcagtacgaagcggaaacgtcccaagctctcggattcggcttccgctgcggtttcttagggatgctccacatggaaatcatccaggagcggattgaacgcgaattcaacatcgatttgattacgacggctccgagcgtaatctacgacgtgtacatgacagacggtgaaaaaatcgtcgtcgataacccgtcaaacatgcctgatccgcagaagatcgaccgggtggaagaaccgttcgtcaaagcgacgatgatggtgccgaacgactttgtcggagcggtcatggaactgtgccagggcaagcgcggccagtttattgatatgcagtaccttgatgcgaaccgcgtcagcattgtctacgaaattccgcttgcggaaatcgtctacgagtttttcgatcagcttaaatcaaatacgaaaggctatgcgtcatttgattacgaactcatcggatataaaccgtccaagctcgtgaaaatggatattatgctgaacggcgaaaaaatcgatgccctttcctttatcgttcaccgcgattatgcttatgaacgaggaaaagttatcgtcgaaaagctgaaagagctcattccgcgccagcagtttgaagtgcctgtccaggcagccatcggtacaaaaattgtcgcccgttcaaccatcaaagcaatgcgcaaaaacgttttggcgaagtgctacggcggggatatttccagaaagcgcaaactgcttgaaaagcaaaaggaaggaaagcgaagaatgaaacaggtcggctctgtcgaagttccgcaggaagcctttatggcagtcctgaaaatggacgacagcggcccgaaatcataa

SEQ ID NO: 3196 - DNA, 324 bp, Bacillus licheniformis
gtggcttcttttatgggaaaatgcatattggcttgcgctgtcatgtttttcggcgttcttctcggcatgcagcaggcgaacaacggaatgattgaaatgaaagggtacgaggaccctgatttaaaagcagcgctcagcatatctgaaggggatgcgaaagaggcgtcagtcctcggccatcaaatcgatttggaggaaaaacaaaaagagctggaacagctggaagctttcaacctcttttcctcggccggccgagccctggccgattcggtcacaaacacagcccgttcattgtatgactggataaaggaaaaaacggaatag

SEQ ID NO: 3197 - DNA, 1206 bp, Bacillus licheniformis
atgagaaaaagaggcaggaatcgtcagtttgtgctggctgtaaatggaagaagcgcggttaagacagtattcttatttatcgtcagcctgctgctcgtttttattttatcaggcgtgctcacatcgctgcgtcctgagttaaggccgtcttcatcgttgtaccgggtggctgatgaactgaagggcgagacctttgggctcattttgggaatggaaaaccactactttgcatcagaattgccggaaccgaataagcgctttgagctttcccccctcgtcctgaagctggcgaccagcattaatttgaaagatccgcgaagttttctcggacgggagcttccgggattctctcattttgactcggaaatcctcattgccgggcaagggacggattatacgaatatgccgtcagaatctccgccgccgactgaggtcttaaaagaggagagagaagcgaatcttgcagagcttgaagggaaacagaaaaagaaaacagacggggaaaaacctcctgaacaatcgacgggcggccgcaaagtcgtatttatctacaatacgcacaatacggaatcgtatcttccctttttaaaaggtgaggcagatcctgatcgggcgattcattcgaaagcaaatgttacgcttgtcagcgatatgctcgcaaatgcgatgaaatcgcagggcgtcggggcgatggtggataaaaccgattttcaggcgaatttgcggaaaaaaggctgggcctatgcccgttcctatgatgaatcaaggccggtcgtcaaagaggcgatggcccagaacaaagacttgcagtattttatcgatattcacagggattcgcaacggaagaaagcgacaaccgcgactgtcaaaggaaaaagctatgcacgcgttgcgtttgtgctcggcaagaagagctctaatttcgaatcgaacttaaagctggcaaaagagctgcatgaacggatggaaaaaaaatatcccggtttgagccgcggagttatatctaagggagctgccggggataatggcatatataatcaggatttaaacgaaagatccgtcttaatcgaatttggcggcgtagataataaccgcgaagagctggagcgggctgcagaagcgatggcggatgtattcagcgagatgtactggaatgctgaaaaagttgatgcagactccggtgaagacgataagaaaaaacaatag

SEQ ID NO: 3198 - DNA, 1107 bp, Bacillus licheniformis
atggagaaaaagaagctcgatttaagtaaatatgcagtccggacagacttagccgtggaagcgagggatctggcagaggaaaaggaagcttctccaaagaaagagctgaaagggtttacagtcaaagaatacgaaaaagacgggatcaaaattcagacgatggatattgatgaagaaggagcgaagctgtcggggaaaaaagccggccgctatttaacctttgaaacacaagggatcagacagcaggattccgtattgcaggaaaaagtcgtcgatgtcttcgcaaaggaattttcctcgtttctcgattatttgggcattccgcgggatgccagctgcttaatagtcgggctcggcaactggaatgtcacgcccgactcgctcggccccctagtgacggagaaccttctcgtgacgaggcacctgtttcagctgcagcccgaaaatgtagaggaaggctaccgtccggtgagtgcgctttccccgggagtcatgggcttgaccggaattgaaacgagcgacattatccaaggggtgatcgatcgctcaaagcccgattttgtcattgccattgatgcgctggcatcaagagggatcgagcgtgtgaattctaccattcaaatttcagacagcgggatacaccccgggtctggtgtggggaataaaagaaaagagttaagcaaggatacgctcggcattccggtcatcgccatcggtgttccgacagtggtcgatgccgtcacgatcacgagcgacacgattgattacatgctgaagcattttggaagagagatgagagacgacagtccgtccaggtcgctcgttcccgcggggatgagctttgggaaaagaaaggtcctcaccgaagaagaccttcccgatgaagagcaccgcaaatcgtttctcggtatagtcggaggcctcgcagaggatgaaaaaaggcagctgatccatgaagtcctcgctccgctcggccataacttaatggtgacccctaaagaagtcgatacttttatcgatgatatggcaaatgtgattgcaaacggtctgaacacagcgctccatgaaaatgtatcgcaagacaataaaggaatgtataaccactaa

SEQ ID NO: 3199 - DNA, 267 bp, Bacillus licheniformis
ttgccaaacattaaatcagcgatcaaacgcacaaaaacaaacaacgagcgccgcgcgcacaacgcaacaatcaaatctgcaatgcgcactgctatgaaacaagttgaaactttcgtaagcaacaacgaagcagacaaagcgaaagcagctctatctgcagcagcaaagaaaatcgataaagcagctaaaaaaggtcttgtccacaaaaacaccgccgctcgttacaaatcaaacctagcgaaaaaagtgaacggactttctgcataa

SEQ ID NO: 3200 - DNA, 1044 bp, Bacillus licheniformis
atgacggtatttgatgtttggaaaagcttgaaaaaaggcgacattcatcctgtttattgcttgtacgggaaagagacgtatcttctgcaggagacggttcaaaggatcagacaagccgttgttgatgaagagacgaaagactttaacttctcgatatttgatctggaagaagacgcgctcgatcttgccgtggaggatgcggaaacctttccgtttatgggggaaaggcgtcttgtcgtggcgaaaaacccggcgtttttaacagctgaaaaaaagaaggataagcttgagcataatctcggtgtactggaagcttacattacgcagccggcaccttattccgtgtttgttttgcttgcgccttatgaaaagctcgatgaacggaaaaagctgaccaagctcctgaaaaagcatgcgcacatggtggaagcgaaggaattaaccgccaaagaaacggctgactttatcgcaggcctcgcgaagtcggaaggcaaacaaatcgaaccggaagcggcggaggagcttgtcctgttatgtcatgcaagtctgtcagccattgcccaggaggttaaaaagctcagtacatataccggtgaccgcggagagatcaccatagaggatgtcagaaagcttgtagcgagagggcttgaacaaaatattttcgaactgatcaataaggtcgtcaatcggaaacgtacagaagcgctgcagattttctacgatctattaaagcaaaatgaagagccgattaaaatgatggcgctgattgctaatcagttcaggctgctgatgcagaccaaatatttttctgaccagggatacggacaaaagcaaatcgcctcaaaccttaaagtgcacccgttcagggtgaagctggcgatcgagcaggcgaggcttttttcagagcaggagcttaggaacattatcgagcagctcgccgtgatggattatgaaatgaagacaggcaaaaaagacaagcagctcctgcttgaactgtttttgctgaagctgctgcagcctcatgaaaaaaacggcctcctttaa

SEQ ID NO: 3201 - DNA, 132 bp, Bacillus licheniformis
gtgaatgaatttgaaaaagacgtgcaaagcaaacgtaacgatcttgtagattcaggtgtcggttttatcgtgtcttttggctttttcgctacaatgtttattatcgctactgttatacatctggccgcttaa

SEQ ID NO: 3202 - DNA, 2388 bp, Bacillus licheniformis
atggacagacatcgcatcttcccgtgcggagcgatttcagcggcagccggaatcgcctccgctcactcttctctttatctcttcctcgccgtcggtttttttctgttctttatcctctgtttcttcaaaaaacaaatactccttttcgctttatgtgcagcggtttgtattttatattttacttctttttacgtgatcgaccatttcaatacaacgatttatcatgaaggcaaatttcacacgctcgcttctgttcaggatattcccgtaatagacggagaccggctttctttcacagccgaaacagatgagggagaagctttgaaagcgggatatacgctccggtctccacaagaaaaacgggcgctctcagctcttcagccgggcagcctctgtgtcatgcaaggtgaattaaaagagccgaaaaaagagacggttcctggcacttttaatcaaaaagaatccatgtatcaaaaagggattcactggatttttgcagttcagtctattacaagctgcaagccgggcggcggcctgatgccatctctattgaaaatcagaaaagcgggccttgattttatagaggaaaatatggcggactcggctgccggtattggaagagcgctaattttcggagaccggtttctcattgaacaagatgtcctggacggctatcagcgtcttggaatcattcaccttttagcgatttccgggcttcatgtcggtctgctctcagccgctctgttttacatatttattcgcttcggcgtcacgagggaatgcgcaaaatggctgctcgtgatcggccttcccgttgccgcagttttgaccggaggcgccccgtcggtgatgagagcggttttcatgtctgaaatctatctgctggcatcactgtctaaaaagaacttcaaaagtgccgatgtgatcagcattgcctgcctcggactgctgctgtatcatccttatctgttatttcaagccggattccagctttcttttgctgtatccttcgttttcattctttcaaaggagatattgaccaggccgaaaagccgaatctctcagctgctattggggtcatttttggctcagctcgcttccctcccgattctgctttttcattttcaagagttttcatttctcagcacattaatgaatctattttttatacctctttatattttcatcatcatgccgctgtctttcggaagcctgcttgctctcatatgttttcatcccttgggggaggcggcagccgccgttcttgaccgtctgcttgtgtggagccatcaggctgttaaaacggtgtctgccgcggatgtttcggtcttttctgcggctaagccgccggatcttttgttgtttttctacttcacagccatttttctgtttttgctgttgctggaaaaagagatgtcgcttcgtgcggtcatgattccgtccggcctgcttgctgctgtgtttgtgattcacgcatgtcttcctcagcttgcaggtgagggagaggttacaatgcttgatatcggccaaggggacagcatgtatgtcagcgctcccggtcagaatggcacggtcttcattgatacgggaggaaccgtatccttccggaaagagcggtggagaaagcggaagaaggatttttcattgggggagagcgtgttaatgccttttctggcaaccaaaggggtcaagaagctcgatgctttaattttgacccatgctgatcaggatcatatcggtgaagcgcatgtgctgatccaaaaacataaagtgaagcaattgatcgtgccgaaaggcttcgcagccgaaccgtctgatgaaaagctgcttcgccttgccttgaaggaaggcgtcgaggtgaatgtagccaaaagaggtgacatccttcatattggcaatcttgaattttatgttctttcaccgaaagaggcggacaaaaacagcaaaaacaatggttccctcgtattgtggatgaaagcaggcggattttcgtggctgttaactggagatttggagaaggagggcgaaaaggagatgatggaagtgtatccgaatcttaaagcggatattctgaaagtcggtcaccatggaagcaaaggttcgacgggtgaagagctgatcaagcaaattgagccgaaaaccgccctcatttcggcgggggagcacaaccgctacgggcatccccacggggaagtgctggacatcctaaaccgccacgatgtgaaggtgttcagaacggatcggcacggttcgattcagcacctatttcgaggcgggaacggaacgtttttgctacatcctccatatgataaagtacattccccgcaagaaaaaatgactgctgaaaaacagcagtcgtcaaaaagccgcttgcctgacggagagtaa

SEQ ID NO: 3203 - DNA, 570 bp, Bacillus licheniformis
gtggaacggatttcttgggatcaatattttatggcgcaaagccatttgctggcgcttcgcagcacgtgtacaaggcttgctgtaggagcgacgattgtcagggataaacgaattatagcgggaggctacaacggatcgatcgccggaggcgttcactgtgcggatgaaggctgctatatggtggacgggcactgcattagaacgattcacgccgagatgaacgcgattcttcagtgtgcaaaattcggtgttccgaccgaaggcgctgaaatatatgtcacacattttccgtgcattcaatgctgtaaatcgatcattcaggcaggtattaaaacgatatactatgcgaaggattacaaaaaccatccttacgcggttgaacttttcgatcaggcttctgttaaagtggagcaggtagagctcgatgagatgattatcgacttgaaaaaccaggaaaagttggcgtttgtagccgatctgatcaaacagctggctgataaaggccttgaggaagaggagatcaggaaaatacacgaagaggccaacaaactgtttacaagctacgtgtaa

SEQ ID NO: 3204 - DNA, 630 bp, Bacillus licheniformis
ttgacagattggctaaaacaatataaatggcatgctgcgggaggcgttgcactcgtcttgatcatcagcgctgccttcatgctgttaagcggaaagcgtgaaacttcatccggcctctccattcccgaggaggcttctgcacagacgtatgacaagaaggaggaggtgaaacgggaaaaaagcgcgggaaaagaggcggttatcatcgatttgaaaggcgctgtgaaaaatccgggcgtctatcaaatgaaagagggagacagggtccacgatgtattgaaaaaagcaggcggcaccgagaaaaaagcggatcaaaagcaaattaaccttgcagccgttttgcaggacggtatggtggtttacattccatttgagggggaagaggctgctgattctttctcgaaagcgggttcaagggcagatggcgcttccgtcgatatcgtcaatatcaatacggcttcctctgaggagcttcaggcgattcccggcatcggcccttcaaaagcggaagcggttatcgaataccgcgaggagaacggaccgtttcacacggtagaagacataacaaacgtttcgggaattggagaaaagtcttttgaaagaataaaatctgcaatcacggtaaagtaa

SEQ ID NO: 3205 - DNA, 822 bp, Bacillus licheniformis
ttgaatatcggctttatcgggacaggaaatatggggaccattttaattgaggcgttgattgaatccagagcggtcattccctcatctttaacaattactaaccgaacgatcgacaaagcgttaaacataaaaaaacgattcccagacattcaggttgcagaacggccggaagaagtgattacggaaagtgatgccgtgtttatctgtgtaaagccgctggatatttatcctttgctaaaacggctttcacccgtcttcacccgcgatcagactgtggtaaccattacgagtccggtgcaggtcgaacagctggaaaccatcgtctcctgccaggcggcaagagtgatcccgagcattacgaacagagcgctgtccggcgtgtcattattgactttcggagaaagctgcacagctgaggcaaaagaaaaattgacggctttagtaagcaagatctcaatccctctcgaaatcgaaagcgggattacgagggtcgcctcagacattgtcagctgcggccctgcctttgtcagctatttggttcaggagtttattcaggcggctgtcgaagaaacatccgtgtcaaaagaggacgctattttaatgacgaaagagatgctggtcggtttgggaaggctcctcgaaacaggcctttacacactgcccgccctgcaggaaaaggtttgcgttaaaggcggtgtaaccggtgagggaattaaggcgctggaaagcggtgttcaggatatgttccgccagatgttccgaaacacccatttgaagtatgaagaagatatcgctctagtcaagaagcaattttccgtttga

SEQ ID NO: 3206 - DNA, 756 bp, Bacillus licheniformis
atgatctataaaggattttccagtatttatgacaagctgatgtctcatgctccttacgatcagtgggtcagctggattgaacaaacgatcggcgcgcagcagaaagaacgtatacgggtgcttgatctggcgtgcggaacgggtgaaatatctgtccgcctggctgaaaaaggctatgatgtcacaggaatcgatatcagcgaagacatgcttgcccaggcccagtacaaagcagccgtcaggcagctcgatattcagttctttcagcaggatatgcgcgaacttgccgggcacggacaagagtttgacgcggttgcgatctgctgtgactcgctgaattatctaaagagcgaaaaagacgttttcaatacttttaaaaacgttttttctctattaaaagagggcggtcttcttctgtttgatgttcattccgtttacaaaatggatgtcatttttccgggaagtacgtatgccgatcaggatgaagaagtgagcgtcatctggcaaagctatgcgggggaagagcctcattcagctgttcacgatttgaccttctttgtacaaaatagagacgtatacgaaaggtttgatgaatcgcatgaacagcggactttccagacggaaaagtacatcagtttattgcggcaagccggatttgaggtgcagtgcatcagtgctgatttttcaaaattggagcctagcgcagagtcggaacgtcatttttatacagcaaaaaaaacaaaaaccatcgtttaa

SEQ ID NO: 3207 - DNA, 357 bp, Bacillus licheniformis
atggatcaagcttcaattttaaaaattgccgcagaggcctgcgatgataaacgggcggaagatattatcgccttgaatatgcaggggatttccctcgtggctgactattttctgatttgccatgggaactctgacaaacaggttcaggccattgcccgggaaattaaggatcaagctgaagaaaatggaattgatgtgaagaaaatggagggctttgacgaagccagatgggttttaatcgatttgggcgacgtcgttgtccacgttttccacaaagaggaacgaggctattacaaccttgaaaagctgtggggagacgcgccgattgaagacctttcgttcggagttaacgaatga

SEQ ID NO: 3208 - DNA, 564 bp, Bacillus licheniformis
atgaaacgtgaggaagccttagcctgcgtgaaagaacagctgacagaacagcgctacatccatacggtcggcgtgatggagacggctgtcaaacttgctgaacggtttggcgcagatctgaaaaaagccgaaatcgccgcgatctttcatgactacgccaaatttcgcccaaaagaggagatgaaacaaatcatcctcgacggaggcgggccgcttgaagtgctcaattttcatcatgaactttggcatgcgccggcaggagcagcgcttgtcaaaacagaggtcggaattacggatgaagacatcctgtcagccattcggttccatacatctggaaggcccaatatgactcttcttgaaaaagtggtttatgtagcggattatatcgagccgggccgccgttttccgggggttgaagaggttcggactctcgctgaggaagatttggattcggcgctcatccaggcattgaaaaatacgattacctttttaatttcaaaaaatcaggccgtttatccggaaacggtcgccacatataatgctttagtaaacgatagacattag

SEQ ID NO: 3209 - DNA, 570 bp, Bacillus licheniformis
atgaggaaaatcgggatttttggagggacattcgatcctccgcacaacgggcatttattaatggcaaatgaagtcctgtacaaactggatcttgatgaaatctggtttatgcccaaccaaattccgccgcataaacaaaaaaactcgttttcactaagtatgcacagggttgaaatgctgaagctcgccatttcggggaaagagcaatttaaactggagacgatcgaactcgaaagggaaggcccttcttatacatttgataccgttcgcctgctgaaagaccgataccctgatcatgagttttactttattatcggcgcggatatggtggaatacctgccgaaatggtcaaacattgacaagcttgtcaacatgattcagtttgtcggggtgaagcggcccggctttcaaattgagacgccgtatccgctcgtttttgtcgatgtgcctatttttgaagtgtcatcatctttgctcagggaccgcattaaaaatcggcagccgacagattatttaatacctgacgaagtgaaggtctatgtgaaggagaatcgtttatatgaaacgtga

SEQ ID NO: 3210 - DNA, 291 bp, Bacillus licheniformis
atgctaacaggaaaacaaaaacgctatttgcgccgggaagcgcatcatctgtcaccgatttttcaagtcggcaaaggcggagtcaacgaaaatatggtcaaacaaatcagcgaagctcttgaagcaagagaattgatcaaggtgagcgtgctgcaaaactgcgagcagcctaaagaggaagtagccgaagcgctggcgggcggagcgcgcgccgaactggtgcagacgatcggaaacattattgtgctgtataaggagtcaaaagaaaataaaaaaattgagcttccttaa

SEQ ID NO: 3211 - DNA, 837 bp, Bacillus licheniformis
atgaaaccgatatacggactgattggcaatccggtggcccattccatgtctccggacatccataatgcggctttgaaggatctttctttagaagggcattatcacgcttttcgcgtggaaaacgaagatcttgaagatgctgtgaaaggtatgcgggcccttggcattcaagggtttaatgtgaccgtcccccacaaagtatcgatcatgaagcatctcgaccgtattgatgaaagcgccgaagctctcggggcggtaaacactgtcagaagagaaaaagaagggctggtcggatataatacagatggagcagggtttcttaaatcgctgaagccatcccttgatcgtccgctttctgagctctcgatactgttgatcggagcaggcggtgcggcgagggcgatatttaccactctggcagccgagacgcccaagcggcttgatgtggcgaatcgtacgcctgaaaaggcattagcattcactcagcgttttgatggagaggcacgcgccttgtcactgcaggaagcggaagcagacttgtcagcatatgatatcgtgattcaaacgacgtcggtcgggatgcatccgaatgtcgaagctgccccgctttcattggcgaatgcgaaagaaacgtgccttgtatgcgatattatctacaatccgctgaaaacggccctgctgcatgaggctgaagcaaaaggcttgaaaacattggacggagtcggcatgttcatcggccaggcagcccttgcttttgagctgtggacaggacatgagccgaatatggaaaaaatgaaatcaattgtgttgcagcaactaggaggaaaatcatgctaa

SEQ ID NO: 3212 - DNA, 1101 bp, Bacillus licheniformis
atggaaaaggtagtttgtatcggatgcggagtcgccattcaaaccgaagataaaaataaactgggctatgcgcctgaagcatcgctgttaaaagaagacgtcatctgccagcgctgcttcagattgaaaaattataacgaaattcaagatgtttcactgacggacgatgactttttgaagattctgcacggcatcggggaaacggattcactcatcgtgaaaatcgtcgacatctttgatttcaacggaagctggatcaacggactgaaccgctttgtcggaggtaatccgatcttattaataggaaacaaagcagatattctccctaaatcagtcaagcgcgagcgccttgtaaactggatgaagcgcgaggcgaaagagcttggcttaaggcctgttgatgtgctgctcgtcagcgccgggcgcgggcaggggatgaaagatgcgatcgacgcgatcgaacattacagacaaggcaaggacgtgtatgtcgtcggatgtacgaacgtcgggaaatcaacgttcatcaaccggattattaaagaggtttccggagaagacgacattatcacgacatcccaatatccggggacgacgcttgatgcgattgaaatccctctggatgatggatctgcgatgtatgatacgccgggaatcatcaaccatcatcaaatggcgcactatgtcgcgaaacgcgatctgaaaatattgacgccgaagaaggagctgaagccgcgcacctttcagctgaacgaggaacagacgctgtttttcggcggattatcgcggtttgattatgcaagcggaggcaggtcttcgtttgtatgctatatgccgaatgaactcaagatccatagaacaaagcttgaaaacgcggatcagctgtatgaaaagcacgctggggaaatgcttgctccccctgcaaaagaagatcttgactcgtttccggcgcttgtcaaacatacgtttacgattaaagagccgaaaacggacgttgtgttctcgggccttggctgggtaacggtccagggggcaaaccaaaaaattgtcgcccacgcccctaaaggcgttcacgtgtttttgcgcagatctctaatataa

SEQ ID NO: 3213 - DNA, 519 bp, Bacillus licheniformis
gtgttaaaaaagttttttttgccggatgaatttgtaaaaaatatttttcatattacccctgaaaaactaaaagagcgcaatgtaaaagggattattacagatttggacaatacgcttgtagaatgggacaggccgagtgctacaccgcgtcttatcgagtggtttgaagagatgaaagagcacgggattaaagtgacaattgtctctaataataatgaaaaacgcgtcaaaatattttctgaaccgcttaatattccgtttatttacaaagcgaaaaaaccgatgggcagagctttcagaaaagccgttaaaaatatgggtcttaaaaaagaagacgtcgttgtcataggagatcagctcatgacagatgtgcttggagggaaccgcaacgggttccataccattcttgtcgtgcctgtggctgcttccgacggcttttttacgcgtttcaaccgccaagtcgaacgcagaattctcagcgctctaaaacggaaaggccatattcagtgggaggaataa

SEQ ID NO: 3214 - DNA, 141 bp, Bacillus licheniformis
atgaaaaagctgtctgatgaacttttaatagaatcatacattaaagcaaatgagatgaatttgaaccgcgaattcatcgagctgattgaaaccgaaatcaaaagaaggtcgctcggtcatctgctttccgtctcttcatag

SEQ ID NO: 3215 - DNA, 156 bp, Bacillus licheniformis
atgggatatccttttcccgctggtccgtgttcgtacccggcttatcccggatatgcaggcgccgcatacggatatgcgttcgttgtcgtccttttagtcgtcctgctggtcatcggcgggttctactggcttagtcctcgcggattcttcaaatag

SEQ ID NO: 3216 - DNA, 732 bp, Bacillus licheniformis
atgaaaaaaagcttggtgatggttctcgtttttctgcttctgctttcaggctgcggagaggacgatcccagaaaagtcgtagcatttggagacagcaatacacgcggctcaaattggcaatttcgcgattatccaaaagcggaaaagtgggtcaatttacttcagacttcccttcaagggcagtacaaaataaataatgcaggaataggcggagaaacgacggaagacgccaggtttcggttcaggaaggatgtgctggacaagcagccggcatatctttttatcatgttcggaacaaatgatgcagcaattcttacgaaagggctgccgcgcgtatccaaaaaaaggtttaaagaaaacctttattattttgttaaagaaagccgccgccgcgggatagagccggttttaatgacgtgcctgccgatcgtcgaaggaagcggggacaacatcttttattatgcaagataccgggcttcttcgtttgaaaaatacggtggagcgcgtaaatggcacgattcctataatgacgtcacaagggaaacggcgcgggaacttgatgttccgcttatcgacaactggaaaaacatcgtgaaaaaagcgggcggagctacagatgagaagctgatccattcgaggtttatcgacccatcgggaaatcacttaaccccaaaaggcgcgcgaattatttttgaaggaattaacaaaagcaaaatcataaaaacgtcttga

SEQ ID NO: 3217 - DNA, 762 bp, Bacillus licheniformis
atgattgaactgaaatcgagtgaaaaacgaaaagcaaaggctttgttagcggaagaaagcccgacattcgcgcatgcgatagccgaaggaatcatcgaaggaaacgtctatgtcgatgatttcctcacaccggccactgctctttttcgaacatcttccgggatttattatgtcgctggaaaccctccggacagcggaagaagcgagtggctccattatttaaatgaacagaggagcggagcgcgctttaccgtgttttcggcttctgaagagtgggacgcttttttaatcggggggcttggcgatcctctgcagcaaatggagcgcgtgtcatttttcctcggaaaagaggagcgtgattgcggcgcagcatttgccggggttgaaagatttactgaagatgaccttcaaaaaagcgcgaattttactgaaaaatacgctgatgagtattggggaggggccagccgttttttgaagaacggtttcgggtttaaagtgttgcatggaggtgtggtcgcaagcgaatgtgtcaccattttttgttcggaacgctttgccgaagttgatatcgcaacacacccggattacagggggcggggatttgcagtcagctgcgccagcgcctttatcgcacatgcaataaagaaccgtttgaaaccgcgttgggattgcgaccggcaaaaccgcgcatcgatccgcctcgctgaaaaattaggttttcgacctgtcaaaacttattctttatttgtcggaaaaccgtga

SEQ ID NO: 3218 - DNA, 372 bp, Bacillus licheniformis
atgtctaaaaaaatccatgaattcaacgatatgattcgcaagcttcgaaaagagctgtttggcaaggggcctgaacggatacgaacggtctttgtcgacaatatggcagtttcgacactgtacggcaatttgacggcgagcgagcagtttatcgcaagcacgccggagggaagggaaatggtgcatgcggcaaggacgaccctgattcagaaacactactccaatcacgtgccggaaggaatggaggagcttatcggagcgaagctagagcacctttttacggacatcaaaattcaggaggatattgcagtgtctgtttttatctttgaccgcaatattgaaggcgtcgccgaatcagccggcggggcttga

SEQ ID NO: 3219 - DNA, 2940 bp, Bacillus licheniformis
atggacggaaagccaatcagtgtccggatagacggcaaagaatttgaagcagtggccggggcaaccgttttagatatattgaacaaaaacgggtttgaacacccgcaaatatgccatgtaccagagacggatcctattcaaacgtgtgatacgtgtattgtggaagcagacggaaaattaaaacgggcatgctccctgcgggctgaagacggaatgacgatcagcctgtcagcagaacgggtcaaagctgcacaaaaagaagcaatggaccgcctgctcgaaaatcatttgctctattgtacggtatgcgacaacaacaacgggaactgtaagctacataatacggcagaaatgatgggaatcgaagaccagaaatacccttacacgcctaaagaagacccgtcttgcgccgtcgatatgtcacaccccttttaccgctatgatccgaatcagtgcattgcttgcggacaatgtgttgaagtttgccaaaacctgcaggtcaatgagacgctctcgattgactgggagcttgaacggccgcgggtaatctgggatgaaggcgtatcaatcaacgaatcctcatgcgtcagctgcgggcagtgtgtcacggtctgtccgtgcaatgcgttaatggaaaaatcaatgcttggaaaagccggtttcatgacaggcatcaaaccggatgtcatggagccgatgatcgaccttgtcaaagatgtagagccgggatacagcagcatctttgccgtttcagaagtcgaggcggcgatgcgttcacagcggaccaaaaagacaaaaaccgtctgtacgttctgcggtgtcggctgttcatttgaagtatggacaaaaggccgtgacatcttaaaaattcagccggtttcagaagctccagtcaatgccatctcgacgtgtgtgaaagggaaattcggatgggatttcgtcaattcggaagaacgtttaaccaaaccgctgatccgcaaaaataacgaatttgtcgaatcgacttgggaagaagcgcttgactacgttgcccgcagattaggctcgattcgggagcagaacggaaaagacgcagtcggatttatttcgtcttcaaaaatcacgaatgaagaaaactacttaatgcaaaagctggcgcggcaagtatttggcactaacaatgtcgacaactgctcgcgctactgccagtctccggcaacagacggattgttccgcacggtcggcatgggcggcgatgcaggcaccattcaagacatcgcgaaagcaggcctcgtcatcatcgtcggcgccaacccggccgaaggccacccggtactggcgacccgcgtgaagcgcgcccataagcttcacggacaaaagctgatcgtcgccgatcttcgcaaaaacgaaatggccgaacgctcggatctgttcatcagaccgcggcaaggaactgatcaagtatggctgatggccgtgacaaagtatatgatcgaccagggctggcacgatcaggcgtttatcgatgaaaacgtcaatttctttgaggaatataagcaatctcttgagacatacacccttgaatatgcagaaaaaattacaggcatccataaacagacgctgattcaaatcgctgagatgatccgcgacgccgacggtacatgcattctttggggaatgggggtcacccaaaacacgggcggttccgacacgtccgcagcgatttcaaacctgcttttagctaccgggaattaccgccgcccgggcgcaggagcttacccgctccgcggccacaacaatgtccagggcgcctgcgacatggggacgcttcccggctggcttccgggatatcagcacattacagatgacaaagcgcggaaaaagttcgaacaagcttacggcacaacaatcgacgaggagcccggacttgacaacattgaaatgcttcacgccgttgaagaaggcaaaatgaaagccatgtatatcgtcggagaagatatggctttagtcgattcaaacgcaaaccgggtccatgacattttatcaagccttgaattccttgtggttcaggatgtgttcctttcgaaaacagctcaatacgccgacgtcgttctgcctgcgtcagcttctcttgaaaaagatggaacttttacaaacacggaaagacgtgtccagcggttgtatcaggcgctcccgccgctcggagatgcgaagccggactgggttatcattcaagacatcgcaaaccggcttggagctgactggagttacagccaccctggcgacattttttcagaaatggtaagcctgtctccgctgttctccaaggcggattatgacgcaattgaaggatggaacagcttcctgtggggcagcttgaccggagaaagcacgcctcttttgtatgaagacggctttaactttcctgaccggaaagcgcgctttgccatcgcagactgggcagagcccgccgaatttcctgaggagtacgaccttcacattaacaacggccgaatgctggagcattttcacgaaggcaatatgacaaacaaatcggcaggcatccaggcaaaagtgccggacgtctttgtggaagtctcgcctgagctcgccaaagaacggggcatctgcgacggatcgcaggtcaggctgatctcgccgtttggcgccgtaaaattaacggcgcttgtgacagaccgggtcagagcgaacgaactttatctgccgatgaactcgacagataaagaatcggcgatcaatttcttgaccggtcccgcagtagatgcgcgcaccaatacaccggcttacaagcagaccaaggttcgtatggaagtgctcggcggatgtgcagaaccgccgcttccgaaaacaaatccgcgcaataagaaacgccatccgcaaaacggggctgaagtcgagcggaaatggaagcgtccggggtacgttcatttaacagactaa

SEQ ID NO: 3220 - DNA, 480 bp, Bacillus licheniformis
atggcagctcccatcaccgccatccgcaaagaagaaaaatctgaggagcaaataaagcttgaaaaactcgaagaactcaaagcccttttggctgaacaggaagccgccgtttcaaaaacgatgaagcttctcggcgaactgaacggcctcgggatccttgatgccgcagacagcatgatcggcgcgaaggaagacatcgccaaaatcgtcctcggccagctgtccaaagagccggccaaaaacctgatgaatacagccattgcagcaggcggcgctctctccaaagccgaaccggaagtcatggggaaacttgtagaaagcatcgtcgccggcacaaaacaaggagaggactttttaaaaagcgataaaaaaaccggagtcctcgatctgctgaaagccatgaacgatccggacatcaaccgggccgtcggcttcggcctgcaatttttaaaaggcatgggaaaagcgctgaaagaataa

SEQ ID NO: 3221 - DNA, 237 bp, Bacillus licheniformis
gtgccggacggttcaccatatcgtaaacgctatcaaccagccggtccggtgcggcagatgaaaaacaaacgtctgttcatactttcgttgattgtgttgagcgtggtcatgatcggagttcaggaaaccttcccaaacctgctgacgacagggttaatgactgtcgttattgcggcggcagtttttaatattttaaaagaatcgctgaataaaaaagatgaaacacacagcaaatga

SEQ ID NO: 3222 - DNA, 141 bp, Bacillus licheniformis
atggaagcgattgcaacggtcgccctttccggcgaaaacaagcggcttcatgccgaacagaacgccggaatatttggcagtccggcaattttgccgggtacagacacagacatcccccctcccacatacatttacatatag

SEQ ID NO: 3223 - DNA, 726 bp, Bacillus licheniformis
atgacaggtgtttttgcagcgctcggttatgtcatcaaggaactcgtttttttagtatcatatgtgaaaaacaatgcctttccacaaccgctgtcaagcagtgacgaaaaaaagtacttggagctgatggcccagggggatgaacacgcgagaaacatgctgatcgaacataacctccggctggtcgcccacatcgtcaaaaaattcgaaaacacaggcgaggatgcagaagacctgatttccatcggaacgatcgggctgatcaaagcaatcgaaagctattcagccggaaaaggaactaagctcgccacttatgcggcgcgttgtatagaaaacgagatcctcatgcatttgcgcgcattgaaaaaaacgaaaaaagacgtctcactccatgacccgatcggccaggacaaagaaggcaacgaaatttctctcctcgatgtcctgaaagcggaaaacgaagacgtcatcgacaccatccagctcaacatggagcttgaaaaagtcaaaaaatacatcgacatcttggacggcagagaaaaagaagtcatcgtcggcagatttggccttgatttgaagaaagagaagacgcagcgcgaaatcgcgaaagagctcgggatttcgcggagctatgtgtcgcggattgagaaacgggcgctgatgaagatgtttcatgagttttatcgggctgagaaggaaaagctgaagaagacgaagaggaagtga

SEQ ID NO: 3224 - DNA, 1808 bp, Bacillus licheniformis
gtgattacatactttttgaaatcttttcatttaattttcaaaactaataagctatggatttttggttctctatttattcgtatcttgaatggattgtttcctgtatgtgaattatggatacttactagacttgttaacgaaacagcaagtatcataatagacaaaaaagacaacgttttaacattagtcttcttattatttatacaattaataattatgatatctaggtcttcttgtgttcatataatgaatgtattagacaaggatatggaattaaaattgaatcttaagttgggaaacatgatcattgaaaaatccttgaattccccctttttttattttgacatgcctgagttttataaccatcaatttaggattaacaactatgggcacagttttttaaggccgatcagcaactctatgcatgtactgcaattatgtataacaattgtttcgtatataggctttttgttctttattcattggggacttgtggtcttagggatcctagcttcaattcctgccttcatcatccagtacaagtttggttactcaaatttcaatttaaataggctccaatccggattaatgagagaagcgagctatatcaattccttatttagaaacaaacaaagcattaaagagatcaaattatttagatcagggaactttttaattaatagatggaggaagctcaccacatcaaacaataaaaaaatcttaaagctcttttttaaacaaaattgggcaaacataggattggactctctgaccgctgttctttattccatgtctgcagttttaatggtctggctgttgaaattaggaaaaatgaatataggaagctttgtatcaacagcacaagcaattcagggactacaaggaactgttaaccaaacatcacatttattagcttcccttttcgaaagcaatctttaaataaaagacttctttgattttattgaatatcaaaatgaagatgatgcaaaaaaagaaaagttagaaaaaaatattgcaaataaatcggatacagcaaatatctcacttaagcatgtttactttaaatatccactaagcaatggttactctctgaaggacattaatttggaaataaaggataaagaaaaagttgcgattgtaggtcataatggttcaggaaaaactacattgattcaattgattatcggtctatataaacccactgccggaaacatctttttagaaggaaaagatttatgccaaatagacgaaaatgagttaagtgagtatgttagcgttgttttccaagactttgttagatatgccttgtcagttaaagaaaatatattgctttaagcgatattagtcaaatagacaatctaaatgaaattaaacagactgcatttttaagcggagcagacagctttatagaggcattgcctaacggttatgatacgactttgggaaaagttctcccgaatagtattgatatctcaggaggtcagtggcagcggatagctcttgctagatcaattttcaaaaaatcaaaattgataatactggatgagccaactgctgctctagatcctaaaacagaggcctatgtctttgagaaatttagagaattgaccgagaataaaacagctatttttatttcacatcgattagcttcggttaagatggcagatcgaattattcatttaaaagatggtcagattttagaagaaggcagccacaaagagcttatggcgttaaagggtgaatattataatatgtatatgacccaagctaagtggttcgatgggcaaagagaggaggttatctcctaa

SEQ ID NO: 3225 - DNA, 525 bp, Bacillus licheniformis
atgatctccctgtcttttttagttataacagttgcattcttggtactgcaactttataggaatatgctaagaacaaagaagcaacagggattattaaaaagtgacgaaggactaccgaaaggagaaacttacccaatcaccacattaaaaacgattgtggggcaagaagtgactatctcaaaaaagacacgaggagttatattgatcttcacttcatatggatgtagtggttgtaagagagtttacccatttcttgaattacttaagaaagagtatcccaaaatacaatttgaactaataatgttagcgaacaagaaacaggcacaagaaactatatctttatataatttagaagattggtcagtatcaataatcgaccatgaacacttacatacccttggaataaccggttttcctttttcttacttaatttcaaatgaaggaaaagtcatcgaaaagggtttgataaattataaaaaagatattgactttttagtatctatgttacaagtaaaaaaaatatct

SEQ ID NO: 3226 - DNA, 528 bp, Bacillus licheniformis
atggagttaatttttttcatacaatgtttctttagtgtaatgttctcaatctcttttatcgttaaattgaaaaacattagcggtttcatcgaaacagtctcttccataataagcaatctttttgttgcaaaaatttccgcatactttttccttatcttagaggcgttagcagcgataacaatagcatttaatactaccaagctttttggtgaagtgatcattttgatgttattgctggcattcttaataagcaatctattggttcaatttaaaaagcagaaaatcaaatgcaattgttttgggaaactaagtgaagaatttcttggtgacaaggtttcatattatcgtataacagttttaggtctgttactgggaactctaattttttttagaaggtcccaaataggtattgaactcgttcctcttaatacgactctaaatctattcttatcaagtattgctgtcatgcttacatactttttaattaatacttacatacatttaatgtatatgaggaggaataaatat

SEQ ID NO: 3227 - DNA, 102 bp, Bacillus licheniformis
atgaaaaaaattaactccatccaatcccaccctttcagcaaagaattaagttctttgtattcatttcttcaagactacaaaaaatctttttttttcatataa

SEQ ID NO: 3228 - DNA, 1158 bp, Bacillus licheniformis
atgaaaagaaagggaaaaaagagatatgtcttcctttatattcaagcagggattttatcctttgttggtttgtttataatcataggattgatgacaacgtttctttcaattagaatctcagcggactttatgaatactgcattaaaagaaaccgattctcaaaaggtttttcgctattttctagccagtgaaaataaatattttgcagcaaatcaaaatccattagaggacatttcaataactaagttagcttttcaattaatgaccaatgtaaaaccagatgactacagaaccttcttaggaaaagaaattccggggttttcagaatttgatacgaaaattgaagtcgctggacaagggacagatttcactactctacctgaagagtcttcacccccaatggaagtattgctaaaagaaaaagaaatttcacaagaaatgttgacagaggatagtaaagaaaataaagattcgaacccaaaaccttctcagaccactaacggaagaaaagttgtttacctttatcatactcacagctgggaatccttccttcctcttcttaagaatgcaaatacgccagatgatgcagttagttctgatgaaagagttaatgttataggggtggggaaaaaattaaaacaaaacctagaaagtaaaggaattggtgttgaacaaagtactgtaaatgcaactgaaaaacttcataatagaggatggaacgccaatcaatcatatcgctattcccgttcacttgttaaagaagcaactgcaacaaataaagatttaacatatgcaatcgatattcatagagatgcacttagaaaagagaaaactacgattaatatacaaggtaagagttatgctcgcttggtttttgttataggcaaagcaaatcctaactacgaagaaaatctagaatttgcaaaaaaacttcataaagaactagaaaaaaaataccctggaataagcagaggtgtactagcgaaagggagagatgctgggaatggcctttataatcaagatttgtccaagcactctattttattagaagctggtggagtagataacaatatgcaagagctagacaattcaatggaggcttttgcaggcgttttttctgattatttctggaaacagaacgatgctgaaaaatattga

SEQ ID NO: 3229 - DNA, 114 bp, Bacillus licheniformis
atgctgaaaaatattgagctgaaagggatggatgatcttgaaacaaaaaagcccacctttaatttggttaatttacacctttatcagtacttttttttcttacttcctttttga

SEQ ID NO: 3230 - DNA, 269 bp, Bacillus licheniformis
ctagaaaggaaaattgtgtatgctgcgggacagaggggtatcaaatgggtatcaatgatgttaccggaacacgttgaattgctcaaagaatatcatgaaggtcttgtaaggtgaaaaagccgattttagattaacaaaaatatgacgaactcaataataaagtaatccgttatgcaatggaagagaataaacttttgcaatttttcttttatcagaagagagagaagataaaagagttgactggacattccattatattgataccttaa

SEQ ID NO: 3231 - DNA, 389 bp, Bacillus licheniformis
tatgtcccccatgatgctattcacacgtatagtatcgatgaaagtaaaccatcttgaaaatatatgggcaaacgcacaaacaattgagttgaaaatcaaacatgacatgaaaagataatttggtgtgccatgaactgttggaattgaactgatacgctgctggcaaaactctgtcttaacgcatgccgagatgtgaaacaaagaaatcccggtttctctttccaatattcgggagacaacttaatcaagttcgatctatttcgccctgatcaagaaaaagcgaatacgtgggtacgttatgggcggtttcagaaaacggtacggatcgtcagcacttctacacgattcttatacaaacgcctgaaccgcacgatttagatttaagctag

SEQ ID NO: 3232 - DNA, 309 bp, Bacillus licheniformis
ggcattgaaatcagcctcattgatgtcctcaaatcagaaaacgaagacgtcatcgacaccatccagctcaacatggagcttgaaaaagtcaaaaaatacatcgacatccttgacggcagagaaaaagaagtcatcgtcggccgcttcggccttgatttgaagaaagaaaaaacgcagcgcgaaattgcgaaagagcttgggatttcgcggagctatgtgtcgcggattgagaagcgcgcgctgatgaagatgtttcatgagttttaccgggcggagaaggagaaaaggaagaaggcgaaggggaagtga

SEQ ID NO: 3233 - DNA, 552 bp, Bacillus licheniformis
ttggttgctttgggaatcgggatgctcgttaccaggccaatgatcggaaaaatgattgataagattggtgcgaaatccgtggttatgatcagtcttgtttttccgcttatcttaatcaccgataaaacaagtttgatctggatttccatcgtattgttcatccgctgcaccagtatcgggggaaatcttccgttggcgagtgacgcttatacagggcttgacagaaaacaacttccagaagcaggtgtcggtattaataatattgaaaaccctggttcaagcttcggttcagctgtgatcgcaaccgttggcgcaactgtcatggaaggattgcaaccaacgattgcgaatagcttaaaaggttatcatgccgggttcttagtttctacaattgtccttgccataatcttcgtcccacacataaaaaagccaaataaacaaatgctcactggtgaagtttacacgctccaagagcattcaaaattggctgatttattccatacggggaaacttcatcaagcagaagacgcgcccgttacccagccaaattag

SEQ ID NO: 3234 - DNA, 525 bp, Bacillus licheniformis
atgattttaataagaaaagccaaagtgtcagacgctaattcaattgccaaagttcatgtggaaagttggaaaaccacatatcaaggagtattgcctgatgacacgttatctaagctttctgtcgaaaatcaggcaaagctttggagaacttcattaagtgatcctaaaaatcaagatattgtctatgttgcagaagaaaccgacggtaaaattataggctttgcttccggaggtccaaaccgcgatcatcttagcaaatataagggtgaagtttccgcgatttatctgttgttacagtatcagaaaaaaggaatcggatctcgactaatgaaggcgattgtagaggagcttgtaaagaaaaacataaaatcattattggtatgggttttagccggtaatccatcgataaatttttatgaaaagctaggtggaaggcagagcacaacaaaacaaatacaattcggtgaagattatttcaaagctattgctatcggctggacggatataaatggttttttgttataa

SEQ ID NO: 3235 - DNA, 352 bp, Bacillus licheniformis
ttgaatgaggcttgtcagcatacaaagaagtacaaggggactataacaaataacgtttcggcaggcactttggttggagcggcaatttctttgacaggtatagacaagggttcctgcgagcagagtaaaacaaacagttttgaccataacttcattagctgttcgaatgaagagttattgcaagaactgatagagataactcctgttgaggaatcaatggaaattagcattttaattcaagaccccgaaaccaatgttgcttattatatcaattcagggaagctaataaaatataaatgtaatctcccagaattttgggggagatatacctcaggaagctctagttcctaga

SEQ ID NO: 3236 - DNA, 257 bp, Bacillus licheniformis
tcagaaaacgaagacgtcatcgacaccatccagctcaggcacaggcctgaaaaagtcaaaaaatacaacgacatcctcgacgtcagagaaaaagaagtcatcgccggcgcctcagccttgatttgaagaaaaaaacgcagcgcgagatcgcgaaggagctcgggatttcgcgctgcgatgtgtcccggattgaaaagcgcgcattgttcaagatgtttcatgagttttaccaggcggagaaggggaaggggaaatga

SEQ ID NO: 3237 - DNA, 1233 bp, Bacillus licheniformis
atgagtccgaatcatcacaaactattttacaaagatccctatctaaaaacgtttgaaacgaaaatcttgaaacaacaacaggacaaaaaaggtgatgtttatattatcctagaggaaacagccttttatccaacaggcggggaccagcctcatgatacaggaacattgaacggagtcaaagttttaaacgttgatgagatagatggagaaattcgtcattatgtagaaaggcctttgccgcatttaaatgatcaggttgttggggttattgattgggagcggcgttttgatcacatgcaacagcacaccgggcagcatattttgtcggcggcattcgcgcagctgtatgatcttcatacagttggattccatcttggaaatgatacggttaccattgaccttgatgtatcagaattaacagaggaaatggcaggcaaagcagagaagcttgcaaacgagatcataacggaaaataggtccatagtcgcaaagtgggtagaatatgatgacttagtaaattatccgattcgtaaactcccatctgtaaaagaaaatattcgtcttgtcatgattgatgaatttgattacaacggatgcggcggaacacacccgagcgctacaggagaagtcggagcaataaaagtattgaattgggaaagacagaggaaaaaaattcgtctgtattttgtatgcggtaatcgggtcataacccaattcgatcaaaaacaaaaagcaatcgttgaattgactggattacttaatcgtcctgaaggggaattaagcgaagctgtcaaacggttgcttgaaaatgtaaagaagctagacaaagcgcttctagaatcttatgaaaaaaaccttcagtatgaagccaatgaattattagcaaaaagcgcaattcaaaatgatactgtaatggtgatagaaacgttttcagatcgatcgattcaagaacttcaaaagctagcaaaaatgattgctgatcgagaaaaatgggcccttatttttttcttgtcagagaacgatcatcgcttccaattggtttgcgggcgaggtgaagcaaataaaatgaacatgagagacctaatgcaagaagctctttcccttattgatggaaaaggtgggggaaataaaatgttcgctcaaggtggagggactgcttcattcacaaaagagaaatttatgaaaaatgttatgaacattatagcaacacaaataaactcagaagaaaattaa

SEQ ID NO: 3238 - DNA, 1107 bp, Bacillus licheniformis
atgaatgatttacaattagatacaccagctcttttaatcgataaagacgtgatgttaagcaatatgaaggatatgcaaaattacgctaacgaacagaaggtaagcttacgccctcatacaaaaacacataaaatgcctaaattagctaaactgcaagaagagatgggagctgtaggaatcgctgtagcgaaagtaggagaagctgaagtgatggcgagaaatggcttaaaagatatctttatcgcaaatgaaattgttgggaaatcaaagcttgaacgtattagaaaactatctgaaacgattgatatctcttttggaatcgatagtgcgtatcaagtacgtgaaattgaagaagtatttgaaggagcttcaaagaaagcccaagtgttggtggaaattgaagtaggagaacaacgctccggaattattgaagaagatgattttcgtactttattagaattaatcaaaacgtgtcaaaatgtcgagctaaaaggaatcttctcacatgacggacattcttataaagcgaaaagtgtagcccattgtaaagaactctataaagaaagtgtagaacgaacattacatttcgcccgaattgcggaagaaatggatctaaagccgaaagtggttagtattggctctactcctcccttcatgtttaagtttgatattccagaaggggtgacagaaatcagacctggcacttacatttttatggacgcctcacaagcaaatgtaattggtacgtatgatcgctgtgctgcttctgtactcacaaccgtgattagtaaaccaacaaaagaacgagtcattacagacgtaggggccaagggaattaccgcccaaacacgaagcgaagggcttactgcaaccaaagggcttggccgtatcaaagaatacgaggacgtttatattcatggcgtattcgacgaacatgctattatttatcatgaagaattcaacaaaaaagtaagcattggagataaggtgcgaattattccaaatcatatctgcccagtatgcaacttgcacgataaagcctatttagtcgataatggagaggttgtagatgaattaaatattgaagctagaggaagacttcaataa

SEQ ID NO: 3239 - DNA, 390 bp, Bacillus licheniformis
ttgaagcctgtacacacgaagtattcaacacgggatgggggccattacgtgccagctatggaacacaatgatgttctctatatttcagggcagttgtcgatgaatccagaaacgggaaaaattccagctgggggcataaaagaagaagcaaaacaggcattggcaaatatggagcttgtcctcaaggaacggggattagccaaggaagatgtgatattatgcagactttataccccagatgtaaagtattggccggatatcaatgaggtctatgctcatttcttcggcaatcataaaccggcaagagtagttgttccatcaaatcatttatatgccgggtgtcttgttgaagttgaagccattgcagcgataaaggaggaggcacaatga

SEQ ID NO: 3240 - DNA, 978 bp, Bacillus licheniformis
atggaaaacaagaaaatcattttgctgagtaccggcggtacaattgcaagtaagcctgatcctgaaacaggtctattagaagcaggtgctatgacaggtgaagagctttctgaaatgtgtcgactgccttctcatatagagattgaaatcaagtcagtcttttaaatgtcaagcagtcatatgacttttcatcaccttgacattctcaagcaaaatatagagagtttcttccggaatgaggatgttgccggaattgtgatatcgcatggaacagatacccttgaagagacttcgtatttccttgatctggttatttctgatgaaaggccggtcgtgttaacggggtcgcaaagaggaccgacacttgaaggtacagatgcgtttgtgaacctaagacaagctttcttattagcggcacatcctgatgcgcgaggcttaggggtaacagtgttgtttaatgagagggtttttgctgctcgatatgtgaaaaaacagcatgcgtcaaatgttgatggttttttctcaccgggattcggttatttgggaactgccgatcaagatgagatcgcaattcatcaaagattaatcaagcgtgagacgtatcagctgattcaaccattaccaaatgtggaacttattaagtgttcacttggatcagacggaaagtttatagattatgcagttaagtacggaagtgcaggaatcattattgaggcgccgggaagagggcatacggctccagcaatattagaaagtgcaaagaaagccgcagagaaagggattcctgtcgttctgacaacaagtgctcacgaaggtgaagtcaagggagtatatggattcaaaggaagtgcttcaacatatgcagatgccggaatcatacttggcggcagctatgacagtaagaaagcaaggatcaaactcgctgttttgctggctgctggacagaagattgatgaggctagctttaaatattaagaa

SEQ ID NO: 3241 - DNA, 1104 bp, Bacillus licheniformis
atggaacagtatcaatgtcattcttgccgtacgaaatacaatgtgtctgaacaggtgtggaaatgccagtgtggcggagtgttagaccttgtaaaagaaaaagtagaatggtccgattcaaaagtgctcaaagatattccttctatgtggagatatattgaagctatgccatttgatcgcgactccgccatatggagcggcatcaccatgggggagggatacacgcctttaatcgtgttagacagcggggagccgaatactcttgtgaaagtggactatatgatgcctactttgtcttttaaagatcgcggtgcggctgtattaatagctaaggcaaaggagctgggagtgaagcatgtgatcgccgacagcagcggaaatgcagggacatctattgcagcttacgccaagcgggctgaaatcgcatgtgacatctttcttcgaaagggtacatcgcctaagaaaatcgcgcaggcgaaagcgcatggagccaacgttcgcgaaattgaaggcacaagagaagatgtggctgaagcagcgcaaaaggctgtggatatagagaaaaaattctatgccagtcacgtttttaatccatatttctatgaaggaacaaaaacgtatgcctttgagatttgggaacaaatgaatggagcgccggatacgcttattattccagttggcaatggtacgttattgcttggggtttactatggatttaaagagttattagagaacaaatgtatagacaaaatgccaaggctggttgcgatacaggcagagaattgtgcgccgttggcaaaggcatttatcaacaatcaaaaagctgctgaacccgtcaaaagcagcggaacacttgcagagggcatcgcgattgccaaaccggcaagatctgctcaaatattagaaaccatccgtgccacaaacggtcaaatcattacaaccaatgaggaagagattctaaaagctcgtacagcattagcaagtaaaggcttttatgttgagccaacaacagcggctaactatgcaggatatttaaaatacagtcattcttctgatgaaaaaatcgcgattccattatgcggggctgggattaaatctaattag

SEQ ID NO: 3242 - DNA, 375 bp, Bacillus licheniformis
gtggagagtatttttgaggcagggaatttaaaatcgaacggtcattatgccttagctgtgattcatcaaaacacggtctatgtatcagggcaatttgccattgatccaatcacgcaggaaaagaaatttggcaccattgaagaagagactttgcaggtattgtcaaatatagagtatatcttaaaaaaagccggcagtcataaaggaaaaattttaaagataaccttatatcttcacgatatcaatttgttagaccgtgttgacaatgtctgtcagggtttttttcacgattatcgcccagcacggtcagttgtttcgacgaccgagctgcattacggttttcaggttgaaattgaagcaatcgccagtctgtaa

SEQ ID NO: 3243 - DNA, 666 bp, Bacillus licheniformis
ttgactgaagcaaaacaggttttaaaaagttacataccatttgcaaaaacgataggggaaatgtttggtccaaattgtgaggttgtcattcatgatttgacaacccccgagtcttccgtcattttcacaatcaacaatcatgtaacaggaagagaggttggccaatcctttgaccatttggtgaaaaaagttcttttatccaatgaatttaaagaggattacttagctggatatgaaatccaagcagatgatgggagaacaataaaatcatcgactaccctcattagagatggccagcagcaggtgattggggctttttgcatcaattacgacatgaatgtaatgattcaaatgaaagaaatgttagatgcatttatgcctggtgttgaaaagaaaaatcaaatacaaacttcgaatacggcggagcaggaagcttcgattcagaatgtagaagagatcacgaaccagttaattgaacaaattgtagcgaaccgcaaacactctatgatgaaacgccgggaaaaaatcgagctgatcaggtttatggatgaaaaggggatattcctcatgaaaggtgcggttgataaagtggcagaacaattaggcatttcaaaggtaactgtctacagctatttagatgaagtaaaaaaaagacaatcggagtga

SEQ ID NO: 3244 - DNA, 117 bp, Bacillus licheniformis
atgaaacaaaaatatatttttttatacacagaattgatcattcattaccttcagtttgtatctttttattttgtcatcaaacaggaactatttagatattgttcggtatctttttag

SEQ ID NO: 3245 - DNA, 380 bp, Bacillus licheniformis
ttgttcggtatctttttagttcagtccctcaacctattaaaacctgtgagtggcattgaaatcagcctcattgatgccctcaggatcggaaaacgaagacgtcatcgacaccatccagctcaacatggagcttgaaaaagtcaaaaaatacatcgacatcctggacggcagagaaaaagaagtttattgccggccgctttagccttgatttgaagaaagaaaaaacgcagcgggaaattgcgaaggagctcgggatttcacggagctatgtgtcgcggatagagaagcgggcgctgatgaaggtgtttcacgagttttaccgggagaagaaggagctttttcctaatttggaatataaaaagaccgcaaagctttcttaa

SEQ ID NO: 3246 - DNA, 570 bp, Bacillus licheniformis
atgagagcaccgattgatgaacccatttggtacgcctatcccggcatggtagctgtcgttacggctcaatatgaaggtgaaaaaaacgccatggcctccgggtggcatacgtatatcggatcttctcccggaatgtatgggatatcgttaaataaagagacatttacttacaaattgattgagaaaagtggcgttttcggtgtgaattttcttccggggagatgctcggaattaattcaagcattaggcacccacagcggcagagatatcaataagtttgaagcatttcatattcaatacgaagaagggctaaaagccgaggtaccgattttaactgatgcatattttgcttatgagtgtaaagtacacagtatttccactttgggcgatcaagagtggattgcgggagaagttttacagagatatcaagataaagagcttttcttaaaaaacggcatgccgaatttagaaaaattggatgttccgcttcatattggagggtccagctatcgcatattaaatagtcaagcagaggagcatcaacacgcatttaattccgaagctgattga

SEQ ID NO: 3247 - DNA, 846 bp, Bacillus licheniformis
atgaaggaatatttttcaatcggggaaacagcccgtctaaataacatttccattcaaacattgcgctattatgataagatcggaattttcaagcctcaatgtacagaccgggataacggctatcgatattaccatgttaaacagttcttttatttggatattataaaatatctcaaatccattaaaacgcctttggaagaaattaagcgcattatctcacatacatctgcccctgaactgatgcaaacctttctggaggagcaagaaaacgtgattgagcgtgaaatggaaagactcgaacgtgccaggcaattgcttcaaagaagaaaggaccagcttcatgaacaattggagatacgcgctaaaaaagaagaaggtctggtgtatgttcggcatatagaaggccaaaccattttaaaagcagcgacacctcaagtgaatcctcatgaccaatcagatttgtattaccgaaaactggctgaagtcctggaagaaagaggagatatggtcgataactattatggactgatttatgatttaaagccttataaaaattcaggtgacatttattgcaacagtgtttatacgacgatttatgaaggagcaaagatagatacagacgaacaaaatattgggatagatacgatcccatccggtgaatatgtgtgtatttcatttgattgctcttcaacaaattatttttcatactatcaaaaactgtaccattttattgaatctcatggcattcaaacggatggaaaagtatatcaagtttcttttccaaacagctataactcattaaaagaagaagacttcctcacagaattcagagtgctgaaaaaataa

SEQ ID NO: 3248 - DNA, 114 bp, Bacillus licheniformis
ttgatccgaagaaagagaaaacgcgaagaagcgggcgctgcggatatgtttcagaagtgtgatcagacggagaaggaaaagcggaaacactatcagtcaagaggccgggagtaa

SEQ ID NO: 3249 - DNA, 1433 bp, Bacillus licheniformis
atgttattgcgctatttttacgataaaaaactggcccatgcatcctatctggttggctgccaaaaaacaggggaagccattgtgattgaccccggccgcaatctaaaaccatatttgcaagcagccaaggaagaagggctaaacatcacagcggccgcagaaacccatattcacgccgactttgtttccggtgcccgcgaactcgcgctacacatcaagcgaagctgtatctttccgatgaaggagacgcaaattggaaataccaatatgtcgatgaatcgaaacatcaacttgtgaaagacggcgatcgcttttccattggtaacctgatgtttgaggttatgcatactcccggccataccccggaaagcatttctttcctgttgacggacggcggaggaaatgcggatcgtccaatcggcatctttactggagatttcgtctttgcaggcgacatcggcagacccgatttgcttgaaaaggcggcggggattaagggaacgtcagagtcgggggcaagagcgatgttcaagtccctcatgaagtttaaacagctcccggattacttgcaggtttggccggctcacggcgcagggagcgcttgcggcaaggcattgggagccattccaactacgactgtcggctacgaaaagatgtttaactgggcaatggcttacaccgatgaagaggaattcgtaaatgccttgcttgatggacaaccagaaccgccgaagtattttgctgagatgaaacgagtgaataaagaaggccctgcattgctcaaagatctttctgccgttttagagattatgtcgattgaacaagtgaaagatttgcaggggaaagagcaaattgtggatacccgctcctcccgggaatttgctgaagggcacctcaaaggcacgatcaacattccattcaacaaggggtttacaaactgggcaggctggctcatcgactacaatcgtcctgtgtacttaatcgcgaatccggcagaagtgaacgaactcctggaagcgctgcgctccgtaggcattgacaacgcggcagggtttatcgatcgtgacaaaatcttggcagacggtgctttttcacttgaatcgtacgctgagatcacaccacgtgagatcgcaaaattagtggaagacggcttcgtgcaagtgcttgatgttcgcaatctgactgaatggcaggaaggtcacattccgaatgcgcaacacatcatgctgggaacgctcccagaacggctcgatgaaattagaaaagactgtccgattcttgtgcaatgccattccggagcccgatctgcaataggagccagcatcctgcaagctaacggtagtttcaaacaagtattgagtttaagcggcggcattgtccaatggcagaaagacgggcttgccatttcaaccccttgcagcgaattaaaatga

SEQ ID NO: 3250 - DNA, 1200 bp, Bacillus licheniformis
atggcaagacatgctcgttattccattgtcattgtaggagccgggactgctggcatctctgtcgccgcccgtctcgtaaggatttctaaaaaactcaaaggacaaattgccatcattgacccgcaaacaaagcactactaccagcctttgtggacattagttggaggcggcgcagcgaagaaggaagagtccgagcgagatctggcttctttaattcccgctggtgtcgacttgatcggcgatgctgtaacggagtttcggccgaatcagaacacacttcttacaaaacaaggaacgatcgtttcctatgattatcttgttgcagcagccggtttgcaaatcgattgggacggggtcaaaggcttgaaagatgcggtcggaaaaaacggggtttgcagcaactattcatatcatacggtagacagcacttgggaaaacatccgcaattttaaaggcggaaccgccattttcactcatcctgattctcccgtaaaatgcgggggagctccacagaaaattatgtacttagcagacgactatttccgcaagtcaaatgtccgccatcagtcggagattatttttgcatcggcgaaatcgatcatttttgatgtcaccaaatacgcaaatgcgctcgaaaaagtcgtcctgcgcaaggatatccaaacgatgtacaagagaaacttaatcgaaattcggcctgattcaaaagaagccttgttcgaacatttggagacgggggagcaggaagtattcacatatgatcttcttcatgtgactccaccgatgaaagcaccttcatgtataaaagaaagcgcattggcggatgccggcggctgggtcgatgttgatccgtacactctgcagcacaaaaagtttgccaatgttttcggaattggtgactgtgccaacctgccgacgtccaaaacaggggcggcagttcgcaaacaggctccggttgtcgtgcgaaatctgatgtccttgataaaaggctcttcattagatgcaaagtacgatggatatacctcgtgccccttggttacagggtacaacaaactcgtgctggccgagtttgactatcacaaggtgccgcaagaaacgtttccatttgatcagtccaaggaacgattcagcatgtacctgttaaaaagaagactgcttcccatcatgtattggaatggcatgttaaaaggactgatgtaa

SEQ ID NO: 3251 - DNA, 645 bp, Bacillus licheniformis
gtgatcagggtattgctggtcgatgaccatatgatgattcgcaagggcatccgtgtccttttggaaggcttttctggaattgaaattgcgggagaaagcaataatggcaacaaagccgttcttagcgccggacagttaaagccggatgtcgtgctgatggatttgtcgatgccgaacgggttggacggattcacagcgagcagtgagatccgaaagttgaatccttctgttaaaatcgtgattttgacaatgcatgatgaggaaatttttgtccaaaaagcaatagaggcgggggcgcatggctacgtcttgaaaaacagccattatcggttgctttatcaggcgattgtcgaagtgtacaggggcaatctcttttacaaaacatctgtatcgcaagacatcattgatcaatggctcaattcagagcccaaaaagccgacctctgtattaactgtccgcgaaaaggagattctcagattcattgtgctgggttatgccaataaggagattgccgataaactctcaatcagcgtcaaaaccgtcgaaaaccacaaaacgaatatgatgcagaagttagatctggactcgaaacacgaattgattcaatatgcgatcaaaaataaatatctcgatctgtcgttgtaa

SEQ ID NO: 3252 - DNA, 1083 bp, Bacillus licheniformis
atgtgtcaaaacccggctcggtatacagaagaaggaatgtcaaatgaaagcggctatttaaggcagatcttcgaccatttgcaggatgggatcatcatgatggatcaggaacgcacaattctggtgatgaatccgtccgcagagaagatgacgggatggaaactaggggataaggttccgtactgttcctactgctgccaaacgagaaaactggaagcgggagaagagcgttgttatttgctggccaagcgggaaattccttattttctctcctcgatgcccacctatgaagggcgattcgtcgacatggagatgagtacggctgtcatttccgaaaacggcgatcaaatggaagttcttttggtcctgaaagatttaacaatgaagaaaaaggaggaagaagcgaagatctccaagctggttttgcaaaaaacgttagaggcccaggaaaacgaacacaagcggcttgcccaggaactgcacgatggtgtagggcaatcgctttattcggtttcagtaggcattcaagcgattcaatcgctcatggagcaggaagaaacatttaaagattacatgcaggacatcatcgatgaactggaaaaagcaatccaagacgtcaagctctactctctccagctgcgcccgcacagtctcgatcaattggggctgatccctgctgtcaagcatcttgtttccagcttaaacaagacgcatcaggatgtttctattacgtttgcctcaagcgatatcagcaatcgcttgctgccgatttttgaaatcaatttgtaccgcatcattcaggaggcgcttcataatgccctgaaatattcgcaggcgacacttattgaagtcatactttacaaagaagacggcgagctcgttttgatcattcaggacgatggcattggttttgaacgcgggctgacagaggaaggcctggggttcaaacatatgaaagagagagtcgatcagatggatggaagtcttcgaattcactctgcacttcagagtggcacgacgattaaagtgaaagtacaggacaaggaggggaaggagagtgatcagggtattgctggtcgatga

SEQ ID NO: 3253 - DNA, 336 bp, Bacillus licheniformis
atgaaagaagctgcagaactaacttcaatggtgtcaattgagaaatttataactgatcatcaattaagttttatatatatatcaagacctcaatgcacagtctgtcacgctgttctgcctcagcttagagcactgttggcccgctttccaaagatcaaattaggacatataaatgctgacatagtggaagaggttgccggcaggttttcagtcttcacagttcctgtgcttcttttgtttattgagggaaccgaatgtctacgagaagcgcgttttattcattttgaacagcttgaacagaagttaaaaagagtctatcagttgtacgaggaatag

SEQ ID NO: 3254 - DNA, 783 bp, Bacillus licheniformis
gtggacatatcttttattcttcttatatttttcatcggattcattggctcttttatgtccggaatgcttggtgtcgggggagcaattattaattacccgttgctattatatatacctgctttattagggtttacaggctttaacgcacaccaggtttcaggtatagtggcagtccaggtttttattgctgcattttccggtgtgtgggcttaccggaaagacggttacttaaataaagaactgatcttcatcatggggttaagtattttgcttggaagtctaatcggcggctatgggtcacattttttctccgaagatgccataaacatggtttacggattattggcgatcattgcagccatcatcatgttgattccaaagacaggaacagaaggtaatcaaagtgatcacattcgctttccaaagatattaacctcaatcatgacttttgtggtcggtttggcttcaggtatagtcggtgcgggcggagcttttctgcttgttccgctcatgttagtcattataaaaatacctgcacgaatcacaatcgcaacatcactcgcagttacatttatttcatcgattggaacaacagctacaaagctcgtcattggacaggtgcctattatgccggctttggttgtaatggctgccagtctgattgcatccccgctaggtgttttcattggcaagaaagtgaatgctaaagttcttcaaggtattttgatattcgttatttttcttacaacagtgaaaatttgggttgatatcttactgtattga

SEQ ID NO: 3255 - DNA, 228 bp, Bacillus licheniformis
atgaaatcagataaagtaatagatgctaaaggatttgcgtgcccgatgccaattgtgaaaacaaaaaaagcgatggatgaattgcaatccggagaagtgttagaagtacatgccactgataaaggggcaaaaagcgatctaacagcatgggcgaagtcaggcggtcatgagttgcttaaagatacagaggaagatggtatattaaagttttggcttaaaaaaggttaa

SEQ ID NO: 3256 - DNA, 1131 bp, Bacillus licheniformis
gtgaattttacattcgtttcaccaaaagaagtagctgaaaagctattaagaaaagaatcattttttattttagacgtacgaaataaagaggcccttagtgattggaaaatcgagggaagccgggttgaacatttaaatgttccgtattttgatttaattgatggtatagaaaaaattgatggccaagttcctaaagatcaagatgttctagtcgtttgcgccaaacaagggtcttcagagatggttgcacagcatttagtggatgccggttttgaaagagtgctggtacttaaaggcggtatgaaggcgtggagcaaatttttacatccagtcaaaatcggagacttgaaagaaggagggacgatctatcaattcgtaagaatggggaaaggctgtttatcctattttatcgaaaccgacggagaagcaattgtagttgaccctgctcgttctgttgatgcatatatagattttgcgaaagagagaaacgttacgattaaacatgtggtcgatacacacttacatgcggatcatatttcgggcggacgtttactgcgtaagcgtacaggagctgcatactacctgccgccaaaagatgcggaggaagtgctattttcatatgaaccgctagttgaagatgaaaatatttctgtaggaagcgcaggtatgaaagcagaacctatttactcacctggacatacgattggtagcacctctttaatgattgataatcgctatttgttaacaggagatattttatttgttgaatcgattggccggccggacttagctggaaaagccggggattgggcagaggatttgcgtaacacattgtatgtaaaatacaaacaaatatcaggtgacttgattgttcttccagctcacttttcgacagtcagtgaattaggcgatcaggggcaagtccaagctaagctgagtgatttatataaaaagaatgccggtttaaatctggatgaaaatgaattcaaaggggctgtatcagaaaatctgccgccacagccaaatgcatatcaggaaatccgtcaaaccaacatgggcaaaataatgcctgatgctgacaggcaaagcgagatggaaatgggaccgaaccgttgtgcggttcatggatga

SEQ ID NO: 3257 - DNA, 573 bp, Bacillus licheniformis
atgaacatcaaaactgatcgcgtattagatgcaaaagggcttgcttgtccaatgcccgtcgtaaaaacgaaaaaagccatgaatgagttaaaaccggggcaggtaattgaagtgcatgctactgataaagggtctcttgctgatatacgggcatgggcaaagggaagcggtcaccagtatctcggtacaacagaagacggagatatattaaagcattatcttcgaaaagcgggtcactctgaaataaagaaagtaaaaacgtttccttatacgattcaaaatgaagagcttcaaaaaaaggtagaggcgggcgagcggctaacagtagttgatgttcgggaacctgcagaataccgtttcggccatattcccggagcgatttcaattccattaggtgaacttgaaaaaagagcgcacgaactgaatagagacgggaaaatttatgttgtttgccgtacgggtaatagaagcgatctggcagctaaacagcttgcggataatggctttaaagatgttgaaaatgttgtccaaggtatggcggagtggtcaggccctgttgaaaaaaatcaataa

SEQ ID NO: 3258 - DNA, 483 bp, Bacillus licheniformis
atgtcagaccaaaaagaaaaaacgaccattgttttatttagcggtgacctagataaggcgattgccgcttttattattgcaaatggcgccgctgcttatgatcatgaggtaacagtttttcatactttttgggggcttaacgctttaagaaaagatgaaccggtgccagtaaagaaaggaccgcttgaaaaagcgttcggctttatgatgccccgtggttcaaagaaactcggattatctaaaatgaattttgccggtatcgggcctaaaatgatcaaacatgtcatgaaaaagcacggcgtactgtctctgcctcaactgattgaaatggcgcaagaacaaggagttaagcttgttgcctgtacaatgacaatggacttgttaggcttgcaaaaagaagaactcatcgacggccttgattatgcaggtgttgccgcttatctaggcgatgccaacgaagcaaaggtgaatttatttatataa

SEQ ID NO: 3259 - DNA, 129 bp, Bacillus licheniformis
atggctgttgtttatgatacagcctctatatacccctggttaaaagaaattttgctgtttttataccctttagggtataaaaagctgacttatattttttttagtttttatatacctgtacgggtataa

SEQ ID NO: 3260 - DNA, 261 bp, Bacillus licheniformis
atggaatacgatgatcaattaaaaaataggatcaaacgagttgaaggtcaagttcgagggatattaaagatgatggatgaaggaaaagagtgtaaagaactcgtaagccaaatgtcagctgttcgttctgcattagatcgggccatcggtgttgttgtaagcagtaacttggagaaatgcgtccgccttcaaattgaaagaggagaagataccgaagacctcatccaagaagccgttaatttattggttaaaagcagataa

SEQ ID NO: 3261 - DNA, 132 bp, Bacillus licheniformis
atgatgagttttaccgtccagagaaaaagaagtgatgaaaaaagccgggtcattttccggcttttcctatttcattttaaaaaaacaagaaatcactttatgctgctggatataaacattgaagcatcttga

SEQ ID NO: 3262 - DNA, 597 bp, Bacillus licheniformis
atggaaaataacgtttttgaacagatcgcaaagcgatatgatacagaagaaagaattgaattagctaaagtgatcgtgaatgaagtaagaccggaattgcgaaacagtcaatcaaaatctttaattgactatgggagcggtacgggtctcattagtttagaattatcagatttagtacattctattttgctggtcgattcatccaaacaaatgctggaggtggcgaaagctaaaatttctcgcaaaggaatcgccaacgcaaagacgctttattcagatttcacccaagaaactcctgaactgaaggcagacatcgttttaatgtcactagtccttcttcatattccggatacaaataaaattttacaagaactgttcggcattttaaatgatggcggcaagctcataattattgattttgacaaaaatgacaaaatacaacatccgaaagttcacaacggtttttcgcacgaagaattgaaaaaaagattatccgatgttggatttaaatcaactgaaatgaagacattttttcacggccggcgtatttttatgaatcaagatgcttcaatgtttatatccagcagcataaagtga

SEQ ID NO: 3263 - DNA, 706 bp, Bacillus licheniformis
atggatcttgaaacggttatgaaagaactggaagcgctgggtacggaaaacatgaaaaaaagatacataacgaatggtgcacacgaaccgctgtttggcgtggctacaggcaaaatgaagccgctcgcaaagaaaatcaagaaaaatcagcccttggcggagcagctttacgctaccgggaactacgatgccatgtattttgccggcattattgctgacccaatgacaatgactgaagcggattttgagcggtggatcgatgcggcgtatttctatatgctatctgattatgttgttgccgtaactttggcagaaaccgattttgcgcaggctgttgctgataatggatctcaagcggtgaagagcttaaaatgtcggcaggctggagctgttactgctggcttttaggtaatcgaccggacgatgaatttaatgtagctaaaattgccagtatgcttgatcaggtggaacgtacgattcacgattctccagatcgaacaaaatcggctatgaataattttatctacacagtcgggatttcatatttgccgcttcatgaaaaggcggttgaaaccgcaaaagcagtaggcccggtcgaactcaggcggggcaagaaaaaaagcagtatcctgaatgcttccaaaaatattcaaaaagatattgatagaggccatctcggtttcaaacggaaatatgtaaggtgtta

SEQ ID NO: 3264 - DNA, 258 bp, Bacillus licheniformis
atgaagacgaatttttatgggaaagaccatcagatcccattaatcggcggcacgttttataaacctaatcttcagaacatttatcaatatgaaccggatttggtgattgggattggcggtgttcacgataccttaagagacggaagtccgtcttcgagcggattacatttggacctgctcatttgcagctttcattttttcttccatttttttaatgcatcggcagaattttggcggctgttttcgtttatgtattaa

SEQ ID NO: 3265 - DNA, 321 bp, Bacillus licheniformis
gtggacgatcggatcactgaatggaagggtttggattcacttgaaccttttatggccaattgcagttcctgcgctcattgcgggattgttgacagcgggaatcgcaaatgcctggaggctggaacagaatcagctgtgctcctgggcctttctttaaagaaaacaaatgctcttttatttttcatctctgcccttttaaccgcaggggccgtttcgattgttggagcaattggctttattggtttaatcggccctcacattgccaaacttgatcgttggagaggatgcgagaaaaagtcctaccatttccaaatctattaa

SEQ ID NO: 3266 - DNA, 843 bp, Bacillus licheniformis
atgataaagtcttttttaatgttggggcagtcgaatatggcaggccgtggatttttgaatgaagtagaccctatctataatgaaaaaataaaaatgctgcgcaatgggcagtggcagatgatgacagagccgattaattacgaccgtccggtttccggcgttggcctggcggcatcttttgcagatgcatggtcgaaagctcatcccgatgaagaaattggcttgatcccttgtgcggaaggtggcagttcattgaatgactggcatccggaaggcatcctttttcagcatgctttgtccgaagcccgcttcgccctccgctccagtcaaatttgtggaatcctttggcaccagggtgagagtgacagttatcgttcgctacatgaaacttattacgagaaattaacccttatcatcgagacgctaagaaacgagttgaaacttgatgaggtaccgttgattattggagggcttggtgactttcttgggaagaccggttttggacagcacgcgaccgaatttcgacaggttaatgaacaattgctgcgttttgctaatgaacaacagaattgttattttgttgctgcggcaggtttgactgcgaatcctgatggcattcatttagatgcagcttcacaacgcaaattcggttaccgctatttcgaggctttttcgaaaaagtaccatatcctgaaacccatttcgggagaggagcaatcactgaaagtgaatggtgactattctaaaacagaacagatttaccttcacagcatggatttggcttcgggtaaaatcacgtacgcggaattcgaggcgcggatggcgatggtgatgaaaccataa

SEQ ID NO: 3267 - DNA, 246 bp, Bacillus licheniformis
atgaaacgggcagcgatcatattcattcgattctaccaaaaggcgatatcccctcttttcccgccgacttgcagattttatccaacatgctccaactatgggcttgaagcgattcaaaggttcgggtttatcaaaggcagttatctgcttattaaacgattactgaaatgccaccctcttcatccgggaggctttgatcctgttccaagcaaaacagatcaaaaaaaggaaggggattcagattaa

SEQ ID NO: 3268 - DNA, 243 bp, Bacillus licheniformis
attaaacctggtctgccttatttagacatcatcagggatatgcgaaattctctccagattccgctggtttcatatcaagtaagcggagaatatgcccaaataaaagccgcatcgcaaaacggctggattgacgaaaaaaatacagtgttggaaagcatgcttgcgatgaagagggccggtgcggatcttattgttacatattttgcaaaagatatagcaaaatttcttcgggaggaatcatga

SEQ ID NO: 3269 - DNA, 393 bp, Bacillus licheniformis
atgagattaatgcacctgggtatcaatgcatttgtaacaggagaaaccgtaacacctgcatttaccgaaaacgacttgcttatcgtgggcacaggatcagggaaaacagaaagtttgcttcatatggcggaaaaggcaaaagatatcggaggcactgtagcggcagttacgacctcttcagattcgccaatcgctgaaatagctgatctgatcctgcagctgccgggttcacccaaggatcaaacgacgggcagtaaacagactatacaaccgatgggatcgctttttgaacagactcttttattgatttatgatgctatcatattgcgaataatggaaataaaagggctgaatactcataacatgtacgcaaatcatgcaaatctggaataa

SEQ ID NO: 3270 - DNA, 633 bp, Bacillus licheniformis
gtggaattacagttagcattagatttagtcaatataccggaagcaatcaaagtggtaaaagaagtagaagaatacattgacattgtagaaatcggtacgccggttgtgataaatgaaggccttcgtgcagtaaaagagatgaaagatgctttcccgaatttgaaagtgctggcagaccttaaaattatggatgcggccgggtatgaagtaatgaaagcctcagaagcaggagccgatatcatcaccattttaggagccgctgaagatatgtctattaaaggcgctgtagaagaggcaaaagctcaaggaaaaaaaatcctggtggatatgatcggaattaaggacatcgaatcacgcgctgccgagttggatgaacttggtgtggattatatttgtgtgcatacgggttatgatcttcaagccattggccaaaattcatttgcagacttaatgaccattaagaatgtagtaaaaaacgctaaaacggctattgcaggcggaattaaattggacacattgcccaaagtcgttaaattaaagcccgatttgattattgttgggggcggtattgcaaatcaagatgataaagctgcggcagccgcaaaaatgaagcagatgatccagcaatcatga

SEQ ID NO: 3271 - DNA, 348 bp, Bacillus licheniformis
atgtcacgaatggagaataaaacatttaattgtgaaaaggagttgacgctcaacattatcggaggaaagtggaaaatgctgattttgtggtttttaggaaaagaaggtacgaaaagattcggagaattaaaagccctgatgcccggcattacgcaaagaatgctggtgaatcagctgcgtgaattggaagaagatcatattgtacatagggaagtatatccggttgttcccccaaaagttgaatattcccttacaaaacagggagaaagtttaatgcctatattagaggcgatgtatgagtggggtaaaaattatatagaaaccaacttttcaaaagatgacaaatag

SEQ ID NO: 3272 - DNA, 1059 bp, Bacillus licheniformis
atgactgaacaaaccattgcccataaacaaaaacagttgacaaaacaggttgctgcgtttgcacagcctgataccaagaacagtctgcttcagcttttgaatacgtttattcctttcttcggactgtggtttcttgcctatttcagcctcaatgtctcctatctccttactttaggaataacggtgattgccgcagggtttttgacgagaattttcattatttttcacgactgctgccatttatcctttttcaaacaaaaacgccttaaccatattctcggttttttgacaggcgttctgactttatttccttatcttcaatggcagcacagccattcgattcatcatgcgacaagcagcaacctggataaacggggaacgggtgacatctggctgctgacggtaaatgaatataaagccgcacctctgcgcacaaaaatcgcatacagactttacagaaatccgtttatcatgtttattctcggaccgatttatgtctttctgatcacaaaccgctttaacaaaaaaggagcaagacggaaagagcgtgtgaacacatacctcaccaaccttgcaatcgcggcattggctgctgtctgctgcctgatttttggctggcaatcatttttgctcgtacaaggtccgatctttctgatctcaggttcgatcggcgtttggctgttttatgttcagcacacatttgaagattcttattttgaagcggatgaaaattggagctatgttcaggccgctgtggaaggaagttcgttttataaactcccgaaactgcttcaatggcttacaggcaatatcgggtaccaccatgttcaccatctcagtccaaaggtgcctaactataaacttgaaaccgcacatgaacagcacgaacctttaaaaaacgtcccgaccatcactttgaaaacaagcctgcaatcactcgcgttccggctttgggatgaagaaaaaaagcaatttgtaacctttcgggacatgaaacaaacatcttcccatccttcgccggattcaacgaaaaaacagaagctgcggaagaacgcctga

SEQ ID NO: 3273 - DNA, 1113 bp, Bacillus licheniformis
atgttcaaaaaacattttacatttcaaaaactgaacgggatctcgccgtatatatggacaatatttttcatccttcccttctactttatcatgcaatcatcatctacacttgttatcgtcgtcggcatcattttgacgcttttattttttgcggtatacagatttgcttttgtctcaaaaggctgggacgtttatttgtgggcgtttattttaatcggcatttcaaccgcttcgattatgatgttcagttatatttattttgctttttttatcgcatattttatagggaacattaaaaaacgggccccttttcatattttatattacgtccacttaataagcgcagccgtcgctgccaacttcagtctcgtgttaaaaaaggaattttttctgacacaaattccctttgtggtcatcaccctcatcagtgcgattttattgccgttcagcattagaagccgcaaggagcgtgaacgcctggaagaaaaactcgagtatgctaatgaacggattgccaatttggtaaaattagaagaacggcagcggattgcccgcgacctccatgatacacttggacaaaagctgtctcttatcggtttaaaaagcgacttggcgagaaaattaatttacaaagatcccgatcaagccgcgcgtgaactgaaaagcgttcagcaaactgcgagaacttctttaaatgaagtcagaaaaatcgtatcctccatgaaaggcatccggctcaaggatgaaatcataaacatcaaacaaattcttgaagcagccggcattgcgttcatctatgaagaagataaattgccggaaaatatctcattgcttaatgaaaacatattgagcatgtgcttgaaggaagctgtcactaatgtcgtcaaacacagccaggctaagacctgccgcgttgacatccagcagctctggaaggaggttgtcattacagtgactgacgatggaacgtttcaaggtgaagagaagtgcttttcaaaaggacacggcttgcttggcatgagagaacggcttgaatttgcaaacggaagcctacacattgatacaaaaaacggcaccaagcttaccatgtcaattcctaacaactcaaaataa

SEQ ID NO: 3274 - DNA, 600 bp, Bacillus licheniformis
atgattagtatatttattgcggaagatcagcagatgctcttgggcgctttaggatcgcttctgaacttagaagatgatatggaagtcgtcggcaaaggcactaccggacaagatgccgttgatttcacaaaaaaacatcggcctgatatatgcattatggacattgaaatgcccggaaagacggggcttgaagctgctgaggaattaaaggatacaggctgcaacattattatcttaaccacttttgcccgccccggctattttcagcgagccattaaagcaggtgttaaaggctatttgttaaaggacagcccaagcgaagagcttgcgagcgccatccgcagcgtcatgaaaggaaagcggatctatgcgcctgaactgatggaagacatgtacagtgaggccaatcccctcacagatagagaaaaagaagtgcttgaacttgtggctgacggaaaaaacacaaaagaaatcgcccaagaactcagcatcaaaagcggaaccgtacgaaattatatctcaatgattcttgaaaagcttgaggtgaaaaatcggattgaagccattactcgttcaaaggaaaaaggctggtttaaataa

SEQ ID NO: 3275 - DNA, 1050 bp, Bacillus licheniformis
atgagcagaaatgaattgtttgatgtgaccgttatcggcggaggtccggctgggttatattccgccttttacagcggactgcggggaatgaagacaaagattattgaatatcagccgatgctgggcggaaaggttcacgtttatcctgaaaaaatgatctgggatgtcgggggattaacgcctatttccggagccaagctgatagaacagctggtgcagcaggggttaacgtttcatcctgaagtgctgctgaatgagaaagtcgaatcgattgcccgcaatgaagaagggttgtttgaattacatacggctgcctcaggtgtgcatctttccaagacggtcatcgttgccgtgggcggcggcatcctcaatccgcaaaagcttcagatagaaggcgcagagcgttttgaagtgtccaatctgaattatacggttaagtcactgcagcattttaaagataaaacggtcattgtatccggcggcggcaattcggctgtcgattgggccaacgaactcgaacctgtagcgaaaaaggtctacctcgcttaccgcaaagatgcgctcagcgggcatgaggcccaggtggatcagcttctgaacagctcggtgagctgcttctttcatacagagattaccaagctgatcgcttcggaagatcatgaggtgatcgaacgggtcgagctcacgaacgctcaaacaggtgaggtgatggaactgcctgtcgacgaggtggttatcaaccacggatatgaacgcgacacctcacttctggagaacagccgccttgatgttacccgagtggatgactattatattgcaggtacttccaactgccagtcttccgtgcccggtctgtatgcggcgggggatattgtgcattacgaaggcaagctgcacctgatcgccggagcgtttcaagatgcggcaaacgcggtcaacagcgccaagcgatttatcgatcccgaagcgcacaagagtgcgatggtgtcgtcgcataatgaggttttcaaagagcgcaaccgcgagcttgtcaagaagatgttcgtgtag

SEQ ID NO: 3276 - DNA, 1623 bp, Bacillus licheniformis
atgatgagcggaaggaatagtttgaaaattaaaattatttttatattaatgctcgccttttctattttattagccggatgtacaacctcaggaaattcaacagagaaaactcatgaaaacttggtcacaatggcttggcctagagatataggcgaaatgaatccgcatgtgtataatccttcccaattatttgcccagtcgatggtatatgaacctttggttacctatgaagcgggaggaaagcttaaaccgcatttagccgaatcttgggatatatcaagtgacggtaaagtatatacgtttcatttgcgtaagaatgtaacattttcagatggaacgaagtttgatgcgaaaattgtgaaaaagaattttgactccattttaaaacatactgaattacatagctggttagggtttatttcaaaaatagcccaaacagaagtgatcgatgaccatacatttaaattaaaattgactgaaccatactacccgaccattcaggaactagccgttgtacggccggtccggtttttgggagaagcgggcttccctgaggacggcgatacatcaaagggtgtcgaaaaaccggttggtacgggcccatgggtattggaagagcataaagctgatgaatatgcggtttttaaacgcaatgaacattattggggtgaaaagccaaaagtcgagaaaatcaaagtgaaagttatcccagatgccgaaacaagggtgctagcatttgaaaaaggcgagcttgatctcatttacggcgaaggcgttatcagtttggatgcatacaagcagctgcaatcgacaggtcaatatgaaacaagcctttctgaacccgtggcgacgagacagctcgtcatgaatacgaaaaaagaacagctttctgatgagcgcgtgcggcaggccctgcaatacggttttgacaaagaagccatggtgaaaggcatcacctcagggttagaagaaaaagcagatcatattttgccgacagacttcccatacacgtctgatattgatgtaaagcaaatcaactatgatacagaaaaagcaaaagagttattagatgcggccggctggaagcttccgaatggcaagaccgtgcgcgagaaagacggaaagcctcttgaatttagtttaatgtatgattcagctgaatccattcaaaaaacaatggctgaaacgctgcaggcagaatgggcagcgatcggggtaaagctgaatcttgaaggcgtagaattggcaacccaagtcaaacggtttaaggcaaatgagtttgatatgaacttctttagcaactatggtgcgccttatgacccgcatacatttttaaacattgtcgcgtccaaaggattcggatttaatgaagcgatctcagcctatccaaacaaggacgagctaatcaaacagatggcaaaggtgcctcaaacgactgatgaaaaagagcggcaggagctttactcatctattttaaaatcacttcaagaccagggagccatcgtacctgtttcttacattaaaaagacggcgatatatcaaaagaatatcaccgactttacgttccctgctaaccgtgacgaacatccatttacaggcattcgcgtcaagcagcaacactag

SEQ ID NO: 3277 - DNA, 945 bp, Bacillus licheniformis
atgggcaactatatattgaaacgaatcatgtcgattattccagtttttcttttagctgcacttctgacaactggaatgattcatctctcgccggttgacccagctgaagcatacttagccgcagcgcatatccagccaactgatgaaattttagcgcaaaaaagacatgagtttggcttggatcagccattttttattcaatatgtaaactctgttttgaagatatgccagcttgattttggcatatcttatgtttcaaaccagccggtttgggacgaagtggcacaccgaatgccggcaacggtcgaacttgcgcttgggagtttattgattgcggtgcttgtcagtgtgccgctcggcttcttagcgggaatcaaaagaaatggtgcagttgatcatatcagccgcttcatttcctttttcggggcatccatcccaactttttggttagggtatatgctggtttttttcttttctgttcaattagaccttttcccggtagagggcgctgggacatggcagcatctcgtactgccgtctatgacattggcgcttcctttaattgcgatgtatacaaggctgctccgtgcaaacgtcatcgaaaacctgcaggaaccatatgttcaatttgcacgcataagaggaatagcgaagttgaacattatggccaaacatgtattgcgaatggccatttctccgatgattacgggtctgggaatgaatcttggcaagctgcttaccggcacaattattgttgaagtcgttttttcttggcccggctttggccgttattttattgaggccattttcaatcgggacatccctgtcattcaatgctatgtgttcttagccgctaccttttttatattgagcaacttaattgttgatctcattcaaatgtatattgacccgcgcatttcaagaaaagaagggcagcatcgatga

SEQ ID NO: 3278 - DNA, 834 bp, Bacillus licheniformis
atgatgataagtatacgcaggatattcaaaggccaaaaagtgattacggtatgcaccactatattaaccatcctttttattatcgctgtattcgccccttggattgcgccgcaccatcctgctgatgtccatatggtatataagctgcagcctccatcctgggaatttcctttaggaactgatcatctgggaagatgcaacttatcccgccttttgtacggcgcccggatttctttgggattcgcgatgcttattttcatttcctccctcgttatcggcctcattgtcgggacgatttcagggtataaaggcggctggattgaccagctgttaatgatatgctgcgatggtgtaatggcctttccgaacttaattttagttcttggcctcgtgggcattttcggccccggacttcctcaagtcattctggccctcatgcttgtgcaatgggtctattatgcgagaattttcagaggaatggtgctgagtctgaaagaggagaactttattgcggcggcaaaaatcaatggatcttcacaatggaaaatcattaaaaatcatatcatccctaatgtcctccctcccctcgtcgtcatcggtacgttggaaatgggctgggccattatggatatctcggctatgtcttttctcggcttgggcgtccagcccccggcggctgaatggggagcgatgattcatgaaggtaaatcgtatattcggtcgaatcccgggttaatgatttatccaggggtgatgatcatgattgtggttgtgacattcaatttattgggcgaagccttatcagatcaatacggtgtcaaacgtcgattttaa

SEQ ID NO: 3279 - DNA, 819 bp, Bacillus licheniformis
ttgggaacagaacaatcaacggtgcttcgagtcagagatttgcatgtacaggttaacaaccaaaaaggacattcaacccttgtgcaagacatcaattttgatttgaagcgcggccaagtccttggtctgattggtgagagcggttgcggaaaaacggtaacaagcatgtctattcttcagacgcttgatccaaaaacaactaaggtggaaggaagtattgcattgcgaggccgtgaattgaacggattagcagataaggaaatgcgtaaaatccgcggcaaagatattgcctatatcatgcaaaatccgatgaacgcttttacacccgtttttacgataggacagcaaatgaccgaatcgattcgctctcatacatcttttagcaagaaacaggcgaaagagcttgcgaccgaagcattgcatcatgtgaacctaccccaccctgctaaacttttacattcttatccttttcaattaagcggcggaatgcttcaacgggtcatgattgcaattgcatcatgcttaaagcctgccattctcatcgcggatgagcctaccactgcgctcgacgtgtataatcagaagacggtgctgaaatatttagacggcatgcgttctgacttcggcacggcgattttgcttatatctcatgacctcggcgttattgctgaaatggcggatgaagttgctgtgatgcagaatgggagaattgtagaaaatagagatgtgtttcagctgtttgatgaaccaaagcatgaatatactaagaagctattaagtgcacggttgacattgccggtggatcaacttgcgacttga

SEQ ID NO: 3280 - DNA, 819 bp, Bacillus licheniformis
gtgagtttattacaagtgaaagaagtcactcatcattatacagcgcgcaaattattcaagtggaaaattcaatcgaaacaagtcctttccaatgtcagcttttcgattgaggaaggcgcatgcttaggcatggttggaccgagcggagccgggaaaagcacattgggaaaagtgatgcttggtttggagcggccgcaatcggggcaaatcttttttcaaggacatgatctctataaagcagatcagtcaatccggcggaaaatccgccgcgaccttcaagctgtttttcaagactcctattcttccgtcaacccgagaatgacggctgaacaaattctagcagaaccgctagaaaactatgaaaggctcacaatcgctgagaaaaaacggaccattatcgagctcttggaaagagtaggcttaactgaaaaggatttaacaaaatatccgcaccagttcagcggcggccaattgcagcggattaatattgcaagagcggtctcgctcaagccgaagctgatcgtattagacgagtctgtcagcagcctggacatggtaacccaaacgcttatattgggtttattaaaagagctcaaagacgatttcggaatgtcttatttttttatcacacatgatttaaaagccgcctatcaattgagtgatacactaggtgtattagaccacggccaattggccggactttacgataaacatcgttttttaaagtcagaccacccggttgtacaagaaatgaagcgttccatactggcagaacacccgcgctttcgttcgatcagaacaagagcggttcggcaataa

SEQ ID NO: 3281 - DNA, 834 bp, Bacillus licheniformis
atgaacaatcgattccgtgtaggagaagtagcaagacttttcaagctgcctgcatcgactctgcgttactatgatgaaatcgggctgttcaggccaaagtataccgatcctgaaacatcttatcgatattatggtgttgaacaatttcagatcctggatacgattatttttttaaggaaaaatggattttcgttaaaagatattcagcatcagttagatcaaaggactccggaaacaacgatggaaattttgaagaaaaagcttgaggaagtcagagcggaaatttttcgtctccaacgcaacgcggcgagaatcgagaacaaaatttccacaatcgaagaaggaataaaacttgccgaacatcctgctttaacatttcagtatttcccaaaacgggctatttcctacctgtattttgacaagcctgtcgacctgatggaggaaggcgacgacatttatttaaaggataaagaaacgctttcaagccagtcgattgagaataacggcttcttcaccggagacattggaacaatcgttgatatggagagcttgaagcaagaaggaccggtaaaatatatcggcgtatttgaattgctgcacgaggaagacagtgaagactatttaaacgaagggttgtatgcgagttacccccatattggtccctacgaggacatcaggaaaagttatcagctcgttttaagccagctgaaagagaaggaatacgagctggcgggaatccctgttgaaatctcatttcttgatgatgctgtgatcaaggagtcagctcgttatgtcactttaatccaaattccggtaacaaagagttttgattga

SEQ ID NO: 3282 - DNA, 1353 bp, Bacillus licheniformis
atgacagaaacacatcagcagctcatgaaattaccagtaaatcaagtgttttttaaatatttcgtccctgcaacgcttggattaatcctgatgtcagcgaatattttaattgatggcctgttcgtaggcaatggcattggaaccgcagcactggctggagtgaagctttcctatccggttatttcactcattatggccatcgctctttggattgggataggcggagcaacaaagtactccatcagcatcggggagaatcgccccaagaaggccagcagcattttttcattggctctcttcttggcgcttatcatcagcgtgcttttaggagtattcgggattctcaacattcaaaccatttcgatatggcttggtgccaactccgacacctcttcttttgtcatagagtacttaagtgtcatgtttttattcggctgggtcattacattagaacaggtcttaagtatttttgtaaggaatgacggcagtccgaagctttcgatgatggctcttgcaacgacatcgattgtgaatatcattctgaatttttatacgatcatgattttggacatgggggtaacaggcgctgcgatttcaacggtgcttggcggattcgccggactgcttgtattatccctgcacttcttcaaccgtcaagcgcaactgagaaggccggcgtttcagtggtcttggaaatcccttatgcacatctttgccatcgggtttccatgctttctggcagaggccgggctcctcgtatttgttacaggatacaacttggcaatggcaagcctggcaggcacggaaggagtcgctgccttctcggtcattaactaccttcacgggttcatgttcctgtccttcttcggcattgaaatggcacttcagcccatgattagctattatcatggtgctgaagaaaccgaacaaatcaaaagcagcatgaagattggggagaagaccgccgtaatcctgggcatacttttgctcgttatcggctggggggctgccccattccttgtaggcttattcggaatagaatcaaccgaaatccagcagctggccatcgatggaatccgcctgttttttatcggctataccttccttggctataactttgtctatatgagttactttcaatctattggccgggccggctcatcggttgttatcattatattgcgaagcttcgtgtccctgttcatcctgctttggattttgccaaagtttattggcgtcacgggagtttggctatccttgccgctttccgagttttttgttgccgtcctcctctttttcattgcaagaaaacatgtgatgggaaaaggaaatcccgctatcgggaagggatga

SEQ ID NO: 3283 - DNA, 1008 bp, Bacillus licheniformis
atgtctcatactcgaattaaattcccggcaggattttgggcaggattgcgtcaattaggaattaacgcccctgatgtgcttcgaaaagcccggctgccgctcaccgtgatgactgaaccagttgtcaccgccgcccaatacttcgcgatctggcaggcgtattccgaccttgttgatgacgtttccaaaggaatcatcaagcttgcgaccggctttgagccggcacattaccctccggccgtattagcggcttaccatgcccgtgactaccgcggcgcgctaaaacgaatggcccgctacaaacaattatgccctcctgaaagcctgcgtatcaccgaagaagatgagcactgcgcaatcgaactggaatggttggatgataagctacccggtccgccgctcttgattggcattacactggcatttcttctggaactcgggcgccggggcacaggtcagccgttgacagcgaagtcggtcgagtttgcacacccaatgggcgacatgcaggcgcttgaagcatacttcggctgacgcatccggagcggtgcagctcggaaccggctgacgctgaatcgaggagatcttgaccgcccttttgtctcgtataacgcggagttgctggagattttgactcccgtgctggatcaatcgttgaatgatcagcaaaatagcctttcaatcagcggagcggtcaagtggatcatgaaacgcacgcttccaggagggcaccccgacattcagactgttgcgagcgagttgggaatgagcggccgcaccttgcagcgccggcttactgacgaaggcactagcttcaaacagctgttgatccaagtcagacatgagcaggcgcgggagtacttggcagacccttcgctcgatattaaagaagtggccattctgatcggatatgaagatcagaactcgttctaccgggccttccgcctttgggaaggcgagactccttctaattggcgtaagaagacccggctgaatggatttaactag

SEQ ID NO: 3284 - DNA, 795 bp, Bacillus licheniformis
atggatatgggattaaaaaataaaacagctttagttaccggaacgacgaaaggtataggaaaagccatcgctattgaacttgccaaagaaggtgttcatgtactcattaacggacgaaatgaggaagaggcagaacgaacagtcaatgaaataaaatcagcttttcctgacacctttccccaaaacgccgcggctgatattgtggatattaggcaaagggaagctttatttaaaaaacaccctcaaatcgatattttagtaaacaatatgggcatttatgaactgatgcaatatgaggacgttgacgatgaagtatgggaaaaatacttccgcaccaatgtgctggctgcaaacggtttatctaaattttatttgcctaaaatgctgaaaagtgattttggccgcatcatctttatcgcaagtgaagaagcgatgatgccttcaggccagatgcctcagtattgtatgacaaaatcaatgctattatcattgtcaaaaagcttatcaaaattaacaatcggaacagaagtgacagtcaatacgatcatgccggggccgacgctctctgagaatgtgaagcaaatcactgagggaatgtaccccgatgaagggatgactttttcagaaaaagagaagaaatttatgacgacaaacctgcctcaatccgaaatacagcgatttatcaagcctattgaaatcggcagactggctgcatttgtatgcagtccctatgcatccgcatttaaagggtccccgatccgtatggacgggggaatggtgccgactattttttaa

SEQ ID NO: 3285 - DNA, 1791 bp, Bacillus licheniformis
gtgagaatgaaacgattaaggatgaggaagcatttactgatagctgtctgtactttggcacttcttctaagttccccgattgtaagcgatgcgagcccggcaactaaaccaacaactgcagattcgccgcaatcttccggatttttcgtagaccattacaaaaataatatctctgccaatacgacggcggaatccaatcctgtcatcggcctgctttccgaatttaataaactttggactcccggaaagacatggaataccggtactaaactgaacagcagggtgctggatgccaacattcaaaaagtcgtggatattgctgaacgccgcacgatgcttgaggaaaatgctgcctattttgatgatcggcggagccagagctacagtataattgacggcctcggcaagcttgccggcgtctatcgaatgaacgcgggagcgacgacaacgatcaccagcattccggcagatgcctcgattagaaaatacaatgatgaaggaaccaattcgggcagcaccagctctgaacttggaaatgtcgtaagtttggtcaatactttacgcggcaactattcttcatcgaatccggctaaaagctatttcaactatccccgcccgtttcgctggaaagacaattcgatcattgttccaacgcttatccccgtcatcaatcctgatccgaacaaagacggaggttttccaagcggacacacgaacgccgcatatctcagcgcttttgctatggcctatgcgataccggagcgttatcaggagctgctgactcgcgcttcagaactcggtcataaccggattgttgccggtatgcattccccgctggacgtcatggggggacgagtaatggcaacggctttgtctgcagcaatcctgtctgaccccgcaaatgaaagattgaagaaaacggcttttgatgaagcccgccgtaaattattaacgcaaaccggtacagctgaagacagatacagcgattatgagaagaataaaaaacaatatacggaacgattgacatatggatttcgtcaaatgaacaaaaccgccaaaccaatggcagttccaaagggagccgaagttctgctggaaacacgttttccttaccttgacaaaaagcagcgccgttcggttttagccactaccggtcttccggccggctaccctgttcttgatgatcgagaaggatggggaaggcttaatctcttttccgcggcagatgggtatggggcttttaccaaaaatgttaccgtgaccatggattccgcaaaaggcggcttccatacagccgatcgctggcgcaacgacatctccggcaccggaaagctgaccaaaaaagggacaggcgctttgaagctggaaggggataatacatattccggcggtacacggattgatcaaggaacacttgagggcggttcggagacagctttcgggagaggtgatgttgcactaaacggaggcatccttaaggaagatgcgccgggaaaactgatcatcgaaggagactacaaacaatctgctaaaggaatacttgaacttcagctcagcggcaaaaaagatcagttgaaaattaagggaaaagcaagattgaaagggacattgcgtctcaattttacggacaattacgtaccggctgacggatcggcgatcataaccttccgcaagcgtcatggatcattttcttccgtcgagaccagtggattgccaagcaagtataaagtgaagatcatctataaatccaacagtattcagttgaaagttgagcaaaaggggagaagctga

SEQ ID NO: 3286 - DNA, 828 bp, Bacillus licheniformis
ttgagaggattcatcaaatgggcaggattggcgattctgtgtattggcttgtttgcgtgtacttctaacaggaatgccgaaaatgttcattatgcaaaagacgacagacaaacattggatatttatacaccgcagtcaaacgagggcgaaaaacatcccgttctcatctaccttcacggcggaggatggacaagcggcgacaaaagcagggctgcttcgaagccggcattttttacggataacggctatgtttttgtatctgtcaactatcggcttcatcccgatgttcagtatgatgaaatggctgatgatgcggccaaggccgtaaaatgggtgatggatcatgcggacgagtatcaaatcgatccgtcaaaaatcaacgtcatgggacattcggcagggggacacttggccggattaattgccgcaaattcaacatatttaaatcgtgtcggcctcacgccggccgcactcaattcgattgttgttttagatggccccttggatatgaaacgattcatcgaagcgatcccgtcttataaagaagtgtttggcacagacgaaaaggtgtggacaaaagcatcgccgctctcatacataaacaactcaaaattgccgccggcctatcttgtgacccgctgggaagaccctgccgtttacaagttcgcggaaaccgcaaacaaagcgaaggcaacggaatttgtgtatcaagtcaacagcttatctcacagtgatttaaacaagatgttcggctctccagatgcaccggcagaagcgcagaatctgacaaaagcggttatggcgtttttagagaaggaaaataaatag

SEQ ID NO: 3287 - DNA, 150 bp, Bacillus licheniformis
atgatgggatttgcgatcagctgtgatgtgctatctgccatttcggcaagagaaggtatggaatgttttcatcttgaaaatagaacatcagacgatgagacgttcatctctatcacaaggctcataaaaaaatcgtactccccgatatga

SEQ ID NO: 3288 - DNA, 1225 bp, Bacillus licheniformis
atgtcttcaaaacaagaggagagcgtcgccatattaactgagagagaattgtcttctgcagcatttaaagatgaggcgtatgaattttacaagcgattacgcgcttcccgtcctgtctgtcccgtatcgatgggggagctgggcgaaggctggctcattacgaggtacgatgatgcggtccatatattaaaggatgcaagagtgaaaaaaaattacgaaaatgcgtttaccgaagaagaattagagaacttctccgctctggaaaatgaagaacctttatcaaagcatatgctcaacgcagatccccccgaccacggccgtttgcggtctcttgttcagaaagcatttactccccggatggttttacagctcgaaaacagaatccaaaaaatagctgattccttattggatcaagtagaaccgaatcattccatgaatcttgtagacgacttcgctttcccgctgccgatcattgtcatcagcgagatgcttggtattccgcttgaagatcggcaaaaattcagagtttggtcccaggcggttattgatttttctgacacgcccgaaagcctggaggaatacaagtataaaataggcgaattcgctgaatacctggaatatttggtacgcaaaaaaagggacgagccggctcagtgcattaattcaggcagaaagcgaaggaacgaaattaagcatagaagagctgtatgcgacgattatgcttcttatcgtcgcaggacatgagacaacggtaaacttaataaccaatatgaccttggccttgctgaaccaccctgagcaactggaaaagcttcgccaaaacgcagatttaatcgactcagccattgaagaggcgctcagattttacagccccgtggaattaaccaccctccgctgggcggccgaaccgtttacattgcacggccaggagattaagagaaaagatgtggtcatcatttcattagcctcggccaaccgcgatgatacggtcttttcgaatgccgaccgctttgatattgaaagaaaggataaccgccacctagcctttggccatggcagccatttttgcctgggcgcaccgcttgcccgattggaagccaaaatcgccattcaaaccttgctgcgccgctttgaacatatagagattaaaggcgaaagggagcagatcaaatggaaaggcaactttttgatgagagctttagaagagctgccattatctttttaa

SEQ ID NO: 3289 - DNA, 888 bp, Bacillus licheniformis
atgaaaaagctgattgtgtttgtcttgataggattatttgcgcagctgatagatggcgccttagggatggcgtacggggtgacatcgtcatcattgctgcttgccttcggcatcgcaccggcggttgcgtcagcatccgttcacctggcggaagtcgttacaaccgcggcatctggtgtgtcgcatataaagtttggaaacgtcgataaacaaacggtcaaacgactcgtcatcccaggatcgctcggggcatttctcggcgcttcctttttaagcaacattccgggtgagcttgcgaaaccttatatttcaatgtttctgcttgttctcggcgtgtatgtgctcattcgatttctattcatgtttaaaataggagagcaaaaaaacaatatcagcctttcgagaaaaaaagccgtccccctgggattgatcgcgggttttgccgatgcaaccggagggggcggctgggggccgattgccactcctgttttgttatccaaaaaaggcgtcagtgcgagaaaagtagtgggaactgttgacacaagcgagtttgccattgccgtttcggcaacgttaggatttttcatttcgctcggctgggaagaagtcaattggctgtgggttggtgcattgatgattggcggaattattgcggcaccgattgccgcctggctggtgcagaaggtgcatgcccgattaatgggcgttctggtcggcgggctgatcatcctcgtcaacacaagaacgcttatccattcgtggatcgatcaaacagcattatatccggttatttatattggaattatcgcagtttggatatcagctattgtctatattgttgtaaaaataagaacaagtgatcaaactgctcaagcgttcaatcagtaa

SEQ ID NO: 3290 - DNA, 381 bp, Bacillus licheniformis
atgaaattcagcaaaatcggtgccttactgctcactttggcgtgtttgcttttgcctttttcttcggcgactgcagcaggtgccggtgtatgggataatatcggcacatacggcatgacgtcgcaaactccgatcatcaaatcaagcggagggaaattttattttcacaacaacagcttttacggctttacatttacgctgtatgaagttgacggggcgggaagcacgcctgaaatcgcaagaaaaaatttctacgtcggaccgaaaagcaacagtccggcgatcgatgtcagcagttttacagatggtgcgaataaacaagcagaactcgtcctgtttaaagggaatgatacatatatcaccgttacttgttatgattga

SEQ ID NO: 3291 - DNA, 219 bp, Bacillus licheniformis
ttgatccctccgttttcttttcattataaacagaacaatgtcaaacaaaacatcaattatgattatggaacagaagacaccaaaacggaagtacgcacttttaagtcatataggcacttttttgtgcctataggtataaggagggaacttgatcaaaaaaacccgccggctgtaaacggcgggcttgctgtttatgggacattcaatcataacaagtaa

SEQ ID NO: 3292 - DNA, 795 bp, Bacillus licheniformis
atgaacttggatttacggggaaaaagagcgttggtgaccggatcgacgtccggaatcggcaaagcgattgccacttcacttgcgaaagaaggtgcgtctgtcatcattaacggacgccggcaagaaaaggtcaaccaaacaatagacgaattgaaaggccaatttcccgaggctgttcttcaagcggccccttatgaccttggcactgaaaaagggtgtcaaagcctattagcagcattcccggatgttgatattctggtcaataatttagggatctttgaaccggcggaatatttcgagataccggatgaggattggttccgctttttcgaagtgaatattatgagcggggtaaggctctcgcggaggtatttgcaaagcatgatcgagaaaaaagaaggccgggtcatttttattgcgagcgaagccgcggttatgccgtcacaggaaatggctcattacagcgcaacaaaaacgatgcagctttcgatttcccggagcctggcagagcttgcggcaggtacaaatgtgaccgtcaatacggttatgccgggctcaaccttaaccgaaggcgttgaaacgatgctgaagaccctctatccggatgaaaacctgacagtcgaagaagcggaaaagcggtttatgaaagaaaaccggccgacctctatcatacaaaggctgattcggccggaagaaatcgcgcactttgtcacatttttaagcagtccgctttcttcgccgatcaatggtgcagccttgcgtgcggacggcggattggtccgcagcgtcttttaa

SEQ ID NO: 3293 - DNA, 2034 bp, Bacillus licheniformis
atgaaaaagagaatgattcagatggggatcataggggctatgatgttcccggaagccttttccgcagctgctgccgacccggactactataacgaggatcatcggcccaagtatcatttcacgccggaagcaaactggatgaatgacccgaacgggatggtgtattacgcgggggaatatcacctgttttatcaatatcatccatatggcttgcgctgggggccaatgcattgggggcacgcggtaagcaaagatttagtcaagtgggagcatttgccggtcgcactgtatccggatgaaaaaggaacgattttttcgggcagcgctgtcgccgatcggcataatactacagggtttcaaacagggacggagaagccgctcgttgccatttatacgcaggaccggagcggggaacaagtgcaaagcatcgcctacagcaatgacaaaggcaggacatggacgaagtactcaggcaaccctgtcattccaaatccgggaaaaagagatttccgcgatccgaaagtcatttggcatgaacagacaaaaaagtgggtgatgttgcttgcggggggcgatcgaattctgatctatacatcgcctgacttgaagcggtggacatatgcgagcgaattcggcgaaggagagggcagccatggaggcgtgtgggaatgtccggatctgtttgagcttcctgtagagggcaggccgaatgaaacgaaatgggtaatgcaagtcagtgttggagacggtgctgtctcaggaggatcaggcatgcaatatttcgtcggcagttttgacggaacaacctttaaaaatgaaaacccgccgaatcgcgtactatggacagattacggcaaagacttctacgcagctgtcagctggtctgatatcccgaagtcagacggacgaaggctttggttagggtggatgagcaattggcaatacgcaaacgatgttcccacttccccgtggagaagcgcaatgtcgatcccgagagaagtaaaattgaaagcgttttccgaaggacttagaatgattcaggctccggtagcggagctgcagtcgatacggggagcatcgcaaacgtggaaaaacaagatcatttcgcctcgaaacggaaatttgctgaaagggctgtcaggcgatgcttatgaaatcaatgcggaatttcaagtaaataccggagctgcggccgaattcggctttaaagtccgaacaggggaaaacgagtatacgaaaatcggctacagcaaaaacagcgcttcactgttcgtcgaccggagccaatcaggaaacgtctcctttaatccgaactttaacactggaaagcatgcggccccgctggaaccggtcgctgggaaggtgaagatgcgcatttatgtcgaccgctcttcagtcgaagtattcggcaacgacgggaggcaggtgatcaccgacattattttgccggaccaatccagcaaagggctagaagtatacgcatcaaacgggtttgtcaagctgaattccatgacggttcatcctctgaaaaaagtatggggagcgtcgccctttcaatcaaatttgaccggctggacgaccgtaaacggtgtatgggccgatacgattgatggaaaacaagggcgctctgaaggagattcgttcattttatcttcagcaaaagcaacagatttcacatatgaagcagatgtcgcgataaaggatggaaatggaagaggggcaggggctctcgtgtttcgggccgatcaggatgttaaaaacggataccttgccaatgtggatgccaagcatgacgtggtgaagtttttcaaatttgaagacggctcggcctctgttattgccgaacaccgcacaccgatagaaaccggccggaaatatcacctgaaaacggtggcccgcggtgcaaacttttatatttaccttgatgatcaattggtgataagcgcccgggattcaacgtttgccgatggagccttcggtttgaatgcatgggatgcgaccgcagtcttccaacatgtttatgccaaacgatga

SEQ ID NO: 3294 - DNA, 828 bp, Bacillus licheniformis
atgggcacagaaaaaagattaacgaagagagagattttcagtatgtttatccgctcaaactttttgctcggatcttttaactttgagcgtgtacaggcgctcggctactgctacgtcatgattccggcgatcaaaaaactgtacggtccgggagcaaaacggagcgaagcgctccagcgccatttggaatggtttaatacacatccgtggctgacagcgccgatatttggcgtaaccgctgcgatggaagaagaaatggccaacaataaaaagattgatgccaaagcaattaatggaatgaaaatcggcttaatgggcccgttggcaggcgtgggcgacccgattttctgggggacgttgcgcccggttttggcggccttgggagcgtcgcttgctttaagcggaaacatcgccggcccgcttttgtttttctttttaatcaacgccgtcagattaagcactaaatactacggattaaagtacggctatgtgaaaggcatggaaatattgcaggacttggtggggaaccgcattcaaaaactgacggaaggcgcttcaatactcgggctgtttgtgatgggagctctcgtttccaagtggaccacaatcaatatcccgatcgtcgtgtcgagaattaaggatgatgcaggcaaagtcgatgtacagaccgtgcaaaacattttagacagcatcatgcctggtgtgctgcctttaggattgacattgctcgctgcctggatgcttcgcaaaggggtgaatcctctgctcatgattttcggtatttttatcatcgggattgtcggctattgggcaggttttttggcataa

SEQ ID NO: 3295 - DNA, 804 bp, Bacillus licheniformis
atgtcaacgattcaaattattttgctgctcgtcatcgctgctataacaggtataggtagtgtattggacgaagggcagacacatcgcccgctgattgcctgcactttggtcggccttgtcctcggggatctgaaaacaggcatcattctcggcggaacgctggagctgatggcgcttggctggatgaatgtcggtcttgcaatggcccccgatacggccatcgcttccgtgatttcgactatcttagtgattaccgccgatcagggaatcggcgaagggatcgccgtcgcggtggctttggcagctgcgggtcaggcgctgacgattttcgtccggacgatcaccgtatttttaattcaccgcgccgacaaatacgcaaaggatggcaattttaaaggaattgaaattatgcatataactgccatggcgtttcaggcgctgcgcgttatgattccgacattgatcgtggctctgatcagtgtcagcgctgttcaggcgtttttgggaaatattccggaagtcatcacaaaaggcttgcaaataggcggaggcattatcgttgttgtcgggtatgcgatggtcatcaacatgatgaacattccgtatttgaagccgtttttctatatcggttttttgctggccgcgttcaccgatttcaatttagtcggcttcggcgccctcgggctctgtctggcatttttatatcagcaagtgatgcaaaaaaatcatgctcaaggggcggttgctgccgccagtgacggcagcatggccgcttatgatgatgacgatgatctggatgcttaa

SEQ ID NO: 3296 - DNA, 492 bp, Bacillus licheniformis
atgaaaatcgttttggcaagaattgatgaccgctttattcacggccaagtattaacaagatggatcaaaatccacgctgctgatcgcattatcgttgtctccgatgaggtggcacaggacgaaatgagaaaaacgctgatcctttctgttgcaccttcaaatgtaaaagccagcgccgtttcgatttccaaaatggccaaagcgttccacagtccgcggtacgaagatacgacggcaatgctgttattcgaaaatccgggcgacattgtttccttaatcgaagcaggcgttccgatcgaaacagtcaatgtcggcgggatgcgtttcgagaataaccgcaggcaaatcacgaaatcggtaagcgttactgaaaaggacatcaaagcgtttgaacaattgcaagaattgggcgtaaagcttgaactgaggcagctgccgtcagattcgagcgaagactttatgcagattttaagaaacgcaacaaaatcctag

SEQ ID NO: 3297 - DNA, 438 bp, Bacillus licheniformis
atgattacagtcattatcagcggccacggaaactttcccatagcattaaaagaatcttcagggatgatattcggagaagaggagagcctgatcgcggtgccgtttctgaaaggggaaggcattcagacactgcaagaaaaatatcatcagacgctgaaggatgttccggaggaacacgaggtgctttttttagtggatattttcggcgggacgccatataacgcagcgaccccttacatcgcgaaagagcggagattcgatatggcagccggagtgaacctgccgattttgttagaggcattgagcttgagggagcatatgccgctcaaacaactgctgaaccagttgaaaaagatgagccgggaatgcttccaaatatgcagcgagcaattggaaaaattcagtcagtccaatcagggaagagaggatgaattgtaa

SEQ ID NO: 3298 - DNA, 2787 bp, Bacillus licheniformis
atgaaaagaatagataaaatctaccatcagctgctggataattttcgcgaaacgaatatcaatcagcttttaaagatacaagggaattcggctaaagaaatcgccgggcagctgcaaatggagcgttccaatgtcagctttgaattaaacaatctcgttcgggccaaaaaggtgatcaagattaaaacgttccccgtccgctacatcccggtggaaattgttgaaaacgtcttgaacatcaaatggaattcagagttgatggaggttgaagaactgaggcggctggctgacggccaaaaaaagccggcgcgcaatatatccgccgatcccctcgagctcatgatcggggctaaagggagcttgaaaaaggcaatttctcaggcgaaagcggcagtcttttatcctccgcacggcttgcatatgctgctgctcgggccgacgggttcggggaaatcgctgtttgcgaatcggatctaccagttcgccgtttattctgacatattgaagcccgattccccgttcatcacattcaactgtgcagattactataacaaccctcaattattgctctctcaattgttcggacataaaaaagggtcttttacaggtgcgggtgaagacaaagcaggattagtcgagcaggcggacgggggcattctgtttatggatgaaatccatcgcctcccgccggaggggcaggaaatgctgttttatttcatagacagcggcacatacaacaggcttggtgaaacagagcataaacgaacggcaaaagtcctgtttatctgtgcgacaacagaaaatccgagctctgcattgctgaagacatttttgcggagaattccgatgaccgtacatatcccttcgctcgatgaacggtcccttggagaaagagtggaactgacaacgtttttattggggaaagaggcagagcggatcaaaaaaaacttaaatgtgcacatcgatgtgtataatgcactgattcattctgcaaaattcggaaatgtcgggcagctgaaatcaaatgtacagctggtctgtgcgcacgggtttttaaataaccttgacaaagacgaggttgttgaactgaccgtccgggatcttccggacgagatcaaagaggactggatgtccagcagcaaaaatattgaacggagcaaaatgatttctgaatatgtcaacattacaacgatcatctctccgattgtggaagatgaagcaacgaaaatcgatgactcctttaacttgtatcatgtcatagaagaaaaagcgaaaatcctcaataaagaaggcttaacaaaaaagcaaatcaatcaatatatattaacggatattcatttgcacgtcagaagcttttttaatcagaaaatgcttcaaaaccacagtttactcaaattcgttgtagacgacgtgattcagatgacgaaagaattaaagggagtcgccgaacatgagcttgactgcaagttcgaccgtaaattcatctatttcctgagcatgcacatcgccgcatttttaaagcgcggaaagcagattgatgtcttaaattcgcaggaaacagatgaaatcagggaaacccatgtgaaagaatacgaggtcgcactcattttcaaagataaaattcaagcatatttcaaagtaaccgttccggaaatcgaagtcatctacttgacgatgctcattcagtcgattaaatcatggaaagaaaacaaaaggacgggcattgtcgtggccgcccatggaaacagcacggcaagctctatggttgaagtagccactgaactgctgggaagcaccccgatcgctgcggttgatatgcctttgaccgtttcaccctcggaaatcgtcagctgcctggcggagaaagtgaagcaggttgatgaaggagaaggcgttttaatgcttgtcgacatgggatcgcttgcgatgctggaaagcaggcttgaacaacaaacgggcgttaaaaaaaaaacgatcagcaatgttacgacatcgatggtgctcgatgccgtccgcaaggtgaattatttgaatttgaatttgcacgccatctacgattcggttacaaaggatttcatcgatttatgggccgataaaccgcgggtctcaggcaaaaagaaggcgatcgtctccatttgcacaacaggcggcggaacggcgaagaagctcgaagagattttaacatcaatcgtgagcaggacatctgatgaacaaatcagcattttgacggtgccatcgatcaaattagcaagccgcatcaaagaaattgaaaaagcgtatgagattcttgccacggttggcacgaagaaccctaaaatcgatgctccgcacgtccctttagaagtattgattgaaggcgaaggggaaaaagtgattcagcaggtgattgcaaccggcgatatcccgatgagcggcggattatccggtgaaaatgtggtggtgaaggagctttgcgaagacagcctgaagaagtatcttgtctttttgaatccctatcatgtgatagacatgctgttggagtggcttcagacggttcaagacgaactgcgtatgacattcagcaacgctgtgctgatcaaagtcatcatgcataccgcttttgcttttgaaagggtgatcaaacagaacccgatcgcttttccggaggaggaagagatgaatgatcagcttgaaaacgttcttcacatcacagagaaaacattaaagccttacgaagaaaagcttggtcttgcgatcagcgaagatgaaaaaatgtttatcgcgtccatctttgctgaagagttatag

SEQ ID NO: 3299 - DNA, 114 bp, Bacillus licheniformis
atggtagattttatctattcttttcatatgtatcatcctttgttctcgattgatcagcaaaaggctggggactttcttgaagattcagaattccaaaagcgtatcacgggataa

SEQ ID NO: 3300 - DNA, 465 bp, Bacillus licheniformis
atgcggttattcatatgtgcatcgtgcctgttcggcttgattgttccgtcatttgaaacgaaagcgctgacgtttgaagaattgccggttaaacaagcttcaaaacaatgggaagttcaaatcggtaaagccgaagccggaaacggaatggcgaaaccggaaaaaggagcgtttcatacttatgctgtcgaaatcaaaaacattggacacgatgtggcttcggcggaaatttttgtctatcggaacgagcctaattcttcaacgaaattttcgctttggaacattcctcacgaaaatccggtttctttagccaaaagcttaaatcacggaagctctgtcaagcaccgcaatctgcttatggcagagaatgcgaccgaattggaagtggacatgatttggacggaaaaaggaagcgaaggcagacttttaaaggaaacgttcattttcaagggagatgaatcatga

SEQ ID NO: 3301 - DNA, 261 bp, Bacillus licheniformis
atgccgcaaaacaataacaatcgatatgaactctttttcaaaaaaagatacaaagttctacatatattaaacgattttctcatcggccttttattccttgtcgggagcttctgctttttctccgaggaactgaagccggcgggactatggatgtttgtgatcggcagctttcagctgttaatcaggccgacgatccgtttggttcatgattttcactacagaaagtttgttgagagccggcgttccaaatgccgggagtaa

SEQ ID NO: 3302 - DNA, 651 bp, Bacillus licheniformis
atgaattttcaaacaatcgagcttgacacttggtatagaaaatcctattttgaccattacatgaaggatgcgaaatgttctttctgcatcacggcaaacgtcaatgtgacaaatttgctcgccttgctcaagaaaaagaagatcaagctgtacccggcttttatttatatcgtatcaagggtcattcattcgcgccctgagtttagaacaacttttgatgacaaaggacggctgggttattgggaacaaatgcatccgtgctatgcgatttttcatcaggacgaccaaacgttttccgccctctggacggaatactcagacgatttttcgcagttttatcatcaatatcttctggacgctgagcgctttggagacaaaaggggcctttgggctaagccggacatcccgcccaatacgttctcagtttcatctattccatgggtgagctttacaaacttcaatttaaaccttgataacagcgaacacttgctgccgattatcacaaacgggaaatacttttcagaaggccgggaaacatttttgcccgtttccctgcaagtacaccatgccgtgtgtgacggctatcatgccggcgccttcatgaacgagttggcacggcttgccgccgattgtaaggagtggcttgtgtga

SEQ ID NO: 3303 - DNA, 138 bp, Bacillus licheniformis
gtgagagacggagaacggcacagcaagaatacaaagaaggagggatcggttgcttcggcctccgaaacgcgctacaattcatttacaatacaggatgaggtgagaatattgccgaaatcagtgaagcagtcctcctaa

SEQ ID NO: 3304 - DNA, 561 bp, Bacillus licheniformis
atgaacagcaaatcacgattgacgcctgaaatgtggcgggcaattacggaaaacgattccgcctatgacggagttttttattacgcggtcaaaacgaccggcatattttgccgcccatcctgcaaatcgagagttccgcaaatcgacaatgtgcagatttttttcaatgcaaaagatgctttatcagaagggttccgcccctgcaaacgctgcaatcccgccggagcgctgctgccggatgaagagctggcacagcgggtagtgcaaatcatcgagaaatcttatcgcgatacgctgtctctgcaagctttggctgacaggtgccatatcagcccttttcacctgcagcggacatttaaacgaatcaaaggcgtctcgccggcagaatacatcctgcagaaaaggattgagaaagcggtcgatttgcttgctcattcagaacgatcgatcgcagaaatcgcttcaatggtaggcattgcgaatgcggaatattttgcctctttgtttaaaaagaagactgggcaatcgccgacgtcgtaccggcaaatgaaacggaggtaa

SEQ ID NO: 3305 - DNA, 528 bp, Bacillus licheniformis
atggacgatcaaatcgtatactggcgtacgcttatttgccgaggttggcagattcacattggggcgactgcccgcgggctctgttttacagggggatggaatcaaggcttcgaggatttggccgcttgggctgaaaaaagatttacacagccagttttcattcgggatgacaaaggattggcagaatacgccgagcagctgcaggcgtatttgaacggcaagcgaactcatttcagctttcctgtcgaccttgccggcacgccttttcagctggcagtgtggaaggcgctctccgaaatcccttacggcagcacttgctcctattccgatatcgccgagcatattgaaaagcaggccgctgtgcgggcagtaggcgcggcgatcggcgcaaatccgctgttaatggtggtgccttgccatcgggttatcggtaaaagcgggcagctcacgggataccggggcggattggatatgaaaaaagaactgatgatgatggagtccggcggtgtaaccgcacaattcaattaa

SEQ ID NO: 3306 - DNA, 849 bp, Bacillus licheniformis
atgatgacagcaaaaaatttgcaagatcgaatcaaattgaataacgggacagctatgccttggtttggacttggcgtatttaaagtagaagaagggcccgaactggtacaagccgtaaaaacggcgattaaacacggctaccgcagtattgataccgcagccatctacggtaatgaagagggggttgggcaaggaatccgcgaggggttgaaagaagccggcatttcaagagaagacctgtttgttacatcaaaggtctggaatgacgatttaggctatgacgaaacgattgcagcctatgaggcgagtctcgaaaagctcggacttgactaccttgatttatacctgatccactggcctgttgaaggacgctacaaagcggcgtggaaagcgcttgaaacactttatgaacaaggacgcgtaaaagcaatcggagtgagcaattttcagattcaccatctggaagacttgctgaaagatgccgccgtcaaaccggcgatcaaccaggttgagtatcatccgcggctgacgcagaaagagctgcaagcgttttgccgtgcgcacggcatccagctgcaagcatggtcgccgctgatgcaaggccaattgctcagccatccactgctgaaagatatcgcggacaagtacggcaagacaccggcccaagtcattttgcgctgggatttgcaaaacggggtcgttacgattccgaagtcgactaaagcggagcggattgcccaaaacgcggacatatttgattttgaactgaccaccgaggaaatgaagcaaattgacgcgctgaatgaaaacacccgtgtcggccctgatcccgataactttgacttttaa

SEQ ID NO: 3307 - DNA, 1236 bp, Bacillus licheniformis
atgacctctgttcatgataaaaaacgcagtatattagcgcttttagccttggcggccagcgcatttgccatcggcacgaccgaattcatcagcgtggggcttctgcctttaattgctgaagacatgaatatttcggtgacgacggcaggactgaccgtatcattatacgcactgggcgtaacagtcggcgcacctgttctgacgtctgtcacatccagtatgccgagaaaagcgctgctgctggtgattatgctcatttttatgatcggcaacgggcttgcggcatgtgccggaagcatcggtgttttattaaccgcccgcgtgatttcggcgttttctcatggcgtatttatgtcaatcggttcaacgattgcggcaagcctagtcccggcggataaaagagccggagcgatatcgatcatgtttaccgggctgacgattgcaatgattaccggagttcccatcggcacgttcctaggtcagcagttcggctggcggattgcttttgcggcgatcgtcgctgtcggcgcactggcgtttatcgccaacagcttacttgttccgggcgatttgccgaaaggcgtccgaacgtctttcaagagccagttgaagcttgtgaccaatgggcggctgctgcttttattcatcattacggcgcttggttatggagggacatttgttgtctttacgtatttatccccgctgcttcagcatgtgacgggctttaaacaggaagctgttgccgtcattttgcttgcttacggcattgccgtcgcgctcggaaatattatcggaggtaaagcggccaacaaaaaaccgcttactgcattattctatatgttcatcgcccaggcggctgtgcttctcatcttaacggcggctgctccttatcaggcagcgggctttatcgtcatcatgctgatgggatttttagccttcatgaatgtccccgggctccagtcctatgtggtgattctggctgaacggtttgttccaggggcggttgatgtcgcatcagctgtcaatattgcggcgttcaacgccggtatagcgatcggttcttatacaggaggcgccatcacacaatcgatcggattgattcacactccatgggtgggagctttgatggtgctcggcgccgtcgtgctgacaggctggagcagggcgctggaacgaaatgatcaaaaacaaaatgatcaaaaacaaaatcaagctttaaaggaaaactgcgcatga

SEQ ID NO: 3308 - DNA, 378 bp, Bacillus licheniformis
atgaagccgaaaaagtataatatatctgtcgaagctacacttgaagtgatcggcgggaaatggaaatgcgtgattttgtgtcacttgacgcacggcaaaaaacgcacgagcgagctcaagcggctgatgccgaacattacgcagaaaatgctgacccagcagctgcgcgaactggaggaggacggcgtcatcaaccggatcgtgtaccagcaggtgccgccgaaggtcgaatacgaactcagcgaatacggatggacgcttaaagacattttggattcgctgtgctcctggggcgaaaaacacattacaaaagtgtatggagacaaatttgctgttttggaggacagcgtgctgaatgaacaattacaggaaacatga

SEQ ID NO: 3309 - DNA, 666 bp, Bacillus licheniformis
atgggaaaatggtttctttccggaggcggagatgcacaccaaaccgaacagctggatcggcatattgcccggagcatctgtcctcataagccattattgtatattccgattgccatggacgccgacaggtatgatgacggcttcgactggatcagccggctctttcacccgctcggcatcaaaaacattgtcatgtggacggatgtcaaaggtaaaaccgtacacgatttagacgtgttttctgccgtatatatcggcggaggaaacacgtttcgtctgctaaaacaattcatcgaatcgcattttaccgcggttttaaagcgctatgccgaaagcggcggcgccatttacggcggaagcgccggcgccgtcattctcggaaagaacattatgacttgctcttatatggatcgcaacgcttgcggattgcgggattttaacggcttaaagctcctcggagactattcggtttggtgccactacaaggctgaacatgatccgctgattaaaaggtttaggaatgcttttggcactcccgtcatcgccttgccagaggaaacaggaatcgcagcaagcacttcagacatccgggtcatcggaacaaagcccgcccgtatgtttaaagaagacggcgcagtattcgtctcagatcaatttgttttataa

SEQ ID NO: 3310 - DNA, 153 bp, Bacillus licheniformis
ttgttttataaagcaaaaaacgcttcggctcatcagcgaagcgtttttcttgtttttgcggatgcaagccgtttgaccaggcgttccgtcagaaaaaacacggctaagcctaagcctagcaaaaaagaaaaattcgcaatcaacggctcatga

SEQ ID NO: 3311 - DNA, 114 bp, Bacillus licheniformis
ttggggtgtgggagtctccttgggggcgttgtgatgttttttaaagatgcagacccaaaaggaaaaaagccgaagatgcagcttgccgtgcggcttttattttctgggccgtga

SEQ ID NO: 3312 - DNA, 828 bp, Bacillus licheniformis
ttgggaaaaggattgaacggcagaagaattgccatcggagcatcgcgaaaaacggatgaaatgagcacgctgatcaaaaagcaaggcggggttcccctcattcgctcccttcagggtaccgtgtttttggccgaaaaagaagtaggccctgatttgcgtgccttcgttgaaacgggagccgactgggtgattttcacgaccggaatcgggacggaaacgcttgtcagcctagctgagaaacttgggatcggagagcgctatttacaagcgatccgcagggcgaaatcggcatcgagaggctacaaaacaatcgccgctttaaaaaagctcggcattacgcccgttgcggcggatgaagacggcacgaccaagggactgatcgactcgctccaatcccacgatttttccggcaaacgggtgatggttcagctccacggcgaaaacgctccgtcactgcttcagtttttggaagagaaaggtgcagacgctgttccgcttctgccgtatcggcatgttgctccagaccgggaaaccgtcgctttattgtgcagcgagatcatcaaccgtgaagtggatgcggtttgctttacaacggctgtccaagtccgctcgctttttcatttcgcgaaagaaaacggctatgcggagaaaattgttcaatcttttcaagacagcgtgttggcggccgctgtcggaaaagtgacggcagaagctttaagagaagaaggagtcgaacgccttctcgctccggatctcgaacggatgggagcgatgattgtggagctggcgcggttttatgaaacggaagaggggataagaacacagtaa

SEQ ID NO: 3313 - DNA, 945 bp, Bacillus licheniformis
atgcattctcaattcgaaacccgagccgagcatttgacgaaacatgcccgttttttcgagtataccactgcctctgacccgattggaagcggaataatcagcccggttcctgtgaaagagttcgggcctgaattgtatgagacaggtgaaacgcggatcatcccgctggacatttccgaagaactgaagacggattatcccgcttcaagcccttcccttctcgcccacttcatcaagattcgttcaggcgacacgatacacactgccccccgtgcgacaagcgaactatattacattgtcagcggcgcagggaaaaccgaaacgggcgaagatacgattcactggcagaaaggcgattttttgactttgcctgccggttcaggcagccggcataccgcagcagaagatgcagccatttattacatcaccgattcacctctcctgaattatttgggcgtaaagccgtcggaatcccgctttcaaccaactctctacaccgctgaacagtcaaaagcaaaattggctgaagcggccgccgctcctgacgcccgttatcgcaaccgcatttccgttctcttgaacaatgaaatattcgatcaaacgctgacgatcacccatgtattgtgggcaatgttcggcatcgtgcctcccggctccaatcaagctcctcacagccacaagtcggtggctctcgattttgtcgcctatgccgcacccggcacgtatacattagtcggaagcaaaatcgatccggccacaaaggaaatcattgatccgaaacgaattgactgggtaaccggaaaagccttcattacaccgccgggattatggcattcccaccataatgagtcagatgaagccgcctatatcatccccatccaagatgcgggcctgcaaacgtacctccggacactggatattcaatttcagcattatgaaaaatga

SEQ ID NO: 3314 - DNA, 957 bp, Bacillus licheniformis
atgacgaaaaagcaatattcttatatattcacccttttactcgctttcgctgtatttctttcaggctgtcaaagcggccagaaacaggctgcatcagagaaaaatgaagagaaaacaagagtggtgaaaaccatcaacggaaatgtcactgtaccggctaatccgaagcgcgtcgtgacgattggctatgcgggaaccatgcttgcattcgggatcaagccgcttggagaaacgggaaagtacctcggaagtccttatattaaagatcaagtttcaggaataaaggatatcgggggaaaagacggtttttcagtatctgtggaaaaagttcttgaacttaaacccgatttaatcgtatcgatgacgaacgattcaaaagaatataaaaagctgtcaaaaatcgctcccactgtcgtctatccgttcggcacatttaaagatgcacgcgatgaaatgaaaacgtttggcaagctgctcggcaaggaaaaggaagctcgggagtggacgaaaacgtttaatcaaaaaatgaaagccgcccgcgcgaaaattaaagatgcatctgtaaaaggtgaaacgttctctttaatcggcgcatatgcaaaatctttatatgtctacggggcatacgggtatcggggcggagaagcgatctatacgcagctgggactgacgccgcctgaatctgttaaaaaggatgccattgatacagctgacggatataaagccatatctttcgaggtcctgccgaaatatgccggagactacatatttgtcgacgaatcatacaacggaaagcttgatcaggacaatccggtttgggcatcgcttgacgcggtgaaaaaaggcaaggtctttttcctcgatccggacagattttggccgtatgatccaaacgctgttcaggcacaggccgaagaaatcgccgacatgatttccaagaaagcgaaaaataaatag

SEQ ID NO: 3315 - DNA, 900 bp, Bacillus licheniformis
ttggaactctatcaaattgaccattttattgccgtgagcaggcataaacactttacaaaagcagccttggaacaacggatttcccagccggctttgagcaggtcgatcaaaaagcttgaagaagaattgggcgtcccgctgtttattcgaaaaacaaaatcgatccgcctgacaaagtacggcgagcagttcctcatcaaagcgaagcaggcccgccttgcccttgacgaaggcgttcagcaaatcagggaaagcgtcaatccgaatgccggggaaatctcggtatcatttttgcatacgcttggttcgcggctcatgccgcagctgattgccgaatttaaaaagaaatacccgaatgttgctttccgtctgtatcaggccgcaaatgaacatcttcagcacatggtggagacgggcgaagctgatatctgcctcagctctccgccgcttccaaacgagcatcttgaatggacggtgttggatactgagccgctttatctggtgcttccagccgaccacccgcttgcagatcggaaagaagtcgcgatccggtcgattgcacacgaagactttgtctgttttaagccgggctatggtcttcgatatgtgtttgatcaaatgtgccggggactgtccatcagcccgaagcttgcttttgaaggggaagaagtgtcgacgattttgggactagtatcagcagggctcggtgtagcaatcctgccgaaaacggcggagcacgtccattctccagtggcattttgccgagtgtcagactaccgttctgagaggacgatcggtctcgccgtcctgaaagaccattatttgtcgccggcggcacgcaactttaaagaatttgtaattgaatactatcgccggaacgaacggtctgatcagccgtaa

SEQ ID NO: 3316 - DNA, 1218 bp, Bacillus licheniformis
atgacctacatacagccgcattcgaaggattatcacaaagcgagcatcgccttattcatcagcggttttgtgacatttgccacactttacaccacacagccgctcatgcctctgtttgcggaggaattcggcatatcggcggcagctgcaagcttaactttatccatttcaacaggcatattggcttttgcattgctcacggcagcagctttatctgacgggttcggccggaaaacgattatggcaatatccctgtttgcgacatcagtgctcggcctcttgaccgcctttagtccgaacttcgcggcgctcttggcgatgagagggctgcttggctttttccttgcaggcgtgcccgcgatcgccatggcttatgtcggagaggaatttgatccgcgagggctcggcaaaatgatggggctatacattagcggcacaagcctcggaggaatgagcggaaggcttttgaccggccttttgacagacttgttcagctggcgcgcggcgctaggaatcatcggggcattatcagtactattaagctatttgttttggattttgctgccccggccgcagcactccgctaagcgaaaaacaagtgtgaaaaaagcgagcttggcctacggcgccgtcttgatgaacaaacggctgctgtcaatcatttcacttggatttctattaatgggaagctttgttacgctgttcaattatatcgggtttcagttgatgggacctccgtacagactctctcaaactgtcatcgggttcatctttatcgtttatttggcggggacgctcagttctgtctatatggggaagaaagccgatcgttttggcagcccgttgatgctgaaaatcgggattgccattatcgcaggaggcgcattgcttacgcttctgcctcagcttcctcttaaaattgccggaatcgctgtttttacatttggatttttcgggtcgcattcgatcgcaagctcctgggtcgggcagacggccggcgaacagcgcgttcaagcttcctccctttatttgctgagctattatctcggctcaagcttagcggggtctttcggaggcttcttctggacccattttaaatggccgggaatcatctcattcattatcgggctgcttttgatcgcttatccggtcattttctttgccgaagccaaaagaaacaaacggcaagacaattcacaggtccgaaataaaagctaa

SEQ ID NO: 3317 - DNA, 384 bp, Bacillus licheniformis
ttgcttaaaacaatcggattttatggatttttggcatctgtatgtttaaatctttttctcaggtttgggctcaagataaacggcacagcgaatgatatcatctcaacggcctccctcgtattcgtgctggtgtacgtatgggacgacttgaaaaaacgaagtgcaaaaacgctcatcttacagggaatcactctcatcatctttgtggcgttattggtgtttgtcatcatgaaaggacaaacattcattgcttctctgccttttttcgagggttgggaaacgccggcaaaatgggtgtatattttgctcgttttgttcttgggatcaaaccttttcatctatatcaatgaaaaaataacaaactctaaaaaagaggcatcctga

SEQ ID NO: 3318 - DNA, 3225 bp, Bacillus licheniformis
atgaacaagttagatggaattccaatccctaaaacttacgggccgctcggcaacctgcctttgcttgacaaaaacagggtctcccagtcactttggaaaatcgcggatgagatggggcctatctttcaatttaagtttgcggatgcgattggggtttttgtgtccagccatgaactggttaaagaagtctctgaagaatcccgttttgacaaaaacatggggaaggggctattgaaagttcgcgagttcagcggagacgggctctttacaagctggacggaagaacccaattggcggaaagcccacaacatccttctgccgagcttcagccagaaagcgatgaagggataccatcccatgatgcaggatatcgccgtccagctcattcaaaagtggtcccgtctcaatcaggatgaaagcattgatgtgccggacgatatgacgcggctgacgctggacacgatcggcttatgcgggtttaactaccgctttaacagcttctaccgtgaagggcagcatccgtttattgagagcatggtccggggtttgagcgaagcgatgagacagacgaagcgcttcccgctgcaggataagctgatgattcaaacgaagcgccggtttaacagcgatgtcgagtcgatgttttctcttgttgaccggatcatcgctgaccggaagcaggccgagagtgaaagcggaaatgacctcttgtcgcttatgcttcatgcgaaagaccctgagaccggcgaaaaactggatgatgagaatatccgctatcaaattattacatttttgattgccggacacgagacgacgagcggtttattatcgtttgcaatctatctgctcctgaagcatccggataagcttaagaaagcgtatgaagaagcagaccgcgtgctgaccgatcccgtcccatcctacaaacaggttcagcagctgaaatacatccgaatgattttgaatgaatcgataaggctttggccgacggcaccggctttctctctttatgcaaaagaagaaacggttatcgggggaaaatatttgattccaaaaggacagagcgttacagtgctcatcccaaaactgcacagagatcaaagcgtctggggagaagatgccgaggcattccggcctgaacggttcgagcagatggacagcattccggcgcacgcatacaaaccgtttggcaacggccaaagggcatgcatcggcatgcagttcgcccttcatgaagcgacgcttgtgctcggcatgattcttcagtactttgatcttgaagatcatgcaaactaccaattgaagatcaaagaatcgctgacattaaaaccggatggtttcacaatccgggtgaggccgaggaaaaaagaagcaatgacggcgatgccgggcgctcagcctgaagagaacggacggcaggaagaacggccttccgcaccggcggcggaaaatacgcacggaacccctcttcttgtgctctacggttcaaatctcggcacagccgaagagattgcgaaggagcttgctgaagaagcgcgtgagcaagggtttcacagccggacggcggagcttgatcaatacgcaggcgccatcccggcagaaggggctgttatcattgtgacggcttcctataacggaaacccgcccgattgcgcaaaggaatttgtcaattggcttgagcatgatcagacagacgatttgcgtggtgtcaaatatgcggtattcggctgcggtaaccgcagctgggccagcacctaccagcggattccgcgcctgattgacagcgtattggaaaaaaaaggcgcccaaaggctgcacaagcttggagaaggggatgcaggcgatgattttgaaggacagtttgagtcatggaaatatgatctgtggccgcttttaagaaccgaattttcattggccgaacccgagccgaatcaaacagaaacagacaggcaagccttatctgtcgagttcgtaaacgcacctgcggcttcgccgctggctaaagcttatcaggtgttcacagcgaagatatcggcaaaccgagaactgcagtgtgaaaagagcgggagaagcacaaggcatattgaaatatcgcttcctgaaggcgccgcatatcaggagggagaccatctcggtgtgctaccgcaaaacagcgaagtgctgattggccgcgtttttcagcggtttgggctgaacggaaatgaacaaattctgattagcggccggaatcaagcatcacatttgcctttggagaggcccgttcatgtcaaagacctttttcaacattgcgtcgagctccaggaaccggccacaagggcccagatacgcgagctggcggctcatactgtttgtccgcctcatcagcgcgagcttgaagacctgctgaaagatgacgtctataaggatcaagtgttgaataagcggctgacaatgcttgacctgcttgagcaatacccggcctgtgaactgccgttcgcccgttttctggcgcttcttcctccgctaaaaccgaggtactattcgatttccagttcgccgcagcttaacccgcggcaaacaagcatcaccgtctctgtcgtaagcggcccggcgttgagcggccgtgggcattataagggagttgcatcgaactatctcgccggccttgagccgggagacgcgatttcgtgtttcatcagagagcctcagtcaggcttccggcttcccgaagatcctgaaacaccggtgatcatggtcgggccgggcaccggaatcgccccttaccgcggatttcttcaggcgcgccgcatccagcgcgatgccggtgtgaagctcggtgaagcgcatttgtacttcggctgccgccgtccgaacgaagattttctgtatcgagacgagttggagcaagcggaaaaggacggaatcgtccatctgcatacagcgttttcccggcttgagggccggccgaaaacatatgtgcaagatttgctcagagaggatgcagccttgctgattcacttgttgaacgaaggcggccgcctgtatgtgtgcggagacggaagccgcatggctccagctgttgaacaagctttgtgcgaggcgtatcgcatagtacagggtgcgagtcgggaagagtcgcaaagctggctgtccgcacttttagaagaagggcgctatgcaaaggatgtatgggacggcggcgtttcccaacataatgtgaaggcggactgcattgcaagaacgtaa

SEQ ID NO: 3319 - DNA, 576 bp, Bacillus licheniformis
atggaatcggaaagcaaatatcagaagattatcgaggcttcgctcgtccttttcgcggacagaggctttgacgccgcaaccattccgatgatcgccgataaggcaaacgtcggtgcaggcaccatctaccgctactttgacagcaaggaagcacttgtaaacgtcttgttccaagacagtgtgaagagatttaaagaaaagatagaggagggctatcctgaagattcagcaggcataaaaaaacaatttcagcacattttccgctgccttttcgagttttctcaggaaaatatccatgcgctgtattttttggaaattgacaagacctctcattacttgactgagaaaagccgcgaggtcttgaacgaactgctggatttcatctatttattttttgaaaaagggaaagcggccggcatgattcgccctttgccttcccacattttgtcggctgttgtattcggagcgttcgttcatattcagaagttggtaagagcaggggaattcgaggaccctaccgaactgatggaggagattgaagaatgttcctgggatgctgttaaacatcatggatga

SEQ ID NO: 3320 - DNA, 3144 bp, Bacillus licheniformis
atgaacaaaaggatcgtgaaaagttcaattgttttctttctccttgccgcattaatttttggccagctgcctttaccgaagacaatggcagccgaagacagcgttccgaataacgaaaccacattgaccagcgcgtcccctgttgaagcttcgtttcaaagcgatgacgaggtgcattggtataaagtcaatccttcaaatcaggaaatcgcaaactatacgcacttccgcgtcaaattgaaatcagatgcagagctgaacatttccgtctactccagcctggaaaatgcaactggtcatcaaacgtttgaccgatacaacggctactcctatgaaaataatcctgctttaatcgattttccgattgcctggaaaggtccttactacataaaagtagaaaatcaccatgatgaggaaaacgaaaccacttcaattacagatatttcttacaccatcagctatgaaggcgtcaccctgcctccgtcaatccaagaggcagaagaagagtgtccggcagaattaagcgtttccgaaagggaaacaggcaagggcatattaaaacagttaagaacgatcagggatgaagttctttcaaaaactgaaaaaggaaaagagctgtcttccctttactataaagcagctccattcatcagcgcaaaaatgctctttaacaaatcgatgagagacagtgtctacaaagacctggtgcagctgaagccgctgtttgcagatgtcgctaaaaacggacaagtgagcgcatactcgattacgaatgatgatcaaaaagcgatcagtcgcctgtacgaaacagctcgcgcgtccgttcccgagccgttgaaaaaacagctggatcaagtcgcgaaagacatcggcatcgaacaattaacaggcagcaaagtatcggctgtgcttgaaaaagcggggatggcgacagcttcatcaagcgcgcccgaaaaccgttacatcgtaaaattgaaagaaggcaaaaaaccgggatctttcaaatctaaagcccaatcatccggcgtccaggcattagagcccctcggtaaaagcaaaacggcatttaaagatatgtacgttgtggaaatgaaggaaagccgttcttccggattcaaagcggcggcaaagcaatatcaggcggcagcctccaagatcgccaagatgcctgaagtggaattcgtcgaacaggttcagcaatatgaagcactgtcaagagacacccaatatccatatcaatggtcgctcaaaaataacggcaaaaaccgtgctgcgaatgctgacatacaatttgaacagcttcagaagctgatgaaaggcaaaaagctgaaagatacagtaatcgccgtcgttgacacaggcgttgatcatacccttgcggatttaagcggcagcgtcaaaaaagacgaaggctataactatgtcggccgcacggcggatgcgatggatgacaatggccacggcacacacgtgtcaggcatcattgcagccgcgcaagacaaccatttttcgatggcgggaatcaatgcttatgccaaaattctgcctgtcaaagtgctggattcttcaggcagtggagatacggaacagattgcaaacggcatcatctatgccgccgaccacggtgcaaaagtcatcaatttaagtcttggcgggccatacagccgggtgatggaatatgcgcttaaatatgcggcttctaaaaatgtgacgatcgttgccgccaccggaaatgacggagtatcggagatttcctaccctgcatcttcgaaatatacgctttcagtcggggcgaccaataatctcgatcttgtctcggactactccaattatggaaaaggtctcgatatggtggcgccgggaaccgatattccaagcctcgttccggacgggaatgtcacttatatgagcggaacatcgatggcggcgccgcacgtggcagctgcagcaggacttcttttgtcacagaatccgtccttgaaaccaaagcaaatcgcaagcctattgaccgagacgacagcagatgtggcatttgaagagcaggataatccaaacccggattatgacctggatatagaaccggctgcacaaattcccggatatgacttcgtctccgggtggggaaggctgaatgtttttcatgcagccagcgtttttgagctgaacatgaaggttcatcccgttttaaaccgccatacggcagtgacaggcacagccaaaagcggtgtgacggtcaaaatcttgcgagggaagcaagtattggggacgggcacggccggaaaatcaggcgcgttttcagtgaaaattccggcccagaaggcggggcaagttcttcatgtcgcggcatcgggccatcaggcggaaacctcgctcagaaccgtcgtggaaaaagcgccgaaaaacccgtccgtcaaacgcatcacgaacaaagatactgccgtaacgggtagaacggcagccggctacacgatcaaagtgaaaaacacgtccaaaaaagtgatcgcgcaaggcaaagcggatgcatccggagcgtttaaagtgaaaatcaacaagcaaaaagaatatgccgttttgtatgtctccgcatctgctgatgaccacagagaaagcggcgatgtcaaaatgacggtggctgacgtcatcccgccaggcgccccgaaagtttatcaggtttccgataaaagtacggtgattcagggaaaaacagaagcaaacgcgcaagtcagcgcaaaagctaaaggaaagacgatcgcttccggcaaagcgaacggaaaaggtgaatacaagctgaaaatcagcaggcaaaaagccggaaccgtcatcggtgtaacagcaaaggataaagccggaaatgtcagcaaagcgacagccgtcactgtgcttgacaaaaccccgccgtctgcgccgaaggtgaatccggtgacaaacaagagcacggccgttaaggggaaagcagaagcgaacgccgccatcatcgtcaaatcaggaaagaaaacgatcggaaccggcaaggccgataaaaaaggcgcgttttttgtcaaaataaaaaaacaaaaggcaaacaccgttttagcggtcactgcaaaagataaagccggcaatacgagcaaagtgagcaaaataaaagtcaaaaaggcaaaataa

SEQ ID NO: 3321 - DNA, 72 bp, Bacillus licheniformis
ttgatagagttgaaactggatcttaaatatcatatttttgtatttttaaagaaaagtattccattaacatag

SEQ ID NO: 3322 - DNA, 606 bp, Bacillus licheniformis
gtgtttgaacaatggcttggaaaacaattgcggagcccgagaggcattttgtcgaaatgggtcgcgtcatatatggaaaacgggaatcatgatataaacgaatggaccatcaacttgatggatatctgtccgcatgagcgcatccttgaaatcggaacgggaagcggagcggcactttatcggattgcggagatgcttgagggcggcaaggcctgcggcatagacgcatcaaaaagcatggtcaagcagggaatgcggcgaatccgtcatgtgaaagaagaaggaaaagccgaattaaagcttggccatgccgaacaaattccttatccggatcgttcttttcataaagtattttcagtccacaccatttatttttggacggatttcaaacaggcattaaaagaaatttaccgtgttttacaggttgacggcacgctgtttctcgctgtgcatctggaagggcaaatgaaaaaatcgaaaaaaacaaaaggcttttccttatactcagaagagcaaatcaagcaactgcttgaggaaagccatttcagagacatcacggtacatatgaacaaaaattactgctgcatttctgcggtaaaatcatga

SEQ ID NO: 3323 - DNA, 150 bp, Bacillus licheniformis
atgggctttggttacggcggcggatgctgcggcggctggggtggctaccctggcggatacggcggcggatacggctatggaggcggattcgcgcttgttgtggttctattcattcttttaattatcatcggcgcttgttacgtctgctaa

SEQ ID NO: 3324 - DNA, 150 bp, Bacillus licheniformis
atgcagaaaaacggcagaatgccttttatcggccacgggtatacatcgatgccccattctttcaagcacggatacggtaatccgtaccggcgccaaagaatggagatggtgcgccacttcgggtattggccgcattattggtattattga

SEQ ID NO: 3325 - DNA, 150 bp, Bacillus licheniformis
gtgaccattaatctattcttcttaacactaaccattcagagacgatttaaaagtccggaagagtacgagcgagaatacgaaattgaacaaatgtacaatgaaatgaaagatctgcagctaaaatatctttacctgaacagccagcgctaa

SEQ ID NO: 3326 - DNA, 234 bp, Bacillus licheniformis
atgcagaagaaaaaagtcaaatcgctgatggaagactataagcagtttgcttttacgcttctcagcgtaagcgcatttttatatatcggatctgtcattccgggacaaggtttggaaacaggccaaaagatgacaatgatgctcgcgacgtgcggctttttaggaggagctttctattgtgtgaagcgctcgctcaaatataaaagacaattagacgaaatggaagaatcataa

SEQ ID NO: 3327 - DNA, 1143 bp, Bacillus licheniformis
atgaagccaaaaacgaaaatgattcacggcggaattacaggagacgaaaaaacaggagcggtatcggttcctatctatcaggtcagcacgtacaaacagcctcgcgccggccagcatacaggatacgaatattcccggacgggaaatccgacgagaacggcgctcgaatccttgatcgcggatgttgaaggcggtgcagcaggctatgcgttcggctctgggatggcggcgatcacagccgtcatgatgctttttaaaagcggcgatcacatcgtattgacagatgatgtatacggcggcacctaccgcgtgatgacaaaggtattgaatcgcatcggcattgaagcgaccttcagtgatacgagcagcatcgaagacatcgaaaaagcgatcaagccgaatacaaaagcgatttatgttgagacgccgacaaatcctttattgaaaatcactgacatcaagaaaactgctgaaacagcgaaaaagcacgacttattgctgattgtcgacaacaccttctacacgccgtactttcaaaatccaatctcgttgggagccgatatcgtcctccacagcgcgacgaagtacttgggcggacacagcgatgtcgtcggcggacttgtcgtagcagcctcgaaggaactcgcagaagagatccatttcattcaaaactctacaggcgggattctcgggcctcaggattcctggctcttaatgagggggatgaaaacccttggcttgagaatggaagcccatgagcaaaatgcccggaaaatcgcggcgtttttagacgatcatcccgccgtcaaaaaggtttattacccagggctgccgtcccatccgggacatgagcttgccaagcggcaaagtacgggcttcggaggcatgatctcgtttgatatcggaaaagaagagaacgtggaccttgtccttggccgtttgaaatggtttacgatcgccgaaagccttggtgcggttgaaagtctgatatcggtgccggcgcgaatgactcatgcttcgatcccgcctgaacgcaggctggagcttggcatcacagacggattaatccgtatttccgccggggttgaggatattgacgatctgttggaagacttgcagcaagcgctggcccctctttcttaa

SEQ ID NO: 3328 - DNA, 924 bp, Bacillus licheniformis
atgaatgtgatcaaggatatcaccgaattgatcggcaaaacgccgcttctgcagattttgaattttcgaatccctaaaggcgttaacatatatgcaaaacttgaaatgatgaatccgggaggcagcattaaagaccggctcggagaagtgctgattgctgaagcgatcggttcgggaaagctgaaacccggtggaacggtcattgaggcaacagcaggcaatacgggaatcggtctggctctcgccgccagaaagcacggcattcgacccgttttttgcgtacccgagcatttcagcatggaaaaacagtcgattatgaaagcgctcggcgctcggatagttcatacccccagaagtgccgggatgaagggtgcgattgaaaaagcacttgaacttgagaaggagattcccgattcttattgcgttttgcagtttaaaaacccagtaaatccattggcttactataaaacgattgccccggaaatatggaatgatcttggcggcaggattgacgtcttcgtcgccggagcggggtcaggcggcacatttgcgggaaccgccaagtttctgaaagaaaaaaatccgtccattaaaacggttattgttgaaccgaaaggctcgattttaaacggaggggaaccgcatgggcataagaccgaaggaatcggaatggaattcatcccggaatacatggaggaaagccatttcgatgagatttacacagtgcttgacgaagatgcgtttcgactcgtaaaagaagccgcggaaaaggaagggcttctgattggaagctcatcaggcgccgcgttgtttgccgcattgaaagaagccgaaaaagcgaaagccggcacaaacatagtgacgatttttcccgacagcagcgaccgctatttaagcaaaaaaatttacgaaggaggaatatga

SEQ ID NO: 3329 - DNA, 696 bp, Bacillus licheniformis
atgaaaatcgcagttatcggagcaatggaagaagaagtcacgattttgcgaagcaaactcgaacagacgaaccgggaagtcatcgcaaactgtgaatttaccagcgggttttatgaaggaaaagaggtcgtgcttttaaagtccggcatcggcaaagtcaatgcagccatgagcacgacgattctgcttgaccgctttaaaccggacgttgtcatcaacaccggatcagccggcggctttcatcattcgcttaatgtcggagacatcgtcatctcgaccgaagtccgccatcacgatgtcgatgtcacggcatttgattatgaatatggacaggttccgaatctgccggctgcatacaaagccgacagtgcattgatccaagcggcggaagacgaagcgtctgaactggggcacattcaggttgtcaaaggaacgattgcaacaggcgattcctttatgagcgatcctgaccgcgtcgcattcatccgcggcaagtttgaagacctttacgcggttgaaatggaagctgcggctgtcgcgcaggtttcttatcaatttaatacgccgtttgttgtcatcagggcgctctcagacatcgccggaaaagaatctgaaatttcatttgaccaatttttggaacaggctgccaagcattcgacagatcttgtgcttcgcatgattaaaagaatcaattaa

SEQ ID NO: 3330 - DNA, 642 bp, Bacillus licheniformis
atgggaagagagttcattcctttatttgagaactgggcaaattcttatgatgatacagtagttggccgcgatcttcaatacaaagaagtgtttcgcgactacgacggcattttggatgatgtcgtcagccgctcggggcataaagttcttgaattcggcgtcggcacaggcaatctgactgcaaaattgctggcggccggaaaggcagtcaccggtgtagagccttcaaaagcgatgagggaaattgccgaggcaaagctgccggagaatgcattgatcgttgacggagactttcttgactttccggaccctccgttttctcccgacacgattgtcagttcttatgcgtttcaccatctgacaaacgaagagaagcgggaagctgtgaagcgatatggaaaaatgctcgggaagcatggtaaaatagtgtttgctgataccgtcttcaaggatcgggaagccttctctgtcgctgttaaaaaagcgaaggaaaacgggtttctgcaattggcggaagaccttgaaacggaacattatccgacgatttcggagatggaaacgatctttacctcagaacatttcagtatcgcctttcaaaagcataatgattttgtctgggtaatggaagcggcaaaattgtaa

SEQ ID NO: 3331 - DNA, 204 bp, Bacillus licheniformis
atgaacttcggcctcgatctgatcaaagataaaattgagttttttgaggcactgagcttagaggagcttgaaaaaaagatcagtcagcagattgaaaacaaccaggcgattttgctgagggtccattcggtttcccaccatacggcggttattgacggacggatccactacagcgcagtcgttcattttaaagccgaatcataa

SEQ ID NO: 3332 - DNA, 687 bp, Bacillus licheniformis
ttgagcgaaacaagggaatctcgttttgaaaatcgtgataagcgcaggaaagcgaatcttgtgcttaacattttaataggcatcgtattggtattaatcgttgtcgttgccagcagtctgatgatgaacagtccgaaggagcaggcgcagcaagatgtctcgaaaaacgattctgaacagacgacagaagcgcctgcttccgacaataagaaacaaacatctgatgaagatgtaaaagatgaggacaaaggaaaaagcgattctgccgataaagaagacagcgattccgactcagacaaggataaagaatctgcttcagacgaggacaagtcaacatcagatgatccgtttgaaggagccgaagtgacagaaggcggttcaagcgccaatgttgaaaaaacgatcatcaatcctgactgggagcctgtcggcacacaacagagcggacagcataccgcaacatatgattcctcttcacaagactggaaggaaatgcttgaagccatttcatatgcgacaggggtttctaagaataacatgacggtgatctggctcggaaacaacggcagcccgcaagatgcgaaaggaaccattcgggcgaaggacactggcgtcaaataccaggtagccattacttgggttgacggaaaaggctggaagccgacaaaagttgaacaattgaaataa

SEQ ID NO: 3333 - DNA, 126 bp, Bacillus licheniformis
atgttaagcacaagattcgctttcctgcgcttatcacgattttcaaaacgagattcccttgtttcgctcaagttcattgcactcctttttccctcttgcctcgcttcctattttatcatcacctga

SEQ ID NO: 3334 - DNA, 1755 bp, Bacillus licheniformis
atgaaatggcaaaagcgtatgaagtgggtatcgattatcatttcggctgctcttttatttctgctgatcaggctggctgaaattcaactgttttttaccgagtccttttctaaacggaatgtgaacttaatccaggaaagcgtcaaacagcgcacggaggaagttcggatttcagacgggagaggatcttttttagatcggaacggcgaacatttgtccgtcagccaaaaaccggccatcgtcttgttcccttttttaaaaaatcagccgtggccggccaaagaagcagccgaaattttaaacatgacagaagatgagcttggaagcaagctggaccatgcaaaaaaacccgtgattctcacaaaacatgacggagcgtccgtttcaaagacggctctcgaaaaaatcaataaactgaaatatccgggcgtttacggcgtatacatagaagaaacagaaaagaacaggctggcttcgcatacgctcggtatgaccaatcaagacccggacctcctcagacgcaaatatcccgataaagagggcctctccatcagcacgaaaatcggcaccttcggcatggagcggacgtttgatgaattcctgctgcctgaacaagacacaaaactgttgtatcatgtggacggattgggaaaccctttgttcggcatggacgtcaaatatacagcagacgcaaatccgttttacccgctgcaagtcaaaacaacgctcgataaaaaggttcagcaggcaatggaagatgtacttgatgaccatcagctcgataaaggcggggcggtcctgcttgacatcgagacgaacggcgtggtggcgattgcgagcaagcccgacttaaacatggctgcgcaaaaaacaaggcagaactatatgctgactccggtatatcccggctcggtttttaaaaccgtgattgccgctgcagcgattgaaaacggcttggatcatccgtctaaaacctttaactgcaatttgaacctgtacggtgaggccggagaggacaaaggaaagctcagcctggaagacagttttgcggaaagctgcaactacacgtttacaaatcttgccggacagctcgtagaaaaaaacagctccgtgatcgaagatactgctgcaaagcttgggctgaccggacgggtcggctgggaaggaaagctgtatcatgaagatgagttcagacagttttatcatgaaactgcaggatcaatctggggggatgaaaaggacaaaaaagttaaaaaagctgtagcccagaccgctatcggccaaaagaatgtgaagctgactccgttggaaatcgtcaacatgatggcgaccatcgcaagaggcggagagaaaaaacaagtcaagatcgcagaccagatcgaatataaaaacggcacattgatgacggcttttaaagatcacgagctcccaggagagaaaatcgaccagtatacagcgcaaaagctgcaaaaactgctcagaaaagttgtcacatctgaaaaggggacgggccggcgcttcagcgatcttccgtacgatgtagcgggaaaatcgggcacagcgcagacaggcaggacgacagatgacaaaaaaacgctctatcataaatggtttgccggttattttccggcggacaagccgaaatatgcgctcgtcgtcgtccatatggatacgccggatagcaaggctgcgacaaatgccgtattttatgatattgttaaaaaagtatatgaaattgaaaagaaccagacatag

SEQ ID NO: 3335 - DNA, 477 bp, Bacillus licheniformis
atggcacaagagaaagtatttcctatgacagaaacgggaaagaaaaaactggaagaagaacttgagtatttgaaaacggttaaacgtaaagaagttgttgaacgtattaaagtggcaagaagcttcggagacctttccgaaaactccgaatacgattcagcaaaagaagaacaagcttttgtagaagggcgcatcacaacccttgacaatatgatccgcaacgcaaagatcatcgaagatgacggtgcaaactcagacatcgtcagccttggaaaaaccgttacatttacggagcttcctgacggtgaagaagaatcttatacgattgtgggcagcgcggaagccgatccgtttgaaggaaaaatctcgaacgattccccaatcgcgaaaagccttctcggcaagcaggttggagacgaagtaaccgttcaaacacctggcggcgaaatgcttgtaaaaattgtgaaaatttcataa

SEQ ID NO: 3336 - DNA, 636 bp, Bacillus licheniformis
atggggaaaaaaccggtagttatcggcatagcgggaggctccggatcaggaaaaacgagcgtcaccagatccatttatgaacagtttaaaggtcattcgatcttaatgctcgaacaggatttatattataaagatcagagccatctgccgtttgaagagcggctgaatacgaactacgaccatccgcttgcatttgacaatgactatttgatcgagcatttaaacgaattgctcgcgtacaggccgatcaaaaagccgatttacgattacaagctgcatacgcgttcagaggaagtcgtgcacgtcgatccgaaagatgttattattttggaaggaatccttgttctcgaggatgaaaggctccgcgacttaatggacatcaagctgtatgtcgatacggacgccgacctgcggatcatcagaaggatgctcagagacataaaagaaagaggacgttcgatcgattctgtcatcgagcagtacatctcagtcgtcagaccgatgcataaccagtttgtcgaaccgacgaaacgctatgccgatatcattattccggagggcggccaaaaccgcgtcgccatcgacctgatggtaacaaaaatacaaactattcttgaacaaaacgcgattttataa

SEQ ID NO: 3337 - DNA, 1269 bp, Bacillus licheniformis
atgtctgcagtaaaagataaaatttccaaaatcgttaatggaaaacgcgtcattacgaaaaagccagaacttcttgctccggcggggaatttggaaaaactgaaaatcgctgtccactatggagcagacgctgtatttatcggcggacgtgaatatggactccgctcaaacgcagataacttttcaattgaagaaatggctgaaggtgtcgaattcgcgaaaaaatacggcgcaagaatttatgtcacgacaaacatttttgcgcatgaagaaaatatcgacggactggaagactatttgcgcgatctcgagggagcaggcgtgtcaggcattatcgtcgctgatcccctgatcattgaaacgtgccgcagggttgcgccgaagctggaagtgcatttgagcacacagcagtccctttcaaactggaaagccgttcagttctggaaggaagaaggccttgagcgggttgtgctcgcacgtgaaacgagcgcacttgaaatcagggaaatgaaagaaaaagtggatattgaaatcgaaacgtttattcacggtgcgatgtgtatcgcttattccggccgctgcgtgctcagcaaccatatgacggcaagggactccaaccgcggaggctgctgccagtcatgccgctgggactatgatttgtatcagacggacgggacgaatgcactgccgctatatgaagaaggcgatgctccatttgcgatgagcccgaaagatctgaagctggtcgaatcgataccgcaaatgattgaaatgggcatcgacagcctgaaaatcgaaggccggatgaaatcgatccactacattgcgacagtcgtcagtgtgtacagaaaagtgatcgatgcttattgcgctgatcctgaaaacttcgtcatcaaagaagaatggctgaaagaactggacaaatgcgccaatagagacacggcgcctgctttctttgaaggaacgccaggatatgaagagcagatgttcggcgtccacggcaaaaagacaacatacgactttgtcggacttgtccttgactatgatgaagagacaaaaatggtcacgctccagcagcggaacttctttaaatccggagatgaagtcgaatttttcggtccggaaatcgaaaatttcacatgcaaaattgacacgatttgggacgaaaaaggcaatgtgcttgacgcagcccgccatcccctgcagatcgtcaaatttagagtggacaacaagatttatcctagcaacatgatgagaaaggggcagtaa

SEQ ID NO: 3338 - DNA, 930 bp, Bacillus licheniformis
atgaaaaagcctgaactgcttgtcacgccgacttctgtttcggatattaagcctttggcagaggcgggcgccgatgcgtttatcatcggtgaacaaaggtacggtctgcgtttagccggggagttttccagagaagaagtaaaagaagccatcattcaggctcatgaaaaaggcgcaaaagtatatgttgctgtgaacgcgatttttcacaatgaccgggttccggaactgaatgactacctttcattcttggacgaggcaggcgcggatgcggttgtcttcggcgatcccgccgtactgatggctgcacgggaatcagcgccgaacatgaagcttcactggaatacggaaacgaccgcaaccaatcattattcctgcaactattgggggcgcaagggcgcgaagcgcgcggtgcttgcaagagagctcaacatggacagtatcgttgagattaaagagaaagcagaagtcgagattgaaattcaggttcacggcatgacatgcatgttccagtcaaagcgctccctgatcggcaactattttgaataccagggaaaagtcatggatatcgaaggcaagaaaaaagaaaaaggcatgtatctccatgataaagaacgcggaaataaatatccgattttcgaagacgaaaacggcacgcacatcatgagtccgaatgacgtctgcatcattgatgagcttgaagatttaatcgatgccggcatcgattcatttaaaatcgacggaattttaaaatcggtcgaatacatgactgaagtaacggccatgtaccgcgaagccatcgacctttgcatcgcagacagggaagcatatgaagacaagaaagaacaatggatcgagcggatcgaacagctgcagcctgcaaaccgcagcattgataccggattctttttcaaagaaacagtatactaa

SEQ ID NO: 3339 - DNA, 663 bp, Bacillus licheniformis
gtgaagattggacacgaagaattgaccggctatcttgaaaagctgctaaagccgcggccggctgaaattatgaaactggaggcctatgccgaagagcatggcgtgcccattatggaaccgacaggaatcgaagtgctcctgcagcttctttcattcaaaaatccgaaaaaaattcttgaaatcggtaccgccatcggctattcggcgattcggatggcgcttgcccttcccgaagccgagatttttacaatcgagcgcgatgaggacaggtatcgggaagcgctgaaaaacatccggtcattccagcttgaaaacagaattcacgtgttcttcggcgatgcgctcagcgagtctgaccccgttcaatcgatggctccctatgatgcgctgtttatcgatgccgcaaaaggccagtatcagaagtttttcagtatatatgaaaaaatgcttgccgatgacggcatcatttttacggacaatgtccttttcaaaggccttgtcgcatcagaatacaatcagatcgaaagcaagcgcatcaaaaagcttgtatcgaaaatagatcattacaatcattggctgatggagcatcctgactaccacacggcgatcctgcctgtgggcgacggattggccgtcagtcaaaaaagaggtgaacggatatga

SEQ ID NO: 3340 - DNA, 1113 bp, Bacillus licheniformis
atgtttgaagatcagacaaagaaaccgtttataaaaagactccttaaacataaaataaagttttggctgactgtggttgcggttctgctgattttaaccgcaggcgctgtttcgctctacgttaaatcggcgctcgaaccggtcgataaaaataatgcaaaaacggtcaatgtctatattccggaaggatcgaccgttacgtccatcgccgccaaactgaaaaaagaggacctaattaaaaatgaaaaagtatttatcgcttatgtgaaatttaaaaatgcctccggctttcaagcggggaactttcagctcagccagtcgatggatgcggcaggcatgattaataagctgacaaccgcttcacatgtgccggcatttaaaattaccgttcctgaaggaaggcagctccaggaaatcgcagacatcatcgccggacaaacgaactactcggcaaaggacattatgaaaaagctggatgacagggaattcatcagccgattaaaacagaagtatccgaaactgatcacagacgacgtgttgaacaagaacatcaagcatccgctcgaaggatacctgcatcctgcgacatatccattttacgaccctgagacgaagcttgatgccattatcgaagcgatgatcaaacaaacagatcagctggctgaaaagtatgaaaagcagatgaaagacaaaaagatgtccgtccacaaagccttgacgatggcttcgttaattgaagaagaagctaccgaaaaagcggaccggcacaaaatctcaagcgttttctacaaccgcatcagcaaaaatatgccattgcaaacggatccgaccgtcttatatgcactgggagaacataaaaaccgcgtcatgtacaaagaccttgaagcggattccccatataatacgtacaaacataccggtcttccgcccgggccgattgcaaacgctggagagacttcctgggaggcggcattaaatccggagcaaacagactatgtttattttcttgcaaagaaaaacggggaagtcgtctttacaaaaacgcttgaagaacacaataaagcaaaagccaaatatattacgaacacgcaggacgaggaaaaaggagagtaa

SEQ ID NO: 3341 - DNA, 285 bp, Bacillus licheniformis
atggaacacggagaaaaaaacattacaattgtagacgataaagggaatgaacagctgtgtgaagtgctctttacatttgacagcgatcagtttaacaagtcatacgtgctttattatccgattgaagcacaggacgatgaagagatcgagatccatgcttcaagcttcgtaccgaatgaagcaggagaagacggcgaactgatgccgattgaaacagaagaagagtgggatatgattgaggagacgctgaacacgtttttagcggatgaagacgaagaagaataa

SEQ ID NO: 3342 - DNA, 420 bp, Bacillus licheniformis
atgcgaatattaggtctggatttaggttcgaaaacgctcggcgtagcgctgagcgatgaaatgggctggacggctcaagggatagaaacgattaaaatcgacgaggcgggcggtgactacggcttgaaccgccttgccgaattgacgaaagactatgtaatagacaagattgtactcggttttcccaaaaacatgaacggaaccgtcggcccgaggggggaagcgagccagaagttcgcggaagtgcttgaagaaacgtttcaagttcccgtcgtgctttgggacgagcgcctctcgacaatggcggccgaaagaatgctgatttcagcagatgtaagcaggcaaaagagaaaaaaagtaattgataaaatggcggccgtgatgatccttcaaggatatctcgacagcctaaactcatga

SEQ ID NO: 3343 - DNA, 267 bp, Bacillus licheniformis
gtgagctcatttgataagacgatgaaattcaacttttccgacgattcgatggaaaccaatgtaaatgaagtgctgataaccgtccatgacgcgcttcaggaaaaaggctacaacccgatcaaccaaattgtcggatatctgctgtcaggagatcccgcttacattccaaggcatcgagatgcacgcaacctgattcggaaaatagaaagagacgagataatcgaagaattggttaaatcgtacttagaacagcataaagaggcgtaa

SEQ ID NO: 3344 - DNA, 2637 bp, Bacillus licheniformis
atgaagacattaacatccgcacaagtgcgccaaatgtttttagacttttttaaagaaaaagggcatgccgttgaaccgagcgcctctcttattccgcatgaagatccctccctgctttggatcaacagcggagtcgcgacgctgaaaaaatattttgacggacgggttgtgccggagaatccgcgcatctgcaacgctcaaaaatcaatcaggacgaacgatattgagaatgtcgggaaaacagcccgccaccatacgttctttgagatgctcggcaacttttcgatcggcgattatttcaaagaagaagcgatcgagtgggcatgggaatttttaaccgatcaaaaatggatcggcttcgatcccgaacgcctgtcagtcacggtgcatccggaagatgacgaagcgtatgaattatggtcaaaaaaaatcggcatacctgaggaacggatcatcagactggaaggaaacttctgggatatcggcgaaggcccgagcggaccaaataccgaaatcttctatgaccgcggtgaagattatggaaatgatccgtctgatccggagctttacccgggcggggagaacgagcgttacctagaagtatggaaccttgtgttctccgagttcaaccacaatcctgacggaacatacacaccgcttccgaagaaaaacattgataccgggatgggtcttgaacggatggtatctgttattcaagacgccaagacgaactatgatacggatttgtttatgccgatcatcaaggcgacagaagccatttcaggagaaaagtacggcacatctgctgaaaaagatacggcgtttaaggttgtggccgatcatatccggacggctgcgtttgcggtcggcgacggagcgcttccgtcaaacgaggggcgcggctatgtcatcagaaggctgcttcgccgcgctgtccgctatgcgaagtccatcaatatcaaccgtccgtttatgtatgagctcgtaccggtagttgccgacatcatggccgctttctacggcgaagtcaaagaaaaagcggactttatcgcgaaagtcatcaaaacagaggaagaacgcttccatgaaacattgcacgaaggcttggcgattctctcagaagttattcaaaaggaaaaagcaaaaggaaaccgcatcatttccggggaagatgtctttaaactgtatgatacgtatggattccctgttgaactgaccgaagaatacgccgaagatgaaggcatggaagtcgatcatgaaggatttgagcgcgagatggacaagcagcgcgaacgggcccggcaggcgcgccaggacgtcggcagcatgcaggttcaaggcggcgctctccgcgatatcatgacagaaagcgagttcatcggctattccgatatcaaaacggaaacgaaaatcgccgagcttcttcaagacggagaacttgtcgatctcgttcaggaaggccaaaaggttcagttcattctggaaaaaacgccgttctatgctgaaagcggcggacaaatcggtgataaaggctgggttaaaagcggtgatgcggctattcgcgtcacagacgttaaaaaagcgccaaacggccagcacctgcatgaagggatcgtggaaagcggcgcaattaaaaaaggcatgagcgtgaccgcagaagtcacggagcggctcagaaaagacatcgtcaaaaaccataccgcgacacacctgcttcaccaggcgctgaaagatgtgctcggtacgcatgtcaaccaggccggctcgctagtcactgacagccgtctgcgctttgacttctctcactttggacaggtgacaaaggaagaactcgaacaaatcgaaacaaaagtgaacgagaaaatttgggcatcgattccggttcaaatcgacttaaaaccgattgctgaagcgaaagcgatgggagccatggcactgttcggcgaaaaatacggggacatcgtccgcgttgttcaagtcggcgactacagcatcgagctgtgcggaggctgccatgtgagaaatacggctgaaatcggcctctttaagatcgtatccgaatcaggaatcggggctggcacccgcaggatcgaagctgtaacagggcagggcgcttacgaagagatgaacgccaaactggagcttctcgaacaggcggcagaagtcctgaaaaccaacgtgaaggaagtgccgaaacggatcgaagcgctccagtctgatctgaaagatgctcagagagaaaacgaatctttattggcgaaactgggcaataaagaagccggagagattttggaaaaagtaaaagaaattgacggaatcaaactgctcgcagaaaaagtgaatgccaaagatatgaatcacctgcgcacaatggttgacgatctgaaggcgaaactgggctcagccgttattgttctcggggcggttcaaaacgaaaaagtgaatatttccgccggagttacaaaagatttaatagagcggggtttccatgcaggcaagcttgtcaagcaagtcgcagaagcatgcggaggcggcggaggcggccgtcctgacatggcgcaggcgggaggaaaacagcctgagcggctggcagaagcattggcatctgcggaagaatgggtaaaatccgttttataa

SEQ ID NO: 3345 - DNA, 1059 bp, Bacillus licheniformis
atgctgaaaaaaccgctgcagcttttaatgtgggtctcgatctttatgcttttgctattaaccgtctatatctttttgcagctgagaatgatttgggagcctgtctgcgtgctgctcaagtcgattctgatcccgctggcgatcgcggtttttatcacctatctgcttttgcctgtcgtggaaaagatacaccgggcaggcgtgccgagaacattgagtattttgctgatttattttctgttttttgcaggtctcggctacgctttttacaaaggggtgccgatcctcattaaacagctgacagagctttcagagggaattccggttcttgccgcatcatacgaaaacatgctggatcagctgcatcatcatacagacggctggcctgacggcatgcacgacagagtcgacaggttcgtcaatcagacggaagaattcgttgcaagctgggtagaacggacgatacgaagcatccgattcgtttttgattatatgctcttggcggcgatcattccgtttttagtattctacatggtgaaagatattgatacgatgaaaaaggcggtatggtatttgacgccttcttcatggagagcaagaggcagcgaattcatccgggatgtcgatgattctctcggggactacatcagaggccagctttttgtctgccttgtcatcggcttgggagcgagcctgtcattttggttttttgacctgccctatccgctgatcctcggccttgtcatcggcgcgacaaatgtcattccgtatttcggccctgtcatcggcgcgattccggctgtcatggtagcagccgctttatcgacgaggctcgttttcgtggtgatcattacgattttgattcttcagtttattgaaggcaatatcctcgggccccttgtcgtcggcaaaagcctgcatatgcatccggttgtcattatgcttggattgctggcgggcggggagcttgccggcatcatcggcatgattctggctgtgcctgtcatggctgttatcaaagtgatgctcgtccattttttagcggcaagaaaagcgtaa

SEQ ID NO: 3346 - DNA, 192 bp, Bacillus licheniformis
atgctcgtttgcccgaattgcaaaagcaaaaacatcggcaaaatcggtgtaaatcaatattactgctggggatgctttattgagctgaccctatcaaaaggaaaaatttcgacccatcaagtcgaagaggacggaacattgagcagcctggacgatctgtttacagatgacgaacgaacgatcaacctttga

SEQ ID NO: 3347 - DNA, 480 bp, Bacillus licheniformis
gtggttgatcacactttgagaacatgcaatgagctggaaggactcaatgtttacgacagacagtcttctctcccgcttggggtggtaacggatatctgtttttctcacgaagggacatgtctcggattgattatggaagagaagcggcgcttttacaatccccgttcgcttcttccgcttcccgcggtcaccgaaatcggacgtgacggcgtatacgttgatttcaccgagttcaagccgatgcaagttccgaagcagagtctttcttatgaccagatgaagcaaaaaatggtcaaaaacggagcaggagatacgctgggcatgctggaagatgtatacttttcttccgacacgggcataatcgtagcatatgaactatcagacggtttttttgccgatttgtcaggcgacaaaaagcagattcactcatctggggaaccgcttgaagtaggcagaagcacaatcgtcttgaacgaataa

SEQ ID NO: 3348 - DNA, 2400 bp, Bacillus licheniformis
gtgatgcagcgccataacccggaccagatcgaaatggaagaagcttcatttgtaaaaggaacggtaacggctgtcatatatcataatgaaacaaacctgtataccgtactgaaagtaaaagtggaagaaacatcagagtcttttgaagacaaaaccgtttctgtcaccggttactttcctttgatccatgaagacgatatctacacattttacggaaaaaccgcctcccatccgaaatttggcctgcaatttcaagcggatcatttcaaaaaggaagtgccgacaacgaaagaaggcgtgatccaatacttggccagcgatttatttgaaggaatcggcaagaaaacggccgaggaaattgtcaataagctgggggaaggggcaatcaacaaaattttaagcgacggcgccgtcctgtatgatgtcccgaagctctccaaaaaaaaggcggataagcttgccgctgcccttcagcagcatcaggggctcgagcagattatgatctccttgagcgaattcggcttcggcccccagctgtccatgaaaatttatcaggcgtacgaagcggaaacgctcgataaaatccgcgaaaatccgtaccagcttgtcaaagatgttgaaggaatcggctttatcaaagcagacgaactgggcggcagaatggggatctcaggcaaacatgaagagcggatcaaagcggcgattttatacacggttgaagcgacatgccttcaagaagggcatacgtacatagaaacgagacagctcatcatcgagacgcaaaagctgttaaaccagtcagcaggcgatgaaaaagtaaccgagatggatgtggcggacgcgatcatttccttaggggagcaaaaagagctgttcattgaagatgaaaggtgttattatccgtccctttactacgctgaacaaagctttgccaaaagggtgcagaaaatcgccggacagaccgaatacgatgaccagtttcccgaatcggaattcctgctcgctttaggggagcttgaagaacggatgaaagtgcagtacgcgccaagccaaaaagaagccatacaaaaagcgctgatgtcgccgatgctgcttttgacgggcggaccgggaaccgggaaaacgaccgtcatcaggggaatcgtcgagttgtacagcgagctgcacggcttaagcttaaatccggctgattacaaaaaagatgaaacgtttccgtttgtgctggcagcaccgaccggccgggccgctaagcggatgagcgagtcgaccggtctgccggccgttacgattcacaggcttctcggctggaacggagccgaaggatttacgcacgatgaagacaatccgattgaaggacggctgctcattattgatgaaacgagcatgcttgatatatggcttgccaaccaattattcaaggcgatccccgatcggatacaggtgatcatggtcggagatgaagaccagcttccgtccgtcggtcccggacaggtgctaagggatctgttggcatcgaatgtgattccttctgtcagattaaccgacatttacagacaggctgaaggctcttcaatcgttgaactggcgcacgaaatgaaacagggaaagcttccggaaaacttggccgccccgacaaaagaccgttcttttattcgctgccgccagcagcagatcaaagaagtcgtcgaaaaagtcgtcaaaaacgcgctgcaaaaaggatattcggccagggatattcaggttttggctccgatgtacagaggagcggccggcatcaatgagttgaacgcccttttgcagggcatactgaatccgccgaagccgaaaggcagggaaatgaagtacggagatgtcgtgtaccgtaccggagataaagtgctccagctcgtcaaccagccggagcataacgtgtttaacggtgacatgggcgagatcgtctcgattttttatgcgaaagaaaatacggaaaaagaagatatggccgttgtctctttcgacgggaatgaaatcacgtttgcaaaaaaagatttcaaccagtttacgcacgcctattgctgttcgatccacaaatcgcaaggcagcgaatttccgatcgtcatccttccggtcgtcaaaagctattaccggatgctgagaaggaacttgctttacacggctattacaagaagcaaaaaattcctgattctgtgcggcgaagaggaagcccttgaatggggcgtgaaaaataaggaatcatcagaaaggcagacatcgcttaaaagacggcttcagcaggcggcacatgaagaggatgaagagctcatggcgcttcaaaaagagctgccattcagcgtctatgacgccaatatcgggatggaaggcattacaccttttgattttatggaaaaggaagcagaataa

SEQ ID NO: 3349 - DNA, 651 bp, Bacillus licheniformis
ttggattacaatcaaattggaatagatgcaatgcaaaaaggcgactttgaaaaagccgctgaagcctttacaaaggcaattgatgaaaacagcggagatccggtgccttatatcaactttgccaacctgctttctgcagtcggcgaattggacagggcgcttaagttttacgacagggcggctgctttggatgagaaagcaggagcggcttattatggagcagggaatgtctatgtcatgaaagagcggtatcaagaagcgaaggacatgttcgaaaaagcgcatcggacgggcatggaaaacagcgacttatattatatgctcggaaccacgctcgtgaagcttgagcagccgaagctcgcaatgccgtatttgcaaagagccgccgagctgaacgatgcggatgtcgaagcccgttttcattacgcgatgtgccttgccaatgaagggatgctggacgaagcgatcacggaattttcaaatgtaacggagcgcgacccgtcccatgccgatgcattttataatttaggcgttgcctatgcgtttaaggaagatcggaaaacagcgctcgacatgctgaacaaggcgctggacattcagccggatcatatgctcagcattcgcgccaagcagcttttagaagaagcttga

SEQ ID NO: 3350 - DNA, 1119 bp, Bacillus licheniformis
atggcgaagcggcctgaagatacacgggtggtcgtcggaatgtccggaggcgttgattcctctgtggcggctttgcttttgaaagagcagggctatgatgtcatcggaatttttatgaaaaactgggatgacacagatgagaacggtttttgcacagcgacggaagattacgaagatgtcataaaggtatgtaatcaaatcggcataccgtattatgcggtgaattttgaaaagcagtattgggaaaaggtttttcaatatttccttgatgaatataaagcgggcagaacgccgaatccagatgtcatgtgcaataaagaaattaaattcaaagcctttttggagcatgctttgtcgcttggagccgattatttggccaccggccactatgcgcgggtcgaccgtacggacgggcgtgttaaaatgctcagagggcttgatgaaaataaagatcaaacctattttctaaaccagctgacagaagagcaactgagcaaagtgctgtttccgatcgggcagcttcaaaaaagccgcgtcagggaaattgcaaaagaagcggggcttgcgacagctgccaaaaaagacagcacaggcatctgctttatcggggaacggaatttcaaaacgtttctcagccagtaccttccagcacagccgggagatatgcggacgatggaaggcgaatttaaaggccgccacgacggtttaatgtactatacgattggacaaaggcacggcctcggcatcggcggaagcggagagccgtggttcgtcgtcggaaaagaccttgaaaaaaacatcttgtatgtagatcaaggtttcgacaatccgctgcttttctccgataagattacggcgacaaacgtaagctttgtgcataagggcgtcttcggcggcgaagaggagctcgcctgcacggccaaattccgctaccgccaagccgatcatgaagtcactgtcagaatgaccgggacggatgaagcggaggtcgtctttaaagagccggtccgcgccgtgacgccgggacaagcggttgtcttttacaaaggcgaagaatgcctcggcggcggaacgattgatgatgtgtttaaagacggacaacaactttggtatgtataa

SEQ ID NO: 3351 - DNA, 1140 bp, Bacillus licheniformis
atggaacggatttacttagaccatgcagcgacttctccgactgacccccgggtagtggaaaaaatgctgccttacttaacggaaaacttcggaaacccttcaagcattcattcctttggaagggagagccggaaatggcttgacagcacgagggagctgatcgctcaggaaatcggagcgcatcccaatgaaatcgtttttacgagcgggggaaccgaagccgacaatatggcgattctcggaagcgcgctggcgagagagaagcagggccgccacatcatcacgacaaagatcgagcaccatgccgttctgcatacgtgcaacaggcttgaagaaatgggatttgacgtcacatatctagacgtcgacgaaagcggaagaatctccgccgagcaggtgaaagacgcactgcgagacgataccatcctggtgacggttatgtatgggaacaatgaagtgggaacgattcagccgatagatgagatcggcgatctgctaaaggaccatcccgcgctgtttcatacagatgcggttcaagccttcggttttttgccgattgatgtgcaaaaaagccgtatcgatatgatgtctgtctccggacataaacttaacgggccgaagggaacaggctttttatacgtcaacgaaaacgtgaagctcagccagcttcttttcggaggagagcaggaacgcaaacgccgggcgggaacggaaaatgtcccgggaatcgcggggctcggtgaagctgttttgctctcgggtcgggaaagagaagaaaaatcggatctttaccgccggtttaaagacatcatcacccgtacgctggaagcagaaggcgtctcattcgatgtgaacggcagcaggcggcacagtctgccgcatattttgaatctgtatttcccgggagtatctgttgaatcgctgctcgtcaatctcgatatggcgggaatcgcagtatcgagcggatcggcgtgcacggccgggtctgtgcttccgtctcatgttctctccgccatgtttggcgaagaagacgatcggctcacgtcatccgtccggatcagcttcggctttggcaatacagaggaacaggttgagcgcgccgcgaaagaacttgctaaagttgttaagcgtctgtcataa

SEQ ID NO: 3352 - DNA, 417 bp, Bacillus licheniformis
ttgaaaatatcaactaaaggcagatacgggctgacgattatgattgagcttgcgaaaaagcatggggaaggcccgacttctttgaaaagtattgctcagacaaacgatttatcggaacattatttggaacagcttgtttcacctttgcggaacgccgggcttgtgaaaagcattcgcggggcctacggcggctacattcttggtgaggagcctgcggcgattacggcgggcgatatcattcgcgtcctggaagggccgatcagcccggtggaagtgcttgaaaatgaggagccggcaaagcgcgaactgtggatcaagattcgcgatgctgtcaaggaagtgctggactccacgacgcttgaagacttggccagctatacagagggcgagcaggaagcgtatatgttttacatttaa

SEQ ID NO: 3353 - DNA, 1266 bp, Bacillus licheniformis
atgaaaccactcgcatttcgaatgcgccctacaaaaatcgaagaggttctcggccaggatcacctggtcggggaaggaaagatcattcatcggatggtgcaggccaaacacctttcatcgatgattctgtacggccccccgggcatcggcaaaacgtcgatcgccacggcgattgccggcagcacgagcatcgctttccgaaagctgaacgcagtcatcaataataaaaaggatatggaagccattgccgccgaagcaaaaatgtcggggcaggttatcttaatccttgatgaggtgcaccggcttgacaaaggcaagcaggactttctccttccgtatttggaaaacggcatgattatcatgatcggggcgacgacagccaacccgtaccatgcgatcaatccggcgatcagaagcagaacgcagattttcgagctgcatccgttagaccctgaacaaatcaaaacggccattaaacgggcgcttgaagataaacacagaggcctcggttcgtatgacgttgccgtcgatgatgaggcgcttgaccatttggcccgcggctgcggcggagatgtccgctcagctttgaatgcgctcgaacttgccgtattgtccacaaaggaaaacagtgagggagcgatacgcattacattggaaatcgcagaagaatgcctgcagaaaaaaggctttgtccatgacaaagatggagacgcgcattatgatgtcatttccgccttccaaaaatcaatcagaggctctgatgtcaatgctgcactgcactacatggcaaggcttattgaagcgggggatttggaaagccttgcacggaggctgcttgttatcgcctatgaggatgtcgggctggcgagtccgcaggctggtggaagaacgcttcaagccattcaaacggcggaacgaatcggatttccggaagcgaggattccgctggccaacgccgtgattgagctctgcctgtctcctaaatcgaactcggcgatccttgcagttgacgaagcgctgtcagacgtccgctccggaaagatcggcgatgtgccgaaccatttaaaggacgcccattacaaaggagccgctgagcttggcagaggtgtggaatacaaatatccgcacgattacgagaacggctgggtcaaacagcagtacctgcctgatccgctgaaaaacaaagtttactatcagccgaagcagacgggaaaatttgaactcgcactgaaacaagtatacgacaagctgatgaaacaaaaataa

SEQ ID NO: 3354 - DNA, 765 bp, Bacillus licheniformis
ttgttacatcagttttcacgcaacgaattagcgattggaaaagaaggtttaaatattttaaaaaacagcacggtcgccgttttgggcgtcggcggggtcggttctttcgccgcggaagcgctcgcccgttcaggtgtcggcagaatcgtgatggtcgataaagacgatgttgacatcacgaatgtcaaccgtcagctgcctgctttactttcaacggtcggacagccgaaagttgacttaatgaaagcgagaatcgccgatattaatccggaatgcgacgtcatcgctttaaaaatgttctataccgaagagacgtatgaacagttttttgcatatgaaccggattatgtaatcgacgcttcagacacgattcattataaaatccacttaatgaaagagtgcctgaagcgcggcatcaacatcatctcaagcatgggagcggccaataaaacagatccgacaaggtttcaagtggccgatatttcaaaaacccacaccgatccgattgcaaaagtcatccggacgaggcttcgcaaggaaggcattacgaaaggcattaaagtcgtcttttctgacgaaagtccgatcgtgatccgtgaagacgtacgccaagtcgtcggaaatgatgaagcgaaaatccgcaaagcgcagatgccgccgtcttcaaatgcttttgttccgtcagtcgcaggcttgattatgggcggccatgtgatcatggagcttttgaaagatattccgatcaaaagggtgaaagataagtaa

SEQ ID NO: 3355 - DNA, 222 bp, Bacillus licheniformis
gtgtttgttgtacacctagttttgaccgaacatttttttacttgggagttcgatgtttccgaatggagcaaatgcctcttatcactcgtgtgctcaggaggacttgcaaagtttggaacagaacacccacctgccgagagcgggatcaaaacgaaggaatacgacaacggcacaatcgggacttttttgtgcttgaaaaggccgtttttcggccatacatag

SEQ ID NO: 3356 - DNA, 1779 bp, Bacillus licheniformis
ttgtttggacgaacgtattattgtggcgaaataacggagaaggcgatcggagaaaccgtcgttttaaaaggatgggttcaaaaaagacgcgatctcggaggcttgatttttattgatttgagagatcgtaccggcattgtgcaggtcgtatttaatccagacgtttccaaagacgccctggaaacagctgaaagcatccgcagcgaatatgtgcttgacattacaggcaaagtcgttgcccgtgaagaagcaacagtcaatccaaacttgaagaccggaaggatcgaaattcaggcggaatcggtagatgtgctgagtgcggccaaaacgcctccttttgcgatcagcgaccaggctgcagaagtatctgaagacatcagattaaagcaccgctatctcgacttgcgccgtccggagatgttcaactccctgaaaatgcgccataacgtcacaaaagctgtccgccgctttttggatgacaacggctttcttgatattgaaacgcctgttttaacaaaaagcacgcctgaaggcgcgcgcgactatcttgtaccgagccgggtgcatgaaggggaattttatgcgcttccgcaatctccgcaaatctttaagcagctcttgatggtgtcagggtttgaccgctattatcaaatcgcccgctgcttcagggatgaggacctgcgcgccgaccgtcagcctgagtttacgcaaatcgatatcgaaatgtcatttatgagccaggaagacatcatgaagctctcagaagaaatgatggcgcatgtgatgcgtgaaacgcacggcattgaaatctcgcttccccttcctagaatgtcgtatgaggatgctatgaaccgatacggctcagacaaaccggatacgcgcttcggcatgctgttgacggatgtgtcagaagcagtgaaggattccgactttaaagtgttcgcttcggctgtggcgaacggcggagcggtcaaagcgatcaatgttaaaggagccgctgcaaactactctcgcaaagatatcgatgcgcttggagagttcgctgcaaactatggagcaaaagggctggcttggctgaaaacagaagcggatggacttaaaggaccgattgcgaagttttttgccggcgaaaaacaggaggcacttgttcaggcgcttgacgccgcagacggggatctgcttctctttgtggccgacaagctcgaagtcgtcaatgacgcgctgggagcgcttcgtttaaagcttggtaaagagctgaacctaatcgatgaaagcttgtttaacttcttatgggttgtcgactggccgcttcttgagtacgatgctgaggaaggccgctactatgccgcacaccacccgttcacaatgcctgtcagagaggatctcaagctgatcgagacgaatccgcaggacatgaaagcgcaggcttacgaccttgtcctaaacggctatgaacttggcggcggctcgatccgtatttttgaaaaagacgttcaggagaaaatgtttggccttctcggcttttcagaagaagaagcgaaggagcaattcgggttcctgctcgaggcttttgattacggggctcctccgcatggcggaattgcgctcggtcttgacaggctggtgatgctgctcagcggccgtacgaatttgagggatacgatcgcatttccgaaaacggccagcgcaagctgcctgatgaccgaagcgccaagcgaggtcgacaatgctcagcttgatgagctgcaccttgaaatcaaacgcaaaattcgacagtaa

SEQ ID NO: 3357 - DNA, 1275 bp, Bacillus licheniformis
atgggatttaatattccaaggggaacacaagatattctccccggagaatcggaacgctggcaatatgtcgaaaagattgcgagagaaacgtgtcatgcgtatcaatataaagaaatccggacgcctatttttgaacatacagaactattttcccgcggggtgggagaatcgaccgatattgtgcaaaaagaaatgtatacattcgcagacaaaaaaggaagaagcctgacgcttcgtcctgaaggcactgcatctgcagtacgctcttttgtggaaaacaaactttttgcaaatccggttcagccgacgaagctttactacattggaccgatgttccgctatgaaaggccgcagacgggccgctaccgccaattttatcaattcggcatcgaagcgatcggttcgaacgatccggcgattgacgcggaggtcattgctttggcgatgagtgtataccggaaagcgggtctcagcaacctgaagcttgtcattaacagcctcggcgacaaagagagccgaaccgctcacagagaagcgctgatccgccactttgagccgcggatcgacgagttttgttcagactgtcaaaaacggctccggcaaaacccgctgcggattctggactgcaaaaaagacagggatcatgaactgctgaaaacggctccgtcgattcttgactacttaaatgaagaatctaaagcatattttgcaaaggtacagcaatatctgacggacatcggcattgcatttgaggtcgatccgaatctggtgagagggcttgactattacaatcacacggcctttgaaatcatgagcaatgccgaaggcttcggagcgattacgacgcttgccggcggggggcgctatgacggccttaccgaggagttcggcggtccgaaagcgccgggcatcggctttgcgatgagcatcgaacgccttctcgccgcactggatgctgaaaatgtaaaagtcggagcggatgaaggcattgactgctatatcgtgacacttggcgacaaagccaaagactattccgtatcccttctctataaactgagagaagcggggatatccgcggaaatcgactatgaacagaaaaaaatgaaaggccagtttaaatccgccgaccgtctcaatgcgaaatatatcgctgttttgggcgaggatgaactgaaccaaaatcaaattaatgtcaaagatgggaaaacaggagatcaacaggccatcggccttgatgatttcatccgttttttgaaaacaaacactgaaagttaa

SEQ ID NO: 3358 - DNA, 165 bp, Bacillus licheniformis
atgaggtataatcaaagaatgggcagggcgatccatgagcaagatgcgaatctgcatctaaaggagcatgcggacccggagcgcgccggcttcatggaagaaacggccactgagctggggctcacgtccaaagaatcaattcagaataaaaagaaccgcaaatag

SEQ ID NO: 3359 - DNA, 1572 bp, Bacillus licheniformis
atgaaaaaaagagcggtattgatcctatcgatgatgctggcagcacaagcagccttttatacatcgtcaaacacagcttctgcagccatcggggaagccgtgattgccaccgatgaaatcaatgtcagaagcgggcctggactgagccacgaaatcgtcagcgtcgtcagcaggaatgaaagctatccgattcttgaagaacgcggggattgggtgcaaatccagctgaacggcgggcaaaaaggctgggtcgtatcctggctgatcaagaaaaagagccaagtctccagcggatctgattccgcatcgggaaaagtcacatcttccgaagcaaacttgagaatcagaaaaggccccggcacttcatatgaagtccaaggcgtattccctgaaggagaacaggctgacctgctaaagaccgacggaaaatggataaagatttcctatcagaacatcacaggctgggtctattcagattatgtcaatcaaggttcaggcgcgaaacagtctcaatcgtcttcatcacatgcttcatcatcaaaatcgggaacggtcggcgtatccaccttaaatgtcaggagcacagcttcccatcaaggccggattattgccacgctccaacggaatgcaagtgtgacgattttaaacgaacagcacggctggtatgaaatcgaatttaatggacaaaaaggctgggccgcaagccactatattctcgaaggaaacaaacagaacagcggaacctcggaaacaagcagcagctccgaagcaaaacggcaggccaccatcgtgtatgaaggcacaaatgttagaagcgggccttcgacatcctcagcgatcgtcaaacgcacgggaaaaggcgagtcttacccgatcgtctctacaaaaggagactggtatgaaatcaaactgtcaaacggcgattccgcttatgtcgcaagctgggtcgttcagactgttgaccaggcaggctcagccggagattcgaaaagcgcagcaccgcctttggcaaagcggtcaagctcgggaggcacaatcaaaaataaaacggttgtcatcgatgccggacatggaggacatgacagcgggacaatcggaacgcgggggacgctcgaaaaacggctgaccatcaaaactgcaacgcttcttgccgcgaaactgagagccgatggcgtcaacgtctatatgacgcggaatgacgattctttcgtcagccttcagtcgcgggtcgcgacctctcattaccgaaacgccgacgcttttatcagcattcattatgatagctttccaaatgcgtccgtcaggggaaatacggcctattactacagcccgtccaaagaccggaagctcgcagcagacgtgcagtccgagatcgaaaggcactcgcctctgccaagccgcggcgtactattcggggactacttcgtattaagagaaaataaacagcccgccgcattgtttgaactcggctacttgagccatcctcaagaagaagcggtagtcagcacgaacgcttacagagaaagagtgacagacggcatcagaagcggtctagaaaactattttgactaa

SEQ ID NO: 3360 - DNA, 444 bp, Bacillus licheniformis
atgagattagttgttcagcgcgtcacagatgcaagcgtttcggtaggaggcgagactgtcggcgaaatcggcctcggtttgatggtgcttgtcggcgtgacgcacgaggatacgagcgaggatgccgcatatttggcggaaaagcttgtcaatctgcgaatttttgaggatgaaggcgaaaagatgaacctgtcgcttttagatgtcggaggctccgttttatcggtttctcagtttaccttgtacggcgacacgaaaaaaggaagacggccgaattttacaaaagcggcaaagcccgatcaggcgcttcaattgtacgaagagtggaacagcatgcttcgcgcaaaaggcgtcactgtcgaaacgggaagatttggagaaatgatggatgtcaagctgacaaattcgggtcccgtcacgtttattatggattcgaaagcataa

SEQ ID NO: 3361 - DNA, 2202 bp, Bacillus licheniformis
atggcgaacgaacaagtattaaccgctgagcaagtcattgagaaggcgaaaagttacctttccgatgaacatgttgcttttataaaaaaggcttatcagtacgcggaagacgcacatcgcgaacaataccgcaaatcgggcgagccgtatattatccatccgatccaggtcgcgggaatcctcgtcgatttagaaatggaccccgccacaatagcgggaggatttctccatgatgtggtggaagatacgagcgtaacgcttgaagatttaaaggaagcattcaacgaagaagttgcgatgcttgtcgacggcgtcacgaagcttgggaaaattaaatataaatcacaggaagaacagcaggcagaaaatcatcggaaaatgtttgtggctatggctcaggacatccgcgtcattttgatcaagctggcggaccgccttcacaacatgagaaccctgaagcatctgccgcaggaaaagcagcgcagaatttcaaatgagacgcttgaaatatttgctccgctggctcatcgccttgggatttcaaaaataaagtgggagcttgaggataccgctttacggtatttaaatccgcagcaatattaccggatcgtcaatttgatgaagaaaaagcgggccgaaagggaattgtacgtcgaagaggtcgtaaacgaagtgaaaagccgcgtcgaagaagtcaatattaaagcggacttttccggccggccgaagcatatttacagcatctacagaaaaatggcgatgcaaaacaagcaattcaacgaaatttacgacttgctcgcagtccggatcctcgtcaacagcatcaaggactgctacgcggttttaggcatcattcatacgtgctggaagccgatgccgggcagatttaaagactatatcgcaatgccgaagccgaacatgtaccaatcgctccacaccacggtcatcggtccgaagggcgatccgctggaagtccagatcaggacgtttgaaatgcatgaaattgcggagtacggaatcgctgcccactgggcttacaaagaaggcaaaaatgccaatgaagattcaagctttgataaaaagctttcctggttccgcgaaattttggaatttcaaaatgagtcgagcgatgccgaagaatttatggaatctcttaaaatcgatttgttttccgacatggtattcgtttttacgccgaaaggggacgtcatcgaattgccgtcaggatccgtgccgatcgacttttcgtaccgaatccattcagaaataggcaataaaacgatcggggccaaagtaaacggcaaaatggtcacccttgattacaagctgcgcacaggggatatcgtagaaattctgacgtccaagcattcgtacggtccgagtcaggactggatcaaccttgcgcagacatctcaagcgaagcataaaatccgtcagttctttaaaaagcagcgcagagaggaaaatgtcgaaaaaggcagagaactggttgaaaaagaaattaaaaacctggactttgaagtgaaggacgtcttaacagccgagaatctgcagaaggtcgccgacaaattcaactttgccaatgaagaagacatgtatgccgctgtcggctataacggcattacagccgctcaagttgcaaaccgccttacggaaaaagaacggaagatcagagatcaggaagaacaggtgaaaagcgttcaggacgtaacgcctgaagtgaaaccttaccaagggaagaaacgcgaagcgggtgttcgcgtcaaaggcgttgacaaccttttgatcaggctgtcaaaatgctgcaaccctgttccgggagatccgatcgtcggattcattacaaaaggcaggggcgtatccgtccatcgcgaggactgcccgaatgttttaacaaatgaagcgctcgacaggctcattcaagtggaatgggagcatgaaccgcagacccagcggagaaaagaatataacgtcgaaattgagattctcggctacgaccgccgcggtcttctaaatgaagttcttcaggctgttaatgagacaaaaaccaatatttcatctgtttcaggtaaatcggaccgcaataaagtggcgacgatccatatggcgatcttcattcaaaatattaaccatttgcataaagtagttgaacggatcaagcagatcaaagatatttactccgtgcgcagggtgatgaattag

SEQ ID NO: 3362 - DNA, 135 bp, Bacillus licheniformis
ttgttcgttcgccatggaatcaccttttttataattgaaaactgtattgtaattattatcaagaaaaatgtcacagatgtaaagagaagaaattcaaaagggcttttgccggccccggaatacttttatgaatag

SEQ ID NO: 3363 - DNA, 513 bp, Bacillus licheniformis
atggatttgaagaagtatgtgacaattgtgccggattacccgaaggaaggcgtacaatttaaagatattacaacattgatggacaaaggcgacgtctatcgctacgcgacagatcaaattgtaacgtatgcgaaggaaaaagagatcgatctcgtcgtgggacctgaagcgagaggatttatcatcggctgccctgtcgcatatgcgcttggggtagggtttgcgcctgtccgcaaagaaggcaaactgccgcgcgaagtcatcaaagtcgactacggattggaatatggaaaagatgtcctgaccatccataaagatgccattaaaccggggcagcgcgtcttgatcactgacgacctgcttgcaaccggcgggacgattgaagcaacgatcaagcttgttgaagagctcggcggcgtcgtggccggaatcgctttcctgatcgaactgacatatcttgaaggaagaaataaactggacggatatgatattttaaccttgatgcaatactaa

SEQ ID NO: 3364 - DNA, 2349 bp, Bacillus licheniformis
atgttagcgtcaaaaatgcgttgggacgtgcaaacgcccgacaaagaaaaggtggagcagctcgccggaaggttaggcattactccccttgccgcctcattgcttgtcatgagaggttacgatacagccgacaaagcatcttcatttttatatggcaatgatgcacgttttcacgatccttatctgctgaaagatatggaaaaagctgtacggcgaatcaaacaggcaatttcagatcaagaaaagattatgatttacggcgattatgatgcggacggtgtgacaagcacgactgtccttttgcaaatgttgaaaaaatgttcagcacaagccgatttttatatacctgaccgctttaaagaagggtacggtccgaatgaagcggcctttcgcgggatcaaagaatcaggctattcattgatcattacagttgacacaggcattgccggcgttcatgaagctgaagtcgctaaagagctcggcatcgacctgatcattacggatcaccatgagccgggtcccgttttgccggatgcttatgcgatcattcatccgaaacagccgggctgcggctatccatttaaagagcttgccggcgtcggtgtggcatttaagcttgcccatgccttgaacggagagcttccggaagatttgctcgacctttgtgcgatcggtacgattgccgatcttgtgccgcttcatgatgaaaacaggcagatagccaagcgcggcatggaacagttcaggaaaacgaagcgcccaggattaaaagcgctggcgaaaattgccggagcggagatacataacgcggatgaagagaccatcggttttcaaatcgcgccccgcttaaacgcggtcggcagaattgaacaggctgacccggccgtttacctcctgaacacagaagacgaaagagaagcggaagagcttgctgaggacatcaacgccttgaacaaggagcgccaaaaaatcgtcaatcagatgacagaggaagccgttcagatgatcgaggaggaaggccttgaccagcctgtgatcgtcgtagcgcggccgggctggaatcctggcgtcgtgggaatcgtggcttcaaagcttgtcgagcggttttacaggcccgccatcgtccttggcgtcgatgaagaaaaaggaattgccaaaggatctgcgcgcagcatcaaaggatttgatttatttcaaaacctttccgagtgccgggatattctcccgcacttcggcggccacccgatggcagccggaatgacgctcaacctggaagacgtttcggctctgagggagagaatcaaccgtcaggctgaagcggttctgaccgaggcagattttatccccgtccaagacgtcgatttgtgctgccggctcgaagatatatcggttgacagcattgctgaaatgaacttgctggcgccgttcggcacgggaaacccgaagccgttcgttcttgtcagcgacgtaaaaattgatgacgccagaaaaatcggcgccaacaagaatcatttgaagcttgtgcttgcagacgacgggaacaagctcgattgcatcggattttataaaggcgatatcgaagaaggaatcgttcctggagcaaagatctcgattgtcggggaactgtcgattaacgaatggaataacagaaaaaaaccgcagctgatgatcaaagatgcggccgtcaatgaatggcagctgtttgatctgcggggaaaacggtcatgggaagaaaaaatattgaagctggaccctgcgaaacgggcgtgcatctgcttccgcgaggaaacaaaagcaaagctggcagggacaggccttgaagaagagctgaccgtcatcagcggccctgaagatgcagagcggctcgaccttgagagccgttatgcggtatttatagatattccgcagtcgctcgacatctttgatcatgtaataaacggcaaaaagctggagcgcatttatctgattttttatcaatcagacgaacattttttctcaacattcccaacaagggaatattttaaatggtactatgctttcctcctgaaaagaggttcttttgacttgccgaaatacggcggagagcttgccagacataaaggctggacaaaagacacaattgattttatgacaaaggtgttttttgagctcggttttgttacaatagagaatggtgttttatctgttgtttatcatgccgaaaagcgcgatttaacagattctgaaacctaccgggaaaaacagcgcctgattgaattggagcaaaagctcatttattcttcggcggatgagcttaaacagtggctggataagcggatggcggaaaaagccggcgcttataaagtatga

SEQ ID NO: 3365 - DNA, 294 bp, Bacillus licheniformis
atgaacaaacaatggacgttaattgctgcacttatttttacattaattgttgctgttttcgcggtcattaatgttgaaccggtgaaggttgattttctttttggtacagcagaatggcctttgatcctggtgattttggtgtcggtattgatgggggcgcttatcatcggctcggccggcgctttccagatcatgcggctgaaaaaagagctcaaggcgctcaagaaagaagaacgggcaaagcatcctgaactcgaagccgaaccggcggcgcccgaaaatcagaaagactag

SEQ ID NO: 3366 - DNA, 2226 bp, Bacillus licheniformis
atgaaaaaaggacgcttgattgcgtttttccttaccgttctcttgatcggtacaggactgggaatgttcacgaagccggctgcagacaacatcagcctcggccttgatcttcagggcggttttgaggttctgtatgaagtccagcctgccaaacagggcgacaaaattgacagggatgccctcatcagcacggttgaagcgctgaaccgccgggcgaatgtattaggcgtcagcgagccgaacattcaaattgaaggaaacaaccggatcagggttcagcttgccggcgtcgacaaccagaacagggcgcgggaaatcttatcgacacaggctcaacttacgttcagggatacgaatgacaaagagcttttgaacggtgcggatcttgtcgaaaacggcgccaaacagtcgttcaagcaggatacgaatgagccgatcgtgacgatcaagctgaaggatgccgataaattcggcgaagtgacgaagaaagtgctcgatatgaagccgaacaaccagctcgtcatctggcttgattacaaaaaaggcgactcttttaaaaaggaatcgcaaaaagcggatcataaatacatttccgctccgaatgtcagccaggtgctgaatacgtcagacgtgatgattgaaggcaactttacgattcaggaagcaaaagacatggcgagcattttaaatgcgggagctcttcctgtcaaactcgttgaaaagtattcgacatccgtcggagcgcagtttggggagcaggctttgaatgataccgtgtttgcgggaatcattggtattgctattattttcttatttatgcttctttactatcgcttgcctggttttattgcggtcattacgctttcggtctacatctacattacactgcagatattcgactggatgaatgcggttctgacccttccggggatcgcggctcttatattgggcgtcgggatggcggttgacgccaacatcattacgtatgaacgcataaaagaagagctgaagctcggcaaatcggtccgttcggcttttaaagcaggaaacagaagatcgtttgcaacgatttttgatgccaatattacgacgatgcttgccggaatcgtgcttttcatatttggtacaagctctgtcaaaggcttcgcgaccatgctgatcctatccattttgacaagctttattacagctgtcttcctgtcgcgcttcctgctcggcctgctggtcgaaagccgctggcttgaccggaaaaaaggctggtttggggtgcgcaaaaaagacattttggatatcagaaagacagacgaaaatacggagcctccgaacccgttttccaaatgggatttcgtcgggaagcgcaattggttctttgcattttcgggcgttcttctggccgctggtcttatcgtcttgcttgtgtttaagctgaacctcggcatcgatttctcaagcggatcgagaatcgaagttcaaagcgatcataagctgacaacccagcagctcgaaaaggactttgaacaagtcgggcttgatcctgactcgatcgttctttcaggcgaaaaaaatgatcatggcgtcgccaggtttgtcggcgtgccgaatcagaaaaagatcgctgaagtgaaagattattttaaagacaaatacggaagcgaaccaaatgtcagcaccgtatcgcctaccgtcggcaaggagctggcgagaaatgcgctttatgcggtgatcatcgcgtcaatcgggatcattttgtatgtctcgatccgctttgaatacaagatggcgattgcggctattacttcattgctgtatgacgcgtttttcatcattgccgtcttcagcctgacaaggcttgaggttgatgttactttcattgctgccgtgctgacgatcatcggctattcgataaatgatacaattgtaacgtttgacaggatcagggagcatatgaaaaagcgcaaaccgaaaaccttcagcgacttgtcgcatattgtgaatttgagcttgcagcagacgttcacgcgttcgattaatacggtgctgactgtcgtcattgtcgtcattgcacttctcatcttcggcgctgcatcgatttcgaacttctctgttgcgctgttggtcggacttttgagcggagtatattcatcactctacatcgcagctcaactatggcttgtctggaaagggcgcgaactgaaaaagccgaagcgcaagcctgcagaagaataa

SEQ ID NO: 3367 - DNA, 297 bp, Bacillus licheniformis
atgggcaaacatccggctgatctgtacaaggatcatttaaaaccctttcttcgcagcaagacggaagagtttagaatactcggttatgacgatattgaaatagaggaattgtggtcatacttattgaataagaaatggaagaaccggaaggatgttcaaattcaccagctggccggtgatattttatctgtgaaaattggcgaatttatgaactatgcaaccgtagaatcgtttaaaacgtctaatttgctcgacagcaaagaagggcaggatatgctcgatgagctgctgaggtag

SEQ ID NO: 3368 - DNA, 1554 bp, Bacillus licheniformis
atgacgaagcagacgtttttaaaaggaacgctcattttaatagcggcgggtttgattacgagaatgctcggctttatcaaccggattgtcatcgcaaggttcatcggtggtgaaggcgtcgggctttacatgatggcggccccgactttttttctggccgtcaccctcacccagttcggcctcccggtcgccatcagcaagctggtcgctgaagcggaagcgcgccgagaccataggaagacaaaacagattttagtgatgtctcttgcgatcaccgggacgctcagcgccatcatcactccggtgtttctcatttacgccccgctgatggccgatacgctgctcacagacaaaagaacgctttatccgcttttggcggttacgccggtcgtgccgatcattgccgtttccagcgtgctgaggggctattttcaagggaagcaaaatatgcggccgcttgccgtgtcccaggttctcgaacaaattgtccggatatcgctcgtcgccgtctgcacgacagcattccttccgctcggcatcgagtatgcagcagcgggcgccatgctgtcttccgtgtttggcgaattggcttcactcctttatttgttcgtctcctttaaatacaaaaagaaaatccgcatcagaaaacgttttttccaatcgcttaaagcggggcgaacgacttttttcgagctgatgagcgtctcgctcccaacgacgggcagccgttttatcgggaacctgtcatggttttttgagccgattgtcgtagcgcaaagccttgcgatagcaggggtcgccgcttccgccgcaacgagccagtacggggagttgaccggctttgccctgacgcttctcaccctcccgagctttatcacatattcgctgtctaccgcgctcgttcccgccatcagcgaaggaatcgagcagaaaaaaatgcaggttgtggaatacaggcttgagcaggcgatgaggctttgcctattaagcggcggaatatcagcggtcattttattttcgtatgctgatgagctggtcagcgtgatgtacgggtcgtcaaatgccgccatttacgtcaaaatcatggctccattctttttgttctactatttccaaggccccctgcaggccgtcctgcaggctttaaacctggccggcgcggcaatgatgaacagcttggtcggcgccgttgtgaaaaccggtctcatttttgttctcgcttcacggccttcgctaggcattatgggggctgcgcttgcgatcttgacgggaatcatccttgtcactttgctgcacgctgcaaccgtcagcaaagtgcttcccatcagcattaacctgaaagaatatatcgtatccttcggcgtcattttgatatcagggtggggcagccttctgatgaaagaacacctttttttagcccagtccgagccgatgcgcctgcttttatgtatcgcggttacaagctgtctctacgttttccttctgattgccttcaagctggtcaaaaaggaagaaatccagcggtttccgctgttcggccgctggatttcatag

SEQ ID NO: 3369 - DNA, 651 bp, Bacillus licheniformis
atggatgaaatcttagctcttacgtttcggacgatcgttttgtatttcatcatctttattttgtttcgcttgatggggaagagggaaataggcgagctgagcatactggatcttgtcgtttttatcatgatggccgaaatcgcggttttggctattgaaaatctcgatgaccaccttctccatacgatcatcccgattctcgttttgacgctgatccaggttatatttgcatatctgtcattgaaaaatcaaaaaatccgccggcttctcgatgggaaaccgacgattatcatagaccgcggaaaaattgatgaacacgccatgaggacacagcgctataattacgatgatttgatgacgcagctgagagataagaatgtggaacgaatcggggatgtttcatatgcgattttggagccgaccgggaagctttcagtgtttacaaaagacgggccgaacaaaatgatcgaactgccgttgattgttgacggagttgttcagaaagaagaattggaaaagatcgggaaggatcaagagtggcttgagcaaaagcttgaaaaaagaggacaccgcgatctttccaaaatttcttattgcacttacaataaaggttctttttttattgacataaaggatgaattcaagccttaa

SEQ ID NO: 3370 - DNA, 384 bp, Bacillus licheniformis
atgaacgaaccaaaacaagtcggcaaagggattttatacagcttggtggtcattttcgctttgatgtttgcaggaagcctgcttatttcgctgctccttaccttcacatcattaaccgaaagttcattcagctggttgattaccgccatatcttttattaccttgttcatcggcggttttattgcgggaggaaaatcgaaggaaaaggggtggctgagcggagggttgacagcgctttgcttctcccttacggtgcttttgtttcaatatctcggctttggagaggccttcaatttgaagcagctcctctatcattccggctttttgggagtcagcatgctgggcggggttttcggggtcaatctgcaggggagccgtgcataa

SEQ ID NO: 3371 - DNA, 171 bp, Bacillus licheniformis
gtgcataaaggcagcaaaaagggagcggatgtccgctcccttttcccagtgcccgcaggcttctttcgtcattcacatcagaaacaaatgcagcttcctaaaacaataaggaacggcgcttatagcgcgcggacgtccccgtccgaacagcgccgccgtcacgtcgtgtga

SEQ ID NO: 3372 - DNA, 261 bp, Bacillus licheniformis
atggagatgcttggaacattacttccgattattttaatgtttgcggttctttatttccttttgatccgtccgcagcaaaagcagcagaaggctgtccgccagatgcaggaggagctgaaaaaaggggataaggtcgtaacgatcggcggcctgcacggcatcgtggattcaattgacgaaagcaaggttgtcatcaaaacaggcgacaatacccgtctgacattcgaccgccgcgcaatcagagaggcgtcagcagaatag

SEQ ID NO: 3373 - DNA, 1146 bp, Bacillus licheniformis
ttgtcgcagcaaccgatacgctatgagttcataaaagcatgtaaacaaacaggagcaaggctggggagagtgcacaccccgcacggctcttttgaaacgccggtgtttatgcccgtaggaacgctcgccaccgttaaaacgatgtcgccggaagagctgaaagaaatgggtgcaggcattattttaagcaatacgtaccacctttggctgagaccgggccatgacatcgtcaaagaggcgggggggcttcatcagtttatgaattggaaccgcgccatcttgacggattcaggcggctttcaggtgttttccctgagcgagttccgcaaaatcgaagaggaaggcgttcatttccgcaatcatttaaacggagacaagctgtttttatctcctgaaaaagcgatggaaatccaaaacgccctcggctcggatattatgatggcgtttgacgaatgcccgccatacccggcagagtacgattatatgaagaagtctgttgaacgcacgagccgctgggcggaaaggtgcctgaaagctcacaatcgccctgacgagcaggggcttttcggaatcgttcaaggcggcgagtacgaaaatttgagaaaacaaagtgcgaaagacttgatttcattggatttcccgggatatgctataggtggactatccgtcggagagccaaaagacgtgatgaaccgtgtgctggagtttacaactccgctgcttccagcggataaaccgcgctacttaatgggtgtcggttcaccggactcactgattgacggagccatccgcggagtggatatgttcgattgcgtgctgccgacaaggatagcgagaaacggtacgctcatgacgagcgaagggcgcctcgtcgtcaaaaatgcaaaatatgaaagagatttcaggccgattgatgagcagtgcgactgctatacgtgccgcaattactcgcgcgcttatatcagacatttaatccgctgcaacgaaacgtttggaattcgtttaacttcttatcataatctttattttctgttaaaattaatggggcaagtgagagatgccattcgtgaagatcgtttaggtgatttccgggaagagttttttgagcgctacggttttaataaaccaaatgctaaaagtttctga

SEQ ID NO: 3374 - DNA, 1029 bp, Bacillus licheniformis
atgaaagtagaattattcgattttgacttgcctgaacgcctcatcgcacaggttcctttaaaagagcgggatgcgtccaggctgatggtgctggataaaaaaacaggggagatcactcacagcacgtttaagcacgtgattgattttctgaacgcgggcgattgcatcgttctgaacgatacgagggtgctgccggcccgcttgtacggagtcaaggaagagacgggagcaaaggttgaagttcttctgttaaaacaggaggaaggggacgtctgggaaacgcttgtcaagcccgcaaagcgggtcaagcgcggaactgttctttcgttcggtgacggccgtctaacggcggtctgcacagaagagctcgagcacggcggcagaaaaattgaattccgctatgaagggattttttacgaggtgctcgagtcgctcggtgaaatgcctctgcctccttatattaaagaacagctcgatgacagggagcgctatcagacggtttactcaaagaaacaaggatcggcggctgcgccgacggccgggctgcattttacggaagagattctcgatgcgctcagggaaaaaggcgtgcatattgcgtttatcacccttcatgtcggtcttgggacattccggcctgtcagtgcggaaaatgtagaggaacacgacatgcatgccgagttttatgaaatgtcggaagaaacggcagcattgttaaaccgcgtcagacaggaaggcggaaggatcatttccgtcggcacgacatcgacgagaacgcttgagacaatcgcttccgagcatgacggccgcttccgggaagcgagcggctggacatcgatttttatctatcccggctacacattccgggcaatagacgggatgattaccaattttcatcttccgaaatcgtccctcattatgcttgtcagcgcgctcgcaggcagagagcatgtgctttccgcctaccggaccgcagtggaacacgaataccgcttcttcagctttggagacgccatgttgatcaaataa

SEQ ID NO: 3375 - DNA, 204 bp, Bacillus licheniformis
atgactgaatttccaaagattttaatggtgctgggcgccgtcatttttggcatcggtttattcatgcaagtcatcggcaggcttcccggcgacattttttgtgaaaaagggaaaacgtgacgtttttctttcccgggttgttacatgcattgtcatcagcatcattctgtccgtcgtgtttcattcttcggacgaatgaaatga

SEQ ID NO: 3376 - DNA, 1005 bp, Bacillus licheniformis
atggatgagcggcttgtatcaagtgaactagacaaccatgaatcagcgattgagcaaagtctgcgtccgcaaagacttgctcagtatatcggccaggaaaaagtgaaagataacctcaaggttttcatcgaagctgcgaaaatgcgggaggaaacccttgaccatgtcttattgtacgggccgccgggattgggaaaaacgacgctcgccgcgatcatcgccaacgaaatgggagtcaatctcagaacgacgtcaggtccggcgatcgagcgccccggtgatttggcggcgatattaacggctctggagccaggtgacgttttatttatagacgagatccaccgcctgcaccgttcgatcgaagaggtgctgtatcctgcgatggaagatttctgccttgatatcgtgatcggcaaaggaccgtcggcacgttctgtgaggctcgatcttcctccttttaccctcgtcggcgcgaccacaagggttgggcttttaaccgcgcctctcagggacaggttcggcgttctgtcgaggcttgagtattacacgcgtgatgagctttcagagatcgtgatcagaacggcagagctgtttgaagtcgacatcgattcgctctcggctctcgaaatcgcgagacggtcaagagggacgccgcggattgccaacaggcttttaaggagggtcagggattttgcccaggtgcttggaaacagctccatcacagaggaagtggcggttgatgcgcttgaacgcctccaggttgataaactcgggcttgaccatatcgaccgcaagcttttgatgggcatgatcgaaaaatttggcggcggccccgtcggcatcgatacgatttcggctactatcggtgaggagtctcacacgattgaggatgtgtatgagccgtatcttcttcaaatcggttttattcaaagaacgccgcgggggcgcatcgtaacccctgatgtttacagccactttaaaatggaggttccgaaccatgactga

SEQ ID NO: 3377 - DNA, 606 bp, Bacillus licheniformis
ttgatcgaattcgtaaaagggacgattgattatgtatcgccccaatatattgtcattgaaaacggcgggatcggctatcagatcttcacgccaaatccgtttatttataagaaaaacagcaaagaaacaatctatacataccattatgtaagagaagacacgaatgcgctgtacggcttttcgacaagggaagaaaaaatgctgtttacgaaaatgctgaatgttacggggatcggcccaaaaggagcgcttgcgatcctcgcttccggcgatccgggagcggtgattgaagcgatcgagaatgaggacgaagcatttctcgtcaaatttcccggcgtaggcaaaaaaacggcaaggcagatcatccttgacctgaaagggaagcttgcggatgccgttcctgaaatcgctgccgatctgtttaaccatgaagagcgggagcaaattcatgaagcggcaacggctcttgaggaagcgcttgaagcattgagggcgctcggctattccgatcgggaaattaaaaaagtccagcctcatttgaaaaaggaagaggcgctttcgacagatcaatacgttaaaaaagcattgcaaaaattgttaaagtaa

SEQ ID NO: 3378 - DNA, 522 bp, Bacillus licheniformis
atgtacagccgaagcaagttcaaaatcggtttattgcttattggaagtctgctggccgcgctcagctttcacctggaggccttggccgaaaagccggctaaagttcaaatccagcttgaaaaggtttatctggacggagacgttggaattgagaataaagtagaggccgctcgcacactggaagactttaaagctgcttataaagggtggcagctcatcgatcagaaaaaggggtttattctgtttcgcaaacaggtggacgacatttctcccctcagcaaaacaaacggttatatcggagtgactgaagatggcgtgatttcgacttttcacggtcgcccgggcatcttatcagaacccattcaatcgttttttcagattgatataaagcggctggaaagccggatggcggatgatctgcgcaaagggataccataccgcacgaaaaaggaatttgaacatgtcattgaagccgtaaaatcatccggaagccaacatcatgtagaagatatgaagacatga

SEQ ID NO: 3379 - DNA, 651 bp, Bacillus licheniformis
gtgaaaaaggcgcatacctatgcagaagccgtaaagtatgatacgaaaaaaaagttcaacaagcttatccaaaaacccgatgacttggaattgatcgggaaaggcaggagcgcatacgtttttaagctgactgaagagggcgacagggaaatggctcttaaagtcttttttcctgaatttaagaacatcgccgcaagggaagcggagatttacaaaaagctttctgattcgaattattatcctgatatatatgaaacagggccatcatatattttaatggagtatattaaaggatatactttttatgagtgtttaaacaaaggcattcggatcgatgatgacatgatctgcgaggtcgaccgcgcattgaacgatgcgaggcggaaaggattgaatccatccgatatccacctccgaaacctgatactgacgccgtctggaacaatcaaagtcatcgatgtcgccagatttttgcagacgaaagaatgcaggcagtgggatgacttaaaaacagcctatcaaaccctttacaaaaaaagccgtttcccgcagaggcttcctaagatgtggatggaattgatcgcttatctttataaaaaaagctggcttcaaaaacaatgggcctccagaaaaaacaaatttcacccgtaa

SEQ ID NO: 3380 - DNA, 174 bp, Bacillus licheniformis
atgctcgtatatgaaataaccccattaccgtcaagaaaggagaaacattcgttgaagaaaaaaaataaacgtaatgatgacaaatgggattatctttatctcgtcgatttgcttgagccattgttttatgtgctgaggctggcagtaagaggacttgcgaaaattataaattaa

SEQ ID NO: 3381 - DNA, 180 bp, Bacillus licheniformis
gtgaatacgcagcgtgcccaggaaatcgtcgaatcacccgatatggttgatgttacttataacggcaggccgatttatattcagcgtgtcgacgaacaaaatgaaaccgcaagaatctttccgctcggccagccggagaacgagcaggaagtgccgctcgcaaatttgaaagaacattaa

SEQ ID NO: 3382 - DNA, 465 bp, Bacillus licheniformis
atggaacggaaagaccgcatcgttcaggaatttatgtcccaccgccttgtgacagaagaactcattcaaaaaattgatgaaaaacatctcgattacaaaccgactgaaacgtcgatgccagcaaaggaacttgtcacgcatatgctgcaatctttctatacctttgcttcggcggcaaaggaagggaacggagagccttttaaaaagaagcccgaagaaacagggacaagcttgagcgagcttgccaaaacgtatacagaaaaaacaaaaacgctgcttgaatcctttacggatgaagaattggatcgtgaagtcgatttgaccggcgtcttcggacgaaaagtagccggcgaacagctgctgcagctcgcgatcggacacgaaattcaccacaaaggcaatctgtttgtttatgtccgtgaaatgggacacacggatctgcctttgtatgtaaagattcattga

SEQ ID NO: 3383 - DNA, 711 bp, Bacillus licheniformis
atgaagaaaaaagtactcatctacttggtgatcgcagcagtgatgataaatggtgtatacaggtggtccgaaaaaacaacccgggaaagctatcagatccaggccggggacaaatacaagaacttcaaggaattgcaggaaaacgaaaaaagcggctatgacattgattatcacgaaaaagcgggaagcgactgtttaatcttttcgccccatggaggaagaatagaaggcggagtgagcgagcttgtccgagcttttaatgatgattattcaacttatttattcgaaggaaaaaaggatgagaacaactccgatcttcatattaccagcacaaactttgacgagcctctggcattgcagaaaataaaagaacaccgctataccatcgcattccacggctattcgggcgaccgtccgcacacgcttgtgggaggaacggacagaaagctggcaaaagccatcgtcaaatctctgaaaaagtctgacttttccgcagaattggtcaaagtggacgggaaatttgccggaactgctgaggaaaacatcaataatgaaagccagacaggaatgagcgtgcagcttgaaatcagcacggctcagaggaaagagtttttcgaagacttttcctataaagagagggaagagacaaaaacgagaacattccgaaaatatgtcaaggcggtccgcaaggtgctgcaggacagatgctga

SEQ ID NO: 3384 - DNA, 180 bp, Bacillus licheniformis
atggaaacagaatatgaaacaaaaggctacgacctgacaaaagtttatgattacaatcaatatccggatgtccgccacggacggtgcgacaattgcgattacaccctttttaaaagctctgtgaaaaacgggcagtttttgcgcgaatgccggcgctgcgggatgaaaaaaagcatttga

SEQ ID NO: 3385 - DNA, 327 bp, Bacillus licheniformis
atggctgaacagcaaggaaatgagaagcctttcacggctatgggcgccggtgcgcaagatcaggaaaccgctcaaatcatcgagagagtcggcagccttatcaccggatttggcgaatccatctatgagctggtacagaaaaacagcggcatcgatctgagagaggctgacttcacaaaaagcgagaatgcggaactgaatcaagcgatccaaaatattatcagcgaatacattcaaaatctcaacaatctgaatgccgatctcagcggaaagatcggtgaatcgatccaaggcatcgtcacaagcaaagatcaaaaagacgcttaa

SEQ ID NO: 3386 - DNA, 723 bp, Bacillus licheniformis
atggctggccattctaaatggaaaaatattcagagacgaaaaaatgcccaagatgctaaacgcggcaaaattttcatgaagcttgccaaagaaatatatgtagccgcgaaagaagggggaccagatcccgaatctaacgcaagtctgcgtctcgtcatcgataaagccaaaaatgcaaacatgccaaatgacaacatcgaccgcgccatcaaaaaagcttccggcagccaggatggaaaaagctatgaggaaattacgtatgagggctacggaccaagcggtgtggctgtcatggtcaaatgtttgacagataataaaaaccggacggcgacaagcgtcagaaccgctttcagcaaaaacggcggcagcttgggagaaacaggatgcgtttcttatatgttcgaccggaaaggatatattgcaatcgaacgtgaagatcttgagatagatgaagaagagtttatgcttgaggtcattgatgccggtgctgaggagcttgaaacgagcgaagagttgttcgagatttatacagagcccgaacagtttgaagaagtgaagaaaagcttggaggagcgcggctacaagctggcaacatccgaaattacaatggttccgcaaacctatgcagaagtcgatgaagcgcttcaggaaaaagtcgaaaagctcattgacgtgcttgaagatgatgacgatgtgcaggaagtgtatacgaacgttcattaa

SEQ ID NO: 3387 - DNA, 636 bp, Bacillus licheniformis
ttggacagcaagctgaaagtgttttcggggattttgcttttgacagcaggtctatctgcatgcggaacgaacgacgctatagataatggaaacaatacgcgcccgatcggatattattcaaatgatgcagatcgtaatgcaggtcttgataatgacggtcctgttacagaaatgcttgaaaacatgaacgggagaaacggtgcaacaaacgtaaacaatcgagcgggcaacggcaatcccgttccaacaggcgatggaacttacagccggggagacatgaattatcacaaccatttggtgaatacggcggatacaggctatgacagaccggaaaaccgtaaaatctcaaggaatatcactgggcgcgtcaacaaattgaattatgttgacgaaagccaggcagtcgtaacgaatgaaacggtcatcatcgccgtacggtctgataaaaggctgacaaataacgagagaactcaaattagaaaagcagccaaaacatttgccggagaccggaccgttcaagttgtcgaggacgacggcgcatttacaaggctgcgcgaaatgaacgatgatcctcagaacattagggatcgcggagacacgacgaataacaatttgaaccgcttgcggaaccaataa

SEQ ID NO: 3388 - DNA, 1053 bp, Bacillus licheniformis
ttgaaaattcatattgtccaaaagggcgattctctggaaaaaatcgcggaaagatatgaagtggactttgaagaactgaaaaagctgaattcgcagctgagcaatccagacttgatcatgccgggcatgaaaatcaaagtaccgtcagggggagtgccggtcaaaaaagaagaacagctcaatatgcgaaaggaattaccgaaaaaacagcaggaacatccatttgcaaaagaaaagccgaaaagcaagcttgatgttgaagatataaaaccgaaagaaaagccttcggttccttatgttccgcctgtcccgaacatcggacaatcaagtttgcctgaaggcgacatttcgaatttgtatcaaagcgtcaatcagcttcatcagccgtacgtacctccaaaaccttatgaacatcaagagaaaggccccaacatgtataatccatggacaaatgaggaggaaaaccatatggaaaatgtcaattatccgaatgttccgcagccgccaaatgtcggtgcagcaggtgatgaaaataagcagtttcacggcatgccgaatgtagctgcagcgggatatcatcaccatccatatccttatccgttctatcctggaggctgctggattcctgtttcaccggtgctgcctggatcgggattgtgccatccttggtatccatatcctgctcaaatgccttatatgcatcagcctagctatgtatctcctgctgaatatgacgatgatgacaacatggggcatgacaatgccggtcatcacggataccatcatcagccgatgactgccccggcatatgcgccttaccagccgttcccgggatttgcaccgccaaacgtcggtcacgccggggaccctaatatggcacacggcaaagaagatgactgcgggtgcgggccgggccaattcccgggaggttttccaggtgcggcgccatatggacagatgccgcaaatgggagctccgtacggtatggggggatacggacagcagcctgcagggggacagatgtttaacagaccggaagatgatgaagactga

SEQ ID NO: 3389 - DNA, 1110 bp, Bacillus licheniformis
atgtctattttaaaagtgattcatgacaggaacgccggcatgatgccggaggtgtataaagaattgactgaggaagaaatggccggaaggattttgaaaatcaaaaagaaattcggagcaaggctgtttatcccggggcatcactaccaaaaagacgaagtgattcaatttgcggacgcgacgggcgattcgctccagctggcacaggtcgcccaaaaaaataaaaaagcggaatatatcgtgttctgcggcgtacattttatggcggaaacagccgatatgctcacttcggacgaacagattgtcgttttgccggacatgcgcgcaggctgttcgatggccgatatggccaatatgcggcagacaaatcgcgcctgggaagagctgacgaagctgtttggcgatacggtcattccgctcacatatgtcaattcgacagctgaaattaaggcttttgtgggaagaaacggaggagcgtccgtgacatcctcaaatgcggcgcgcatgttgacatgggcgctatcgcaaaaggagaggattttatttcttccggatcagcacttgggacgcaacacggcatttgacctcggcattcctctaagcaggatggcggtatgggatccaattgcagaaaaacttgagtataacggcgatatgaaagacataataatcattttgtggaaggggcattgttcagttcacgaaaaatttaccgtggcgaatatcaaaagtgttaaagagcgggatccggacatcaatgttatcgttcatccggaatgcacccacgaagtcgttgcgctcagcgatttcagcggatctacaaaaaaaatcatcgactccattaatgaagcaaaaccggggagcaaatgggcgattggaacagagatgaaccttgtttcacgcatcattcaagaacatcctgataaacaaatcgaatcccttaaccctgatatgtgtccttgtttgacaatgaacagaatcgacatgccgcatttgctgtggtcgctggagcagatcgacaaaggtgaaccgacaggcgtgatcaaagtggatcaagatattgcaaaagatgccattcttgcgctgaatcggatgttaacgatccgttaa

SEQ ID NO: 3390 - DNA, 840 bp, Bacillus licheniformis
atgcagcggttcatacttaggaacatgcttaaggaatttttcaaggaagatatcggccggggggatctcacttcagaagccgtttttgatgacaatcatcaatgcgaagctgtcatcacagcgaaggatgacggcttgtttgcaggagaattagtgattctggaaggctttcggctgcttgatgaaacgatcgccgtccacatgctgaaaacagatggcgaagcggttcgtaaaggggaaacgatcgcgcgactcaaaggccgtgcagcttccctcatgaccggtgaacgggttgtgctgaatctcattcaaagaatgtccgggatcgccacattaacaaagcagtccattatcaggctgaatgatccgaatatcgcgatttgcgatacgagaaagacgaccccgggcctgcgcatccttgaaaaatacgcggtcaaaaccggcgggggcagcaatcaccgctttggattggacggcggcatcatgattaaagacaaccatattgccgcctgcggctcgatttcaaaagcggttgaaaaagcgcggtcagcgtgcggccatatggtcaagatcgaagtggagatcgaatctgaacaagagcttcatgaagcgattgaggccggcgccgatatcattatgttcgacaattgcccgcccgagacggtgaaagcatttgctgaaatgacacccgccggcattataacggaggcttcaggcggaatttcatttgaaaatctccccgcttacaggggaacaggggtgcactgtatttcattgggctacttgactcattcggcgaaaagccttgatatcagcatgaatgttgatctgaaaaaataa

SEQ ID NO: 3391 - DNA, 1575 bp, Bacillus licheniformis
atgtctcatcagacgattattgttgtcggagcaggtgccgcagcgttgtcttttgctgcatccattccgccgtcttatgaagtggttgtgatgacaaaagcatctgtaaaagacagcaattcaaccctcgctcagggaggaattgcatctgctgtattgcctcgcgattcctggtcgcttcatgcggacgacacgttgtatgccgggtgcggccacaatcaaatcgaagcggtccatgatgccattaaagacggacagcgccttgttgatgagctgatccttcagcatttcccttttgatactgacgaatcaggaaagctgagcctcggaaaagaaggcgcgcattcggtgaacagaattttgcatgccgggggagacgcaacaggacaggagttgatccggcacttaatcggacggctcggtccgcacgtcgtgctgaaagaatacgaaacggcggcggatttatggattgaagacggacgctgctgtggcgtctggacgaaagacagccgtgggaagacgtttctcagaaaagccgattttgtcgtgctggcggcaggaggctgcggaaatctatttcaaatcaacacgaataaccgttctgtgacaagcgatgcgatttctttggcgtatcgggcaggagcagagctcgcagacttggaattcgttcaatttcatcctacattgcttgtcaaagacgggcgcgcgcacggacttgtttcagaagctgtgcgcggagaaggtgctgtgttgattgatgaaaacggacagcgggtgatggaaggcatacattctttgctggatttagcgccgcgggacgttgtatctcgggcgatacaccaaaagcttgcctgcggaagcagcgtatttttagatatttcccgcatatcagactttaaaagccgcttccctacgatttcttctctttgcgaaaaagccggtatttccattgaagagggccggattccggtttcaccgggcatgcattttttaatggggggcgtttctgtgaataaatggggagaaacggctgttccaaacctttttgtgatcggggaagccgcttgcaccggctttcacggtgccaaccgtctggcaagcaattctctcttggaatgcatcgtcttcggaaggagagcggcggagcggattcaagcctgccaaaaaccggagcctgtcagaggccaatctcctcagcctgagaatgtgacgtattctgttcctttgacagatgtgaaggatattcagaaacaaatgacagattatgcggcgatcgtgcgtacggaggatgaattgacgaaggtgaaagaatggcttgagcgaatgccggttcaaatcgtaaatgtgaaagaaatcacaatagaacagctcgagctagctcatttatggcagactgccaaacagatgacggcctcggcactgcttcgtacagaaagcaggggcggccattaccgttcggattgtccggcgcctgatgataaaaactggcacggcaagcaaatcgttcacacaaaaggcgggatcaagatcagacaaaacgaagggattgtgaaatatgcagcggttcatacttag

SEQ ID NO: 3392 - DNA, 1179 bp, Bacillus licheniformis
gtgatttatcttgattatgcagcgacgacaccggcatcaaaagaagccttggacgcgtttcaaaaacttagcacagacgtatacggaaattcgagcagtctgcacgatgcaggagggaaagccgaaaacattttgcgctgctgccgccaaaggatggcagaacttttatccggagaagaagaaggcgtttattttacgagcggaggcaccgaagccaactttttagcgattcactccatcttaaatggacttcccgccgggaaaaagcgctttttaatgacagaaatggagcatcagtcgatccatattttgaaacggcatctcgagatgctgggatttgatgtcgacttgatgaagccgaatgcttcaggcatcattacaacggatatacttgaacggcacctccgcccggatacgggtctggtttcgattcagcatgccaattcagaaacaggcgtcatccagcctctggcaaagctctcggcttacctgcataagcgggacgtgctcttgcacagcgactgcgtacagacatttgccaagattccggtccgcattgatgagctcggcgctgatgccttatcggtctcaagccacaaagtatacggcccaaaaggagttggggctgtctatattcggccgggtgtaaactggaaacccgtctacccgggcactttgcatgaaaacggctttaaaagcggcaccgtcaatgtccctggaatcggcgctttcattaccgctgcagattcgacaataaaccgcatggatgccgcgcatctcaaattccaggagctgcgcgcaggttttctggaaggagtaaaagaccggaagcttcccgtctcccttgctgtgcccgattcggcaaattcgcatgttctgccgcatattataggttgtttttttcattcctttgaaggacaatatactatgctggaatgtaatcggagaggaatttgcatttctaccggaagcgcgtgttcagcgggctatcatgagccttcgaatacgatgaaagcccttttgatccctagggagctcgcgcttcaattcgtccggatttcattcggatgcgatacgacaagcgaacatgttgataggctgttggacgttcttgaagatatgatgaatgagaaaggagaccatcggattgacagacggattaaaacttacgggagctga

SEQ ID NO: 3393 - DNA, 543 bp, Bacillus licheniformis
ttgacagacggattaaaacttacgggagctgagcggcgccagcagctgctggcttggctgaaggagtcagaggctccgcttacaggaagcgagctggccaaaagagcatctgtttcacggcaggtcatagtacaggatatttctttattaaaagcaaaaaacgaaccgatcatcgcaacaagccaagggtacatgtatttgcggtcagccctcggcaaaaaacagccggttcagcggatcatcgcctgtgaccacgaacccgaaaaaacggaagaagagctgaatctgatcgtcgactttggcgtaacggtgaaagatgtaacgattgaacatccggtctacggagacttaacagcttcgatcagggtcagcacaagaaaagaagtcgcggatttcgtcaaaaaaatctcttcgacaaacgccgcttatctgtctcagctgacaaacggcatccatctccacacattggaggcagatgatgaagagaagatcgaacaagcttgcggcgccctgcaaaaagcgggcatcctcattcccgaataa

SEQ ID NO: 3394 - DNA, 858 bp, Bacillus licheniformis
atgagtatgagagtaggttatttaggtccagaagcaacttttacgcaccttgccgtctgctcctgcttttcagatgcagaccagcaagcatttaacacgataccggcctgcatggatgcggcgatgaacggggagatcgatctggctgtcgtcccgcttgaaaatgcgattgaaggatcggtgaatctgacaatagactacttaattcacgaacagcctctttatattgtcggagaaatcaccgctcccatccgtcagcatttgcttgtgcatcctaccagaaaagaggcttgggaagacattcagaaggtttattcccattcccatgccatcgcgcaatgccataaatttttgcacagccggttccgctccattccgtttgaatatgcgacatccaccggagcagctgcaaaatacgtgagcgaaaatccggaagagaacatcggcgtgatcgccaatgaaatggcagcagatacttacggattagacatcgtcaaaagagatgtgcatgactatgaatacaatcacacgagatttgtgatgcttcatccggatcgcgaggcatcccctccggtcaaccctcaactcaagggaagaccgaaaacgactttgctggtgacccttccttcggacagatcgggagctctccaccaagtgctgtcggctttcgcctggagaaatttgaatctttctaaaattgaatcgcggccgacaaaaaccggtctcggcaattatttcttcattattgatattgaaatggccctggatgacgtgctgattccaggtgcaatagctgagcttgaagctttgggctgcaaggtgaaaatgctcggtgcctacaacgcatatacactataa

SEQ ID NO: 3395 - DNA, 444 bp, Bacillus licheniformis
gtgaaagaggagaccttttatcttgtcagggaagacgtgctgccggaggcaatgcggaaaacacttgaggtcaaaaagctgattgagcggaaaaaagcggaatctgtagctgaagccgtacaaaaggtagatttgagccgaagcgctttttataagtacagagatgcggtttttcctttttatacgatggtcaaggaacagattatcacgcttttttttcatttggaggaccgctcaggaacgctgtcccatctgctgcaagtggtagctgaatcgggctgcaatgtgctgtcgatccaccagaccatccctcttcaaggaagagcgaatgtcacgctctctgtcagtacgagaggcatggatgaaaatatcgatttgctgatgaacaaattaagaaagctggaattcgtagaaaaggtcgaaatactaggttcgggcgcttaa

SEQ ID NO: 3396 - DNA, 1287 bp, Bacillus licheniformis
atgtttgttgatcaggtgaaaatatacgtaaaaggcggagacggaggcaacggtatggttgctttccgccgcgaaaaatatgtgccaaaaggaggccctgccggaggtgacggcggaaaaggcggagacgtcgttttcaaagttgacgaaggtctcagcacgctgatggattttagatatcaaagacattttaaggcagcgcgcggagaacacggcatgtctaaaaaccagcacggccgaaatgccgaagacatggttgtgaaagtcccgcccggcacggttgtcattgacgatgatacaaaacaggtcatcgctgatttaacggagcacggacaggaagccgtcatcgcaaaagggggacgcggcggacggggcaatacacgttttgcgacgcctgccaacccggcgccgcagctttctgaaaacggcgaacccggcaaggagcgctatattgttctcgagctgaaagttttggcagatgtcggtcttgtcggcttcccaagcgtcggaaaatcaacgctcctgtctgtcgtgtcttcggccaagccgaaaattgccgattaccactttacaacgctgaacccgaatctcggaatggtcgaaacggaagacggccgcagctttgtaatggcggatcttccgggactgattgagggggcgcacgaaggagttggcctcggacaccaattcctcaggcatatcgaaagaacgcgcgtcatcgtgcacgttattgacatgtcgggtcttgaagggcgcgacccgtatgaagattatgtgaccattaataaagagcttgaacagtataatctcaggctgacagaacgtcctcaaattattgtcgccaataaaatggatatgccggatgcggaagaaaatctgaaggctttcaaagaaaagctcacagatgattatcctgtttttccaatcagcgcggtgaccagacaaggcttgagggatctgctgtttgaaattgccgaccgtttggaaacgacgccggaattcccgctctacgacgaagaagacatggctgaaaacagagtcatgtataagcttgaggatgaggaagcgccgtttgagatcagccgtgatcctgacggcaccttcgtgctcagcggagccaagcttgaacgcttatttaaaatgacggacttttcaagagatgagtctgttaagcgttttgccagacagcttcgcggaatgggcgtcgatgatgcgcttcgggcccgcggtgcaaaagacggggatacgatccgtcttctcgaatttgaatttgaatttatcgactga

SEQ ID NO: 3397 - DNA, 579 bp, Bacillus licheniformis
atggaagaaacttcgaaaaaacgagaaaagaatatggacgataaggctttgacccatgagcttatccatctgctcagccactcaaggcacgactggatgaataaactgcaattgattaaaggaaacttaacattaaaaaagtatgaccgcgtatttgaaattatcgatgaagtggtcatcgaagctcagcatgaatcaaagctttcaaaccttagaatcccgcgcgcggcgtatgagctgcttacatttaactggatggcccattcgctgacgcttgaatatgaggtgatcggtcaagtcaaggatttgtcagcttatgaagaaaggctcgtcgttctcatcagaaagctgtttgggatttttgacgatgccgttttgaaaggcagcgacaatcatctgacgatcacgctgcagacggacggtccggacgaccgcctcgtcatctttctcgatttccacggcgtattcacaaagctgaccggtatcaaagactttcatcattcactggccgacttttatgaaatcaagcggtttgatgtaacagaccgtgagtgcatcgccgaaattcatatcaagtaa

SEQ ID NO: 3398 - DNA, 282 bp, Bacillus licheniformis
atgctaagattagatcttcagttttttgcatctaaaaaaggagtaggttcaacgaaaaacggacgtgactctgaggcgaagcgcctaggtgctaaacgtgcagacggtcaattcgtatctggcggttcaatcctttatcgtcagcgcggaacaaaaatctatccaggtgaaaacgttgggcgcggcggagatgacactctatatgcaaaagtcgacggaactgttaaattcgaacgtttcggccgtaaccgcaaaaaagtgagcgtatatcctgtagcctaa

SEQ ID NO: 3399 - DNA, 342 bp, Bacillus licheniformis
atgattcatgcaaagattacaagatcccgatcgaacaaagacatcttgggctttgaaatgtcgggacatgcgaattttgctgaacatggtcaggatctcgtttgcgcaggggcgtcggcggtcgcctttggagccgtcaatgccgtaatgaagctgacgggcattgagccggtcattgacctcggggaagacggggggtttttatctttccgcttcccggacggtacggatcgtgaggcttttgaaaaggcgcagctccttctcgaaggcatgatcgtctcccttgacacgatcgaacgagactacaaaggttacttaaaagtaacgacgaacaaaatatag

SEQ ID NO: 3400 - DNA, 309 bp, Bacillus licheniformis
atgtacgcaattattcaaacaggcggaaaacaaatcaaagttgaagaaggccaaactgtatacgtcgaaaagcttgctgctgaagccggcgaaacagttacttttgacaacgtattgtttgtcggcggtgaaaatgttaaagttggcagccctacggttgaaggtgctacggtaacaggcaaagttgaaaaacaaggccgcgctaaaaaaattaccgtatttaagtacaagccgaagaaaaaccaacacaaaaaacaaggtcatcgtcaaccttacactaaagttgttatcgaaaaaatcaacgcttaa

SEQ ID NO: 3401 - DNA, 867 bp, Bacillus licheniformis
ttgagtaaatggacggagctcttcaccaagcttcacattcatccgctgctgtggcttgtcatggcgatcggtatcatgacaggacatattaaagcgctgttttgtttaatgatcattattttgatccacgagcttggccacgctgctgctgccgtttatttttcatggagaattaaaggcattttcctgctgccttttggaggaacgctggaagtcgatgaacacggcaacagaccgttaaaggaagagcttgccgtcatcgccgcggggcctgttcagcacatttggcttcaatttgcagcctggcttttggcggtcaattcgctcatcagccctcatatatttgaaacgtttactttttacaatctgaccatcctcttgataaatctgtttcctatttggccgcttgacggcgggaagctgctgtttctgctgttttcaaaacaccttccgtatcagaaagcgcagcggatgatgctggctgtatcgtgcttttgctgcgctgttctaatcgcggcgactctgctggtctccccgtcgcagctgagcgcttgggtgcttctcgtatttttggctgcatccctttaccaggaatatcgcaatcggcattacgcccatatccgttttttgcttgagcgctactatggaaatgagagggaagtgcggcgactcgcaccgatcacggtgtgcgccgaacagcagatttatgaggtcatgctcatgtttaaaaggggctgcaaacacccgatcattattgagaaggacggacaaaaactgagccagctggatgaaaatgaagttctccacgcttattttacagacaagcgcacgacttcctcaatggaagatctgcttctggtttattga

SEQ ID NO: 3402 - DNA, 792 bp, Bacillus licheniformis
atgagtcatagagcagatgagattcgaaaaagaatggccaggaaaagaaagcggaaaacaccggacaaacagcccttttcatcagacggcaaaaagcggccgctcaagccgcctgcatggacagccttttcggaagatgaaaaaggaggagacttccctccgcctgaaggaagttccctgctgataaacgggaagcacccgcttgtcaaggcggatgcgctcatcttgaaatgtcttctgtcggcatgccttgttcttgtgtccgccattgcctacaaaggccagtttgaacccgcaaaccaaatcaaaccggttatcagccaggtgtttactgaagagttccaatttgcggccctccagaattggtatgaatccaagttcggcgatcccctcgcattctttcagccgaaaggcgccaaaccgtccggccaggtcgaggtgaatcaggatctcgctgtacctgccgtaggaaaggttcaggagaaattctcagggcagggcattaaggtagaaacagaagacgaaacgatccgcagcatgaaggaaggctatgtcattgaagtggacaaaaatccggaaacaggcctgacggtggtcttgcagcatgcggacaacagctatacctactacggccagctgaaaaaagcggatgtcgctttatacgattatatagataaaggaacgaagctcggaacgattgagcaggataaaaatcaaaaaggcatctattactttgcgatcaaacaaggagaggaatttgttgatccgatacaggtgatcacatttgagtaa

SEQ ID NO: 3403 - DNA, 429 bp, Bacillus licheniformis
atgagcaatcaactagtgcctgatatacataaacaggctgtttttcacgcatcgatagaaaaagtgtgggaggccgtcgccaccagtgaaggcatcgccgcctggtttatgcctaatgatttccgcccggagatcggctgcgaattcaccctgcagtctcctttcggcccctccccgtgcaaagtgatcgagcttgatgcgccgcatcgactcgctttcagctgggatacgtcgggatggatcgtcacatttgaattgaaagagctttctgcagaaaaaaccgaatttaccctgattcattcaggatggggtgcgccggaagaaacggtttcaaaagcgggagaaaagcaagcggatgtccgcaatcggatgaatggcggctgggaaacaatcgtcaatcaaaagctgcgtcaggcagttgagggctag

SEQ ID NO: 3404 - DNA, 321 bp, Bacillus licheniformis
gtgacatccgccgcaaaacatgatgtgttccaagccgtttccgatccctcccggcgaaaaatgctggagctcctcgccggcaaagaattgcctgtcacagatatcagcagccatttcccgatgagccggacggctgtttcaaagcatctcagagttttgtccgaagcaggcctagtcagcgggagaaaagcgggcagagaaaaactgtacaggcttcatcccgaacctctcgccgagctgcagcagtggctcgcctacttcgacatgtattgggacaataagctttccttgctaaagcataaagtagaaaacgatcaataa

SEQ ID NO: 3405 - DNA, 807 bp, Bacillus licheniformis
ttgggtgaagctatcgtaataacctcggggaaaggcggagtaggcaaaacgacgacgtctgcaaatcttggcaccgccttggccattttggggaaacgggtatgtctcgttgacacggatatcggcctgcgcaatcttgatgttgtcatgggccttgaaaatagaatcatatatgatttggtggatgtcgttgaggaacgatgcaaaatccatcaggcgcttgtgaaagataagcgctttgatgatttgctttatttgctgccggccgctcagacaagcgataagtcggctgttttgcccgagcagatggtcaagctgatccagcagctcaaacaagacttcgactacattgtcattgactgccctgcagggattgagcaaggttataaaaatgcggtctcgggcgcagacaaggcgattgtcgtgacaacaccggaaatctccgctgttcgtgacgctgaccggatcatcggcctgcttgaaaaggaagaaaatattgagccgccgagacttgtcgtcaaccggatccgcaaccacttaatgaaaaacggcgatacgctggatgttgatgaagtcattcagcacttgtcgatcgaactgatcggtattgttgcggatgatgatgaagtgattaaagcttccaataacggggagcctgtcgtcatggacccgaataataaagcttcaatcgcataccggaacatcgcccgccgcgtgctgggcgaatctgtgcctttacagtcgtttgaagaagaaaataaaggcgttttcgcaaagattaaatcatttttcggcgtacgcgcttaa

SEQ ID NO: 3406 - DNA, 681 bp, Bacillus licheniformis
gtgaagacccaaaagcagcaatacgtaacaattaaaggaacgaaaaatggattgacgcttcatcttgatgacacatgctcttttgaagaattattgtacggtcttcaggatatgctgtcactcgaacattatatggatggaaaaggccagaaaatcaatgttctcgttaagctcggccaccgctatgtgaccgaggagcaagaacagatcctgaccgatgtgatcactgagaaacaaaatctgttcatccactccattgaaagtgaagtcatgaccaaagatgaagcaaaccgcttaaaagcggaaagcgaaattatttctgtcgctaagattgtccgttccgggcaagtccttgaaacggagggtgatttgcttctcattggggatgtgaatccgggaggaatggtgaaagccggagggaatattttcatcctcggctcattaagagggattgcccacgccggttttaatggaaataaacgagctgttattgcggcttcggatatgagaccgactcaattgcgtatcaatcatgtgctcaatcgctccccagacaacatccaagaagggaacgacatggaatgtgcttatttagatgaaaatgagaatatggtcattgaccgccttcagcaattagctcatttaagacctagtttaacaaggcttgagggaggaatgtaa

SEQ ID NO: 3407 - DNA, 519 bp, Bacillus licheniformis
gtgaaacgcttccttcttcccgtcgtcatgatgtttgttttagtatctgacagcgtctatgcggattttgtcaacttgccttttgtgacggaagaacagcagctcatcccgcgttttctgctgcttgtcttagtttttatgacggcttatgtcaatcagccttttgccattacatatggatttattttcggactgttatatgatattaattacaccgaccttttaggtgtatatatgtttggttttgccggtatttgctatttatcgtcaaaagcgttcaaagtattgcagacaaacgcgctggtcgtcatttttatttcgctgctcgccgtctgtgttcttgaattttaccaatatggcgtgcagatgctgatacgtccggaaattatgccgttccatcaatttgtgctcggcaggctcctgcccacgcttgcgctgaacgccgttggcggccttctgctcatttacccgttcaaatggttttttaccagtcttaagaaagagctgaggaatgagtaa

SEQ ID NO: 3408 - DNA, 909 bp, Bacillus licheniformis
atgccgcagttttttacaaataaacggttgatgcttttactcctttgtatcatcattttagtggcaatgattggattttcgttaaagaatgaccggaatgcaacttggcccgaaaaatttattggcgatacaactggtgtattccagacgatttttcatacgcccgctcaattttttgcgggcttctttgaaaatatcgaagacttaaaaaatacgtacagcgaaaatgagcgcctgcggaaaaagctcgacggccagacacaatacgaggcaaagctgcaggagcttgaaaatgaaaataagtctttaagaaaagagctcggccatctgaaatcaattaaagactacacgccgattctggcgaccgttatcgccagaaatcccgataagtatgagtggtggaacctgattacgatcaacaaaggttcaaagcacggcgttgagaaggatatggcggtaacagatgaaaacggcaacttgatcggaaaaatcaaaagcacaaaagtgaacaatttcacttccaccgtccagcttttaagcgcaacagacagaaacaacagaatctccacagttatcgctgcagataaaggcaagaaaacggtgaacggaatcatcaacggctacgactcagataaaaaggcgctttccatggaaatcatcgagcctgatgaagacagggaagtgaaaaaaggtgacctcgtcgaaacttccggtgcgggcggcgtttttcctaaaggcctgacaatcggaaaagtgacagaggttgaaccagattcctacggtttgacgaaaatcgcttatgtagagccggcagccgatatgtataaccttgataacgtcatcgtcgtcgacagaacgcttgatacggtggatgtcgacaagatggacgatgaggaggaagggtcgtga

SEQ ID NO: 3409 - DNA, 1010 bp, Bacillus licheniformis
atgtttggaattggtgcgagagaccttggaatagatttaggaacggcgaatacgcttgtttttgtgaaaggtaaaggaattgtcgtcagggagccttctgtcgttgcactgcaaacagacacaaagcagattgtcgcagtcggaaatgatgcgaaaaacatgatcggacgtacgcccggcaatgtcgttgccctccgcccgatgaaggatggcgtaatcgctgattatgaaacaacagcgacaatgatgaagcattatattagcaaagcagttaaaaacaaaggcttatttgcgagaaagccgtatgtcatggtctgtgtcccgtcgggaattacggctgtcgagcagcgtgcggttatcgacgccacgcgccaggccggagcgagagatgcatatccgattgaagaaccgtttgcagcggcgatcggtgcaaaccttcctgtttgggagccgactggaagcatggtggtcgacatcggaggcggaacgaccgaagtcgcgattatttccctcggcggcatcgtcacatcccagtctatccgcgttgccggagatgaaatggatgaagcaatcattacttatattagaaaaacatataacttgatgatcggtgaccggactgcagaagcgatcaaacttgaaatcggttctgccgaagcttctgaaaacggagaaagcatggagatccgcggccgcgatcttttaacaggcctgccgaaaacgattgaaatcactgaaaaagaaattacagcggctcttcgcgacactgtgaccgccattgtcgatgccgtaaaaaatacgcttgaaaaaactccgcctgaactcgcggctgatattatggaccgcggaatcgtccttacgggaggcggcgcactgctgcgccacctggacaaagtcatcagcgaagaaacgaaaatgccggttttaattgcggaagaccctcttgactgtgtagcgatcggaacaggcaaagctctcgagcaaattcatctatttaaaggcaaaaatta

SEQ ID NO: 3410 - DNA, 675 bp, Bacillus licheniformis
ttgaaattaaaagattttcctgatgaagaaaggccaagggagcgccttctcaacacaggcgccgaaagtttgtcaaaccatgaactgcttgcgatactgctcagaaccggtacgaaaaaagaatcggttcttcagctttcaagccggctgcttcaaacgtttgacggcctccgtttgttaaaagaagcatccgccgaggagctttcaagcatttccgggatcggccgcgcaaaagccgtgcagattttggcggcccttgagcttggccggcgcattcacagtctggcttgcaaagaccgttatgtgattcgttttcccgaagatgcggccaattttttaatgggggatatgcgctttctctctcaggagcacttcgtatgtgtgtatctgaacacgaaaaaccaggtgatccacaagcgcacggtttttatagggagcctgaactcttcaatcgtccatccgagggaagtgtttaaagaagctttaaagcgctccgcagcttcattcatctgcgtccacaatcatccgtccggagatccggctccaagccgcgaagacatagaagttacacagcgccttcacgagtccggacagctgctcggaatcgaattgctcgatcatatcatcatcggtgatcaaaaatttgtgagcttaaaagaaaaaggatatttgtaa

SEQ ID NO: 3411 - DNA, 573 bp, Bacillus licheniformis
atgacccgacagctcatattggcttcacaatcaccccgcagaaaggaactcctcgatctcctgcagattccgtacagcatcgttacgagcaatgcggaagaaaaattaattcgaaacttttcaccagcagaaaacgtcaaatggttggcggaacaaaaagtgcgtgcagtagccgaacaatatcctgatgccgtcgtgcttggcgccgacaccattgtttattatgacggagcttatttgggcaagcccaaagatgccgaagatgcagaacggatgctgagcatgctttcgggacagacccattcagtgctcaccggcgtctgcattaaggacggcgaaagatgcgaaacattttttgaggaaaccgaagtctctttttggcctcttgaagaaaaggaaatcagcgcttacatcgctacgggagaaccgtttgataaagccggttcatacggaatacaaggaaaaggcgcgctttttgtcaaacagataaaaggagactattatacagttgtgggccttccgatttccaaaacgatgagaatgctgaaaacgtttgatctccactccttttga

SEQ ID NO: 3412 - DNA, 1032 bp, Bacillus licheniformis
atgaaaaaacggaaaagcaagaaaaactcagctaaaaaagcgcccgaacaagacccgcttaaagtgatgatcaacggcagagaagagactatctacggaaatgaaaaagagttttccaacagaaatgaagaaaagaagtttaccttttcgaactgggaagaaaagagaaaggcagaacgggaaatatcggcttcaaaagaggacggcacacatgaaacaggtgaatttacatggacgccaccggacgaagaagaaaccgtctacaaagacgatcctaaagtggtggcgccttatcaaaagaaaaacgagcccaaaaacaaccgcaaaacgaaaacgtctcttacgtatcctgtgaagcgatttgccgcgaccatcgtctttgctgttttgctcgggacgggactcggtcagtttgcgctgaatctcgcaacgcataaagaaggagtgccggcttccggcagtcttggggcggatgctgaaaacggccagaccgttaaagccggtgactccggtgccgaggagaaaaagagcggagaaaaaaatagcggacaagcgggagaatcttttaacagcttcgccgttcaggccggaaagttttcgtctaaagaaggagcggatacgctggcctctcaaatcgcagacaaggggtatgccgccgtgtcgattgccaaggacgacgggttttatgtaatcgccggaataacgggagaaaagcagatgacatctgaacttggcaaaatattaatcgaaaacgattttgaagcgtggggcggaaaagagcttccggttgcaatcgagtccggtttgctggagccttttaaagaagcggctgagctgtcggcaaaagcgattctcggcgcggaggttacatctcaaaacatagccgatgtcaaagctcaacttgacggggcccaatcaaaaggctctgaagaggtaaagaagagcatactggaagccgtcaaccttctggagaaaccgaccgcagccaacggctggaagagccagcagctattgctgggccaaattaaataa

SEQ ID NO: 3413 - DNA, 750 bp, Bacillus licheniformis
atgttcatcttttacctttttacggcaggtttagtgctcggctctttttttaattcggccgggcgccgcattcctgaaaagatatcattgattgctccgcgttccctctgccgcgtctgcaaaaggcagctgggcttctcggagctgataccggttttgtcctatttgatgcagcgggggaggtgcaaaggatgtcaaaccccgctctcgatcgtgtatccggcagttgagctctccgccgccatcctgtttgcgtttgccggcatgcacgttgggcatgagggggagctggtgattgtgcttgctcttatatctctgcttttgatcgtctttgtatctgatgtgacacacatgatcattccggatgctgttctttgttttttcctgcctgtctttgccgtcggacgattccttgttcctctggaacagtggcactcaagtttgagcggtgcgatggccggcggtatgctgcccctcttgacgctgcttttgacgaaaggggggatcggctggggagacgtaaagctgtttgcggtaatcggcatggcgctcggcagccgcctcctcgttctcgcttttttcatctcggcagccgcaggaacggtgcttggtcttattgcactcctggcaggcaaactgaagaaaaatgaaccaatgccgtttgctcccgcgattctggccgggacgctgacgagctgcttctatggcgaaccaatgatcgagtggtaccttcaaacggcatggtggtga

SEQ ID NO: 3414 - DNA, 1299 bp, Bacillus licheniformis
ttgttcaaaacgtttgatgaagcactcagctggattaacggaaggcttaaattcggcgtgaagccgggtttggaacgaatggaatggctgctgagaaagctcgggcaccccgagaaaaagctcaatgcggttcatgtcgccggaacaaacggaaaaggttcaacgatcgcttttctccgttcggtattaaatgaagccggttatacagcaggcaccttcacatcaccgtatatcatcacctttaacgaacggatcagcgttgacggcgccccgatctcagatgaagaatggacggcgctctttaatgaggtcgggcctcttgtccttgagcttgaaaaaaccgaattcggagccgccacagaatttgaaattattacggcatgcgcatttttatattttgctaaatacaggcggacagattttgttatttttgaaacgggcttaggcggccgtttggattcgacaaacgtcgtgaagccgatgttaacggtcatcacttcgatcggccatgaccatacggcgatattaggcggtacattgaaagagattgccgcggaaaaggcagggatcatcaaacgcggcgttcctgttatcacagccgttcatcagcatgaagcggctgaggtgataaagcgaaaggcgatggagacagaatctgcttttatatcccttcacgaggattgccagctgtacggggagctttcattgcctgagggagagcagttttcgttgaaaacaccgttacatcattatgaaggaattgaaacaagcctgatcggcacccatcagcggcaaaacgcgtctttggccatacttgcggccgaatggctgacagccgaaaaacatgcggcgatcggcgaaaaagagctgaaacgcggcattcgtaacgcgggatggcccggccggtttgagaaggtattgaacaagcctcttgtttatatcgacggcgctcataacaaagaagggatggagcggctggccgagacgatctcctcccacttcgccgggcggaatattcacgtatgcttcagcgctcttaaagataagccgtacagagacatgatccgcaaaatcgagtcgtttgcgtcatcgattcacttcacatcctttgatttcccgagggcggaatccgctcaaaagctgtttgagcaaagtaccgctgattataaaacatttgatgaagacatcgcctctgttttccggtatatcgaagaaaaagctgaagaggaaaaagcggtggtcgttatcaccgggtcgctttattttatttccgccgtcagggcagctttaactgaataa

SEQ ID NO: 3415 - DNA, 192 bp, Bacillus licheniformis
atgcgaaaaaaattcaacacatattcattccagccgtggctgaagcaagtcaggcttgttgctgttcaagtcgtcctcccgattacgatattccagggcatccgcacgatcatctttcctaccacatttgatgtcctccttttgggcattctcatattccttgcgtgcgcctttcaccttgactggatttaa

SEQ ID NO: 3416 - DNA, 1023 bp, Bacillus licheniformis
atggaaggcatccagtctgttttaaatgagtacggtcttacgcctgaatatatggagtccgtcagttcaaaggtgtggaaagtgtatacggatcacggtgtatttgctctgaaaaaattggcggcttcaagaaacacccgcttcacggaacagatgatcatgctggaggaaaaaggctacaggcagttcgttcctgtctatcgaaaccgcacaggcgaatttttaacgcaagccggagaagatgtctgctatctcatgccctggcttactcttgaaagggaggaagagcgggatcaaaaacacgaatatatgtttaaagaaatcgctcttcttcaccagcggacggaaaaagagctcggcgtgaggcgggaagaaatactcggacactatgaacggacaaaacggaaatgggaacagcaaaaacagaaatatgaagcattcatcatgaaagcggaaaacgaatggtatatgtccccgttccagcttcaggcggccatgtatttcaaagagacgatatcagctgccgactttgcgctcgcccgccttgaagattggcatgaagccatgagagaaaaagagtctgccagaatggtcttaaaccacgggcacctgtccgttcggcattttctctataacgataccggaacgggttactttacgaactttgagaaagcgggacatgcgccgcctgcaaatgatctcatcgtattttttactagaatgtttaagacgaaccccgttatgtgcacggaatgtgtaaactggttttatacgtatcacaatgtctatcctttgcgggaggaagaaatcggcttattcctcagctatatggcttacccggggcctgtattcggcgtactgaaccgctacgaacatgagaaggggctcggggaaaaagaagcctgcacaaggcttttaaaggcgtactggcaaatgaaaaacgctgagccgcttgtgatgagcattcacgagacggaagaaaacagaaaactgcaggaagaaacagagtccccatcatcatga

SEQ ID NO: 3417 - DNA, 1458 bp, Bacillus licheniformis
ttgccgcaaaacaatcgtttgcaattttctgtagaagagtcaatctgttttcaaaaaggacaggaagtatccgaattattatcgatttcattggatcctgacattactgttcaggaagtaaatgattatgtatccatacgagggtcattagagctgacaggcgaatacaacatagatcaaacccgggagtatgcagagctgcctgcgacaagccgatttgtagaagatgtaaagctgaaaggggacggcagcgcagagctgacgcattgtttcccagtggatatcaccatcccgaaagacaaagtcaatcatttaaacgacgtatttgtttttattgacgctttcgattatcagctgacagatgcgaggatgctgacgattcaggctgatttggcgattgaaggcctcttgaatgtgagcggtgaagcgggtgaagaagaaccgcgcactatgcctgcggccgtccatccggaagaggagctcgaacctgcctacagatcaccttcaaacgacgaagatcagggtgaagagaaagaatatttgatccagcttgacagaccttacgaagagcaggacgaagaacaggcggaagaacatgataccggtgaggaaacggttccgatttaccagtcgtttctcggaaacgacacagaggaagctaaaccgttttttacagcgtctttgtcggcggcagagcgtacgaagcgcgaaatagaaaatcaaaaagaagcctctcttgaacagccggaagaagaatataagctgaaaagagagaaagtggaagaggaaccggaagaatatgagctgaaaagagagaaagtggaagaggaaccggaagaatatgagctgaaaagagagaaagtggaagaggaaccggaagaatataagctgaaaagagagaaagtggaagaggaaccggaagaatatgagctgaaaagagaagaagcggaagaagagccggagctgtcgcacagctcttatcaacctcacgaggaactgaaagagaacccgttctacagtgttcctcctcttctgaaggaagaccagaatgacagggagcctgaggcttttgaggttgaggtgacacaggaagcagaagcgattgatgaagaagaggaagccgggcatacgattgaaatcccggaatattcgtttcatgagcagacggagcccgaagaagaaagagatgaaatgcaggcagcggatgaacaggaagtgtcagcaaaggaaaacgacaacgcactctatttgacaaagctgtttacaaagcagggagaggaggagtttactcgaatgaggatgtgcatcgttcagcaaaatgatacgattgatcttctgtgcgagcgctatgatattaacgtccagcagctcatccggatgaattccctttcccttgacgaggaattaaaagagggacagatcctttatataccggattatcaaaacagccatgcctaa

SEQ ID NO: 3418 - DNA, 1296 bp, Bacillus licheniformis
atgcggagctatgagaagtctaaagcggcattcgaagaggcgcaacgagtcatgccgggcggggtgaacagcccggtcagagcctttaaatcagtcaacatggacccgatttttatggagcggggaaaaggatcaaaaatctatgatattgacggaaacgaatacatcgattatgtcctgtcatggggaccgcttattttgggccacagcaatgaaaaagtggtgaaagagattcaaaaggcggcagaacacgggacaagcttcggtgcgccgacagaactggaaaccgagcttgccgagcttgtcatcgaccgcgttccttccatagaaatcgtccggatggtgagctccggtacggaggcgacgatgagcgccttgcggctggcgcgcggatacacaggccgtaacaaaatcgtaaaatttgaaggctgctaccatggacacggtgattccctgctgattaaagcgggctcgggagtagcgacactcggcctccctgacagccccggagttccggaaagcattgcaaaaaacacgattaccgttccttacaatgatctggaaagcatgaaacttgtctttcaagaattcggagatgacattgcaggcgtcatcgttgaacctgtcgctggcaatatgggcgtcgtaccgccggttaaagggttcctcgaagggcttcgcgagctgactgagacgcatggcgccctgctgatatttgatgaagtgatgacaggattcagggtggattacaactgtgcccaaggctatttcggggtgacgcctgatttgacatgcctcggaaaagtgatcggcggcggtcttcctgtcggcgcttatggaggaaaggcggaaatcatggagaagatcgcgccgagcggtccgatctatcaggccgggacgctgtccggcaacccgcttgccatgacagccggacttgaaacgttgaaacagctgacccctgaatcctaccgggaattctcccgcaaagctgaccgcttggaaaaaggaatttctgaagctgcagagaaaaatggcattccgtgtacattcaacagggcggggtctatgatcggctttttcttcacaaatggaccggtcatcaattatgatacagcgaaacagtctgacctcggactgtttgccgaatattataaaggaatggccgatgaaggcgtgtttctgccgccttcacagtttgaagggctgttcttgtcaaccgctcatacggatgacgacattgagcatacgattaaagctgctgaacgcgtattcgaaagaatcagccgctccagataa

SEQ ID NO: 3419 - DNA, 975 bp, Bacillus licheniformis
atggaagcatcatttcaaagacaccgccgcctgcggacgacagcaggtatgcggaaattggtaagggaaaccgagttaagagcatctgatttcatttatccgatatttgttaccgaggaagagaacgtcaaaagcgaagttccttctatgccgggcgtgtaccagctgtctttggaccgtttgaaagaggagatggaggaagtcgcaagcctcggcattcaatctgtgatcgtcttcggcgtgcctgagcacaaagatgatgtgggaagcggagcctatcacgatcacggcatcgtccaaaaagcgattgcacaaattaaacaggactttcctgaacttgtcgttatcgccgatacgtgcctatgcgagtacacggaccacggtcactgcggcctggtggaaaacggtgaaattttaaatgacgaatcgcttgttcttttggcaaaaaccgctgtcagccaagcccgtgcaggtgctgacattattgcgccgtcaaacatgatggacggtttcgttgccgctatcagggaagcgcttgatcaggaaggatttacaaatgtgccgatcatgtcgtacgctgtaaaatatgcgagcgctttttacggaccgttccgcgatgctgcgggaagcagtccgcagtttggcgaccgcaagacgtaccaaatggattatgccaaccgcagggaagctctccgggaggcaaaatccgatgtggaagaaggcgccgatgttctgatcgtcaagccgacgctttcatatcttgatatcgtcagagaagtgaagaacgaatttaacctgcctgttgtcggatacaatgtgagcggggagtatgctatggtcaaagccgccgcccaaaacggatggattgaagaaaaagctcttgttctcgaaatgctgacaagcatgaagcgggctggcgccgatttgatcattacgtactttgcaaaagacgcggcaaaatggatttcggaataa

SEQ ID NO: 3420 - DNA, 792 bp, Bacillus licheniformis
atgaagcatgatcttcctttagagggaaagaaagtgctcgtcacccgcaataaagcgcaagcccaatctttcagggaaaaggtggaggctttgggcggggaagctgttttaacgtcattgatttcgtttcggcccgcccttccgccagaggcggcccagcgctttcaagcggatcttgaaagcgcggactggcttgtttttacaagcgtgaacggggcaaaattctttttttcttatttaaaggacgccgggttgtgcgatcctcccgcatcaaaggcgaaggttgctgctgtcggtgaaaaaacagcccggtatttgcgcgacaggggtctttctgtcgatctgatgccggagttatacgtggctgaacatttggcggaggcacttaagcaaaatgccggacgtcatgacaaagtggtcgttttaaaagggaatttatcccgggacgtcatcaagaaaaccatctctcctctcggaattcaagtttcggaatggattttgtatgaaaccgtgcgtgatgaaaggggaattctggacctgaaggaagcagcaaagcacgcgtcttttgattttgtgacgtttaccagttcttcgacggtacatacattcatgtccattctgaaagaggagagcttagcgtgggccgaaaagaaccggacggcttttattacgatcgggcctttgacaaagaaggcgctgtcggactacggaattccatcatatatgccggacgtctatacaatcgacggaatgctgcgcgaaatgtgccgcatttcaagaaagggagaatga

SEQ ID NO: 3421 - DNA, 942 bp, Bacillus licheniformis
atgagaaacatcattgtaggctcaagaagaagcaaattggcgatgacccagacaaaatgggtgatcaaaaagctggaggaattaaatccggatttcacgtttgaaataaaggaaatcgttacaaaaggcgaccggatattggatgttacgctgtcaaaggtcggcggaaaaggtctgttcgtcaaagaaatcgaacaggcgatgctctccggggaaattgatatggccgttcacagcatgaaggacatgccgtcggtgcttcccgaagggctgatggtcggctgcattccaaaacgggaagacgccagggatgttctcatttcaaaaggccgtcaaaagctggctgacttgaaacaaggagcagttgtcggaacgagcagcctcagaagaagcgcacagcttttgcaaatgcgccccgaccttgagatcaagtggatcaggggaaatatcgatacaaggctgaaaaaacttgaaaccgaagattacgacgcgattattttagctgcggccggcctgtcaagaatggggtggaaggacgatgtcgtcactgaatttcttgatccggaaagctgccttcccgccgttgggcaaggcgctttggcgatcgagtgcagaggctctgatgaggagctgctgtctctcttttcgcgcctgaacgaccgctacacacagctgaccgtcacggctgagcgcgcttttcttcatgcgatggaaggcggctgccaagtgccgatcgcaggatttgcaaagatggacgaagacggcgtcatcgaactgaccggtcttgtggcatcgcctgacggaaaaaccgtatacagagaaacagtaaaaggaaaagatccggaggctgtcggcagagaatgcgccgcagtcatgtcggaaaaaggagcaaaggcactgattgaccgggtgaaacaggagctggaagaccatgaagcatga

SEQ ID NO: 3422 - DNA, 831 bp, Bacillus licheniformis
atgacagacacattgttagcaaggcttaacgaagttacaatcgtgttgtacgcgttcaccgttctcttttattttatagactttttacagcacaaccggaaggcgggaaaagcggccttctggttgctttctattgtctggattctccagacggtataccttttttatttcatgcagtacacagatcagtttcctgttttgaataatgcgcaggggctttatttttacgcgtgggtgctcgtcacgctgtctctcgttttgacgaagcttttgaaagtggaatttctcgtttttttcaccaatctcatcggcttctcaatggcggcgatccacacatttactccaacggctcagcagtcggcggagctttcgggcaggctcgtgtccgagctcttgatcatccacattacaatggcgattctttcgtatggagcattttcattgtcctttgtcttttccgtgctgtatctttttcagtatcgcttattgaaaaagaagaagtgggggaaatggctcttgagaatcgaagatttgtcaaaacttgatcatatggcttatgtcctcaatatcatcggcgttcccatgcttctgctgagcctgattctggggattatctggtcgtatgtatcgcttgaaaccctgtattgggccgatccgaaagtgctcggatcgatcgtgctgctttttttatacggatactatttatttatcaggattgtcaaagagctgcagggaaggatcgcggccatgtggaatgccgcgtcttttcttgttcttttaatcaatttctttttgctcggcagcttttcgcagtttcattggtttagttag

SEQ ID NO: 3423 - DNA, 1377 bp, Bacillus licheniformis
gtgcaagcaagagttatgcatatacttgtcgtgggattggattacaaatcaccccctgttgatatacgtgaaaagttaacctttcagccggatgagctggggcaggcgatggcgcaattgaaagaagaaaaaagcatacttgagaacatcatcgtgtcgacatgcaaccggacagagctgtatgcagtcgttgatcagctgcacaccggacgttattatatgaaaatgtttttggcgaactggttcggattaagcaaagaggacatttcgccttacttgaagttttatgaaaacgacggggccgttgaacacctgttccgcgtatcgtgcggattggattcgatggttattggagaaacgcagattttgggccaagtgcgtacaagttttaagctggctcaggaagagaagacaattggtaccgttttcaactatttgtttaagcaggcggtcacggtcgcaaagcgctgccatgccgaaacggacattgcttcaaatgctgtatccgtcagctatgccgccgtcgagcttgccaggaaaatcttcggcgacctttccgataaacacgtgctgattctcggggcgggcaaaatgggtgagcttgcggttcaaaacctgcacggccacggaatcggacaggttacggtgatcaacagaacattttcaaaagcgaaggagcttgccggccgtttttcaggcgcggcgaaaagcttgaatgagctgcaatgcgctttgatggaagccgatattctcatcagttcgaccggcgccagcggctatgtcgtcacaaaagagatgatcgaacatgtcaataagcttcgcaaaggctgtccgctttttatggtggacattgccgtgccgcgggatcttgacccggctctcagcgaagtggaaggcgtcttcctgtacgatattgacgatcttgaagggatcgtcgaagaaaatttgaaggaacgccaggccgttgccgaagaggtggagctgattattgaagctgagatcgtttcttttaaacaatggctgaatacgctcggcgtcgtgccggtcatctcggctctcagggaaaaagccttgacgatccaggcggaaacgatgcagagcatcgaacggaagctccctcatttgagtacaagggagaaaaaacttttaaacaagcatacgaaaagcattatcaaccagcttttgcgcgacccgattttaaaagtgaaggagtttgcgtcagaagctgatgccgaagaaaagcttgcactgttcacgcagatttttgatattgaagaagcggcttttcctgacggtgagagacaagacgaacgtcagccggttcatgcgtttaagcggcaaaatccgcagggtttgacttctatcgcgagcgagtga

SEQ ID NO: 3424 - DNA, 144 bp, Bacillus licheniformis
atggaagcaaaacagatttctttttcaaagtatcaccttcttgatgtagtgaaagaaatagaaacacattttctactatatcacatcaattttttaaaatctgttcacattttgggaagagaaaatagtgaatatatgttataa

SEQ ID NO: 3425 - DNA, 486 bp, Bacillus licheniformis
ttgaaaaagaaatctgttttgcttccattgctgttgatagccgttgctgtctacgcctttttgcggtcgggccggatcagcctgtttgacggccaggaagaatggtctgtacttgcaggtctcgtcggactggctcttttttatcagggacagaaggaagccgattccgcccattcctttgcagggctcttaatgacagcgatcggcgtttatttcacatttaaagaggactatttcagccgcgcggatgattttgcggtcatcgtgctgatcttcggtgcggcgctgcttgtcaaatcgtttaagacaaaagaatatcaatatgaaagtctgctgatgatcgcggtcgccctctatctttactttttccggcaaattgccgcctggctgaagtcggtgaatatcgagacggcatatgtagaagcttattggccggccgcttttatcgcggttagtctgctcttattattcttaaaaagaaaatag

SEQ ID NO: 3426 - DNA, 588 bp, Bacillus licheniformis
atgaaagtaacgaaatcagagattgtcatcagtgcggtgaaacccgagcagtaccctgaagggggactgccggaaatcgcccttgcagggagatctaatgtcggaaaatcgtcattcatcaatacaatgatcaaccgtaaaaacttagcgaggacatcttcaaaaccgggcaaaacacagacattaaacttttatatcattaacgatgtccttcactttgtcgatgtgcccggctacggatttgcaaaagtctccaaaacggagcgcgaggcttggggccgtatgatagagacgtatttgacatcccgcgaagaactgaaagcggtcgttcaaatcgtcgacctcaggcatgctccttcacaggatgatgtgatgatgtacgactttttaaagcattatgaaattcctgtgatcgtgattgcgacaaaagcggataaaatccctaaaggcaaatgggaaaagcatgccaaagtcgtcaaagagacgcttaatatagaaaaagaagaccggctcatattgttttcctccgaaacgaaaaagggtaaacaagaagcatggtcggcgatcgagcaaatgatcgcgagataa

SEQ ID NO: 3427 - DNA, 2325 bp, Bacillus licheniformis
atggcagatgaaacgaaacgaaacatcccgctcctccctttaagaggtttactcgtctatccgacgatggttttgcaccttgacgtcgggcgtgaaaagtcggttcaggcacttgaacaggcgatgatgaatgaccatatgatctttttggcaacgcaaaaggacatatccatagacgaaccggatgaagacgagatttttacattcggaacctatacgaaaatcaagcagatgctcaagctgccgaacggaacaatccgcgttttggtggaggggttgcagcgcgcccgcattcttgagtaccatgacttagatgaatatacgtctgtaaaaatcgagcgaatcgatgaagagactgaaaaagatgttgaagatgaagcactcatgcgcacattgcttgaccacttcgatcaatacataaagatttcgaaaaaaatatcggcggaaacatttgccgctgtgacagatattgaagagccgggaagaatggccgatattgtcgcctcccacctcccgctcaagctgaaagacaagcaggaagtgctggaaacgatcgatgtcaaagccagattgaacaaagtaatcgacctgattcacaatgaaaaagaagtccttgagattgaaaagaagatcgggcagcgcgtcaagcgttcaatggaaagaacacaaaaggagtattacctgcgcgagcagatgaaagccatccaaaaagaacttggcgataaagaaggaaaaacgggtgaggtccaaaagctgactgaaaaaatcgagcaggccggaatgcctgacaatgtgaaagaaaccgcgcttaaagagctgaaccggtacgaaaaaattccgtccagctcagctgaaagctctgtcatccgcaattatatcgaatggcttatttctctcccatggaacgatgcaacagaagacaggctggatttaaagctcgccagtcaaattctcgatgaagaacaccacggccttgaaaaagtgaaggagcgggttctcgaatatttggctgtccagaagctgacccgctcgttaaaaggaccgatcttatgcttggccggccctccgggtgttggaaaaacctctctggcgaaatcgatcgccaaatcgctcggacgcaaattcgtccgcatttcccttggcggcgtgagggatgaatctgaaatccgcggtcaccgccgcacatatgtaggcgccatgccgggccgtatcattcaggggatgaaaaaagcaggcaagaacaatcccgtattccttttggacgagattgacaaaatggcgtcggatttcaggggagatcccgcttcagcgatgctggaagtgctcgatcctgaacaaaaccatacgttcagcgaccattatattgaagagacatttgacttatcaaaggttttgtttatcgcaaccgcgaacaacctggccacaatccccggcccgctcagagaccgcatggagatcatcacgatcgccggctatacggaagtggaaaaggtcgaaatcgtcaaagaccatctgcttccaaaacagctgaaagaacacggtttgaaaaaatccaatctgcaaatacgggagcaggctgtcctggacgtcattcgctattatacgagggaagccggcgtcagaaatcttgaacgccaaatcgcagcgatatgcagaaaagcggcgaagctgatcgtatcaggggaaagaaaaagaattacggtcacagacaaaaaccttgaagactatttaggaaaaagaatgttcaggtacggacaggctgagctcgacgatcagatcggcgttgtcacaggtcttgcctacacgacggtcggcggtgatacgctgtccatcgaagtgtctctttcccccgggaaaggcaagctcattttgaccggaaagctcggcgatgtcatgagagagtcggcgcaggccgcattcagctatgtccgttcaaaggcggaagagttgaacatcagccctgattttcacgaaaaacacgatattcacattcacgtgccggaaggagccgttccgaaggacggcccatccgcggggatcacaatggcgacggctcttgtctcggcgctgacgggccgacctgtttcgcgaaatgtcggcatgaccggcgaaatcacgttaagaggccgcgttcttccgatcggcggcttgaaggaaaaggcgctcggcgcacaccgtgccggcttaaagactgtcattatgccgaaagataatgaaaaagacattgaggacattccaaacagcgtgcgggaaggcttgaccttcattcccgtcgctcacctggacgaagttctaaagcatgcgctagtaggagaagagaaatga

SEQ ID NO: 3428 - DNA, 1656 bp, Bacillus licheniformis
ttgagctggacgagcattgcactttttgtacaactatttttcgggatcatcatcggattatatttttggaatttgctcaaaaatcaaagaacccaaaaggttacgatagacagagagtccaaaaaagagatggaacagctccggaaaatgagatcaatccatttatcagaacctttatcggaaaaggtgaggccgacggcttttaaagacatcgtcggccaggaggacggcattaaagcgctgaaagccgccctttgcggaccgaatccgcagcatgtcattatttacggccctccaggtgtgggaaaaacggcagctgcaaggcttgtccttgaagaagcgaaaaagaacaagcgctcaccgttccaggaacattccgcctttgtcgagcttgacgcgacaacggcccgtttcgacgagcggggaatcgccgacccgttgatcggttcggtccacgatccgatttatcagggcgccggagcgatggggcaggccggaattccccagccaaagcagggagccgtcacgcatgcacacggtggagtattattcatcgatgaaatcggagagcttcatccgattcaaatgaataaaatgctgaaggtgctcgaagatcggaaagtttttttggaaagcgcctattacagtgaagaaaacacgcaaatccccaagcatattcacgacatttttcaaaacgggctgccggcggatttcagactgatcggcgcgacgacaaggatgcctgatgaaatcccgcctgccattcggtcgagatgtttggaagtgttcttccgcgaccttgaaaagcacgaattaaaaacggtcgccaaaaaagcggcagataagattcaaaagaaagtcgcagaggaaggactcgacctgttgacgcggtatgcgagaaacggccgcgaagtcgtcaatatgatgcaaatcgccgccggaatggctttgactgaagagcgcgacgaggtgacggttgaagatatcgaatgggtgatccattcgagccagctgacaccgaaatacgaacaaaaaatcgcctctaaaccgcaggtcggcatcgtcaacggacttgccgtccacgggcctaacagcggttcgctgctcgaaattgaggtcacagtcaatcaggcggctgataaaggatcgattaatatcacaggcattgcagaagaagagaatatcggcaaccagtcaaaatcgatccgccggaaaagcatggcgaaaggatcggtcgaaaacgtcatgactgtattgcggacaatgggagtcaaagcttcggattatgatattcacgtgaatttccccggcggtatcccggttgacggaccatctgcagggattgcaatggcggcgggcatattctccgctattcataagattccgatagaccatactgtcgccatgacgggtgaaatcagcctgaacggccgggtaaagccgatcggcggcgtgattccgaaaatcaaagcggccaagcatgcgggggcaaaaacagtcattattccgcacgaaaatgttcagtcgattttaaagcggatagaaggcatacatatcgttcccgtcaaaaccttgcaggaagtactcgacctcgtattggtcaaccctccttcagaaatgcccgacggcgttcaaatgaaaagagaatccgtttaa

SEQ ID NO: 3429 - DNA, 114 bp, Bacillus licheniformis
ttgcatccggaaaccgtcggcatcccggagcagagtgacggcttcaaaagcaaaataatccctttctgtacgtttattccctccctgatcaggaaatactatctgacatactaa

SEQ ID NO: 3430 - DNA, 1266 bp, Bacillus licheniformis
atgtttaaattcaacgaggaaaaaggacaattgaaatgctcgttttgcggtaaaacacaagatcaggtacgcaagcttgtcgccggaccaggcgtatatatatgtgacgagtgcatcgaactttgcactgaaattgtagaagaggaactcggctctgaagaagaagtggagttcaaagatgttccgaagccaaaggaaatccgcgagattcttgatgaatacgtcatcggccaggaccaggcaaaaaaatcccttgccgtggccgtctacaatcattacaagcggatcaattcgaacagcaaagtcgacgacgtcgagctgtcaaaaagtaacatttccatgatcggaccgactggaagcggaaaaacgcttcttgctcaaacgcttgcccgcatcctgaatgtgccgttcgccattgcggatgccacgtcgcttactgaagcaggctatgtcggtgaagatgtggagaacattttgcttaagctgatccaggcagctgactacgatgttgaaaaagcggaaaaaggcattatctacatcgatgaaatcgataaagtggccagaaagtccgagaacccttcgattacacgcgatgtatcaggcgaaggcgttcagcaggcattgcttaaaattcttgaaggtacggttgccagcgttcctccacaaggcggaagaaagcatcctcatcaagagttcatccaaattgacacaaccaacatcctgttcatttgcggcggagcttttgacggaatcgagcagatcatcaagcgccgtctcggccagaaggtcatcggcttcggctctgacaacaagcatgaagaccttgaaaaagaagcgcttctttccaaagtgcttccggaagacttgcttcgcttcgggctgatccctgaattcatcggccgtctcccgatcatcgcaagccttgagccgctggatgaaaaagcgctggttgaaattttaacaaaaccgaaaaacgcgcttgttaaacaatatagaaaaatgcttgaattggatgatgtggagcttgtgtttgaagacgaagcgctcacagaaatcgctaaaaaagcaattgaacgtaaaacaggagcacgcggacttcgttccattatcgaaggaatcatgctcgacgtgatgtttgatctgccgtctcgcgaggatattgaaaaatgcgtgatcacaggcaaaaccgtcactgacggcgaaccgccgcgtctcattatgaaagacggcacggtcgtcaataaagacaaaaaaacttcagcataa

SEQ ID NO: 3431 - DNA, 144 bp, Bacillus licheniformis
ttgtcctttttcctcgttgaatttaaacattctttcaccccttatatccttgtcattcctgtttcttcgttaaaagaaacatcgcttgaaaacattcgttccattatgtattgcattttaccacactttccaaaaaggcgataa

SEQ ID NO: 3432 - DNA, 1275 bp, Bacillus licheniformis
atgtcagtaaaatgggaaaagcaagaaggaaacgaaggcgttttaacggttgaggtagatgccgatacctttaataaagcccttgatgatgcatttaaaaaagtagtaaagcaagtatccattcctggattccgcaaagggaaagtgccgcgcggtttgtttgaacagcgttttggcgtagaggcgctttatcaggatgcgctggacatcctgcttcctgtcgaatatccgaaagcggtagaggaagcaggcattgagcctgttgaccgtccggaaatcgatgtggaaaaaatcgaaaaaggcgaaaacctgatcttcactgcgaaggtaacggttaagcctgaagtgaaacttggcgaatacaaaggccttggcattgaaaaagacgatactgccgtaacggatgaggacgttcaaaacgaacttaagtctctccaagagcgccaggctgaactcgttgtaaaagaagacggcaaagttgaagaaggggacactgttgttcttgacttcgaaggattcgtagacggcgaagcattcgaaggcggaaaagcggaaaactattcccttgaagtcggttcaggctctttcatcccgggctttgaagatcagcttgtcggacttgaagccggtgctgaaaaagacgttgaagtgacattcccagaggaataccacgcggaagagcttgcgggcaaacctgcggtattcaaagtgaaaattcacgaaatcaaagcgaaggagcttcctgagcttgatgacgagtttgcgaaagatgtcgacgaggaagttggaacgcttgccgagctgactgaaaaaacgaaaaaacgtctcgaagaagcaaaggaaaacgaagcggacgctaaacttcgcgaagagcttgtcttgaaagcagctgaaaacgctgaggctgacattcctcaagcgatgatcgacacagagcttgaccgcatgatgaaagaattcgaacagcgtctgcaaatgcagggcatgaaccttgagctttacttccaattctcaggacaggatgaaaacgcgctgaaagagcaaatgaaagaggatgctgaaaaacgcgtgaaatccaacctgacactggaagcgatcgccaaagcggaaaaccttcaagtcactgacgaagaagtcgaagaagagctttctaaaatggctgaagcatacaacatgcctgttgaaaacatcaaacaagcaatcggttctacagacggaatgaaagaggacttaaaagttcgcaaagcaattgattttcttgtagaaaaccgttaa

SEQ ID NO: 3433 - DNA, 1008 bp, Bacillus licheniformis
atgaagcatgacaagaagaactcgaagatcatcccgttcccgaacgtaaaggagcgtttagtgcacaaagggatgggtgcgctcaaagaaaagaattaccatgaagcgctcaggctgttttctgaagcgaagcgctatgatgatgaggaatctgatatttatctgggaatggccatctgcctgcttgaaatcggcgagcttgaagaagcgaaaggcatctgcgaaaaaatgctgaaggaaggccacggccactattttaccgttttgcaagtctatatgacgattttaatccagctcagacaatacgaaaaagttaaagaaacgatcgaagctgtactcgaagaaaacaagcttcctcctgaaagcgcggaacagttttataaactgcttgatttcagccgcaagatgacggaagacccggggcctgaggacatcaccgaagaccttcccgagacggaggaggttgatcaggaaaggcttttgaatgacacggaagagcaggttaagcttcttcacgggctgaaggaccgcaatctgacaagctatatcggcttgttgaaaacgattctgcaaaatccgagcgcacatcctgtcgtaaaaacgatgattcttcagcttttagccgagtcagaccatgaaaagccgacgcttgtcgcaaaatttggcgattcgatgacaattaatccgacagagacggtcaagcctgatgacatgccgatattaaagcatgttctgagcgtgctcgatgatacgctggggaatgaaaatcccacgctgtaccaggcggtcgaagagctgtggagaaggcatatttacgtcctctatccgtttcagccgaaatactcaaaccgcgagctctgggctgctgcactgcataaagtcggatatgagatgcacgggatcgacatcgataaagaggagcttcatattctctatgaattcaatgacagacagcttgacgaagcctgcgcgctgatcaaagacatagaagaaatttcttatttgtaa

SEQ ID NO: 3434 - DNA, 105 bp, Bacillus licheniformis
ttggctgcaagcataaaaaagctgtccgatgtagatcggaggctttttttgctggcggcagcatactgccgccggttctttcttgtgtttagcgggccgggttga

SEQ ID NO: 3435 - DNA, 600 bp, Bacillus licheniformis
atggagccattaaagacccataacggaatagcggcggtgctaaacagaatcaacgtagacacggaccagatcattccgaagcaatttttaaaaaggatcgaaagaacgggatacggccgttttgctttctttgactggcgctatctggataacggcgatcccaatcctgattttgaactgaaccggccggaatacaaaggcgcttcgattttaatcgctggcgaaaacttcggctgcggctcttcaagggaacacgcgccatgggcgcttgacgactacggatttaaaatcattatcgcgccgtcttttgccgatatctttcaccaaaactgttttaaaaacggcatgctgccgatccgccttccttatgaggcgtggaaagagcttgctgaacagtatgagtatcaatctttgacgatgacggtcgatctcgaaaaacagacgataacagatcatgccgggcagcagattgcctttgaggtcgatccgcattggaaagagatgctgctgaacggttacgacgaaatttctttaacattgctccttgaagaagaaatcgaacaatttgagaaacagagaagttcttggctgcaagcataa

SEQ ID NO: 3436 - DNA, 1419 bp, Bacillus licheniformis
atgatgcctcgaacgatcatcgaaaaaatttgggatcaacacgtgattaaaaaaggtgaagggaagcctgaccttctctatatcgatctgcatctgatacatgaggtaacgtcgcctcaggcctttgaaggcctgaggcaaaagaacagaaaagtcagacggcctcaaaatacgtttgccacgatggaccacaacattccgactgtcaatcggtttgagattaaagatgatgtcgctaaacggcaggtcagtgcgctcgaacggaattgcgaagaattcggcatccgccttgcagacttgtcaagcgtagaccaggggatcgtccatgtcatcgggcctgaactgggattgacgctcccgggcaaaacgatcgtttgcggagacagccatacatccacacacggagcgtttggcgcgctcgctttcggaatcggaacgagcgaagtcgaacacgtcttgtcaacgcagacgctttggcagcaaaaaccgaagacgctggaaatccgcgttgacggcaaactgcaaaaaggagtgacggctaaagacgtcattctggcgatcatcggaaaatacggggttaaattcggtgcgggctatgtcattgaatataccggcgaagtgttccgaaacatgtcgatggacgaacggatgacggtttgcaacatgtcaatcgaagctggggcaagagctggattgattgcaccggatgagacgacgtttgaatatgtcaaaacaaaaaaatatgcgccaaaaggcgaggattttgagaaagctgtagaagaatggaagaacctgaaaaccgatccgggggcggtctacgaccggacgatcgtgatggacggaagcgccatttctccgatggtgacgtggggcatcaaccctggcatggtgctgccggttgatgaaacgattccggggcctgaggctttcttgcaggaagacgataaaaaagaagcgcagcgcgcatatgaatatatgggtcttgaaccatataaaaaaatcgaggacattacaattgagcatgtctttatcggttcatgcaccaactcgcgtatgacagatcttcgccaggcggccgaaatgattaaaggtcaaaaagtcgccgacggcgtcagagcgatcgtcgtacccggctcgcaaagcgtcaaaatccaagcggaaaaagaagggcttcacaagattttcatcgaagcgggctttgaatggagagaatcgggatgcagcatgtgtttgagcatgaacaatgatgttgtccctgaaggagagcgctgcgcttcgacttccaaccgcaattttgaaggcaggcagggcaaaggagccagaacgcatctcgtcagcccggcgatggctgcgatggccgcgattcacggccgctttgtcgatgtcagaaaatattaccaagagacaacagctgtatag

SEQ ID NO: 3437 - DNA, 1119 bp, Bacillus licheniformis
ttgaatttgaaaaaacgaatcgcacttttgcccggtgacggaattggtcccgaagtattggacgcggctgttgatgtgctgaaaagcgttgctgaacattatcagcatgaattcgaatttgaatacggcctgatcggcggggcggcaattgatgaggcaggagcgccgcttcctgaggaaactgtcgccgcctgcaaagctgcggacgccattttgctcggagctgtaggcgggccgaaatgggatcaaaatccttctgagctgcggcctgaaaaagggctgctcgccatccgcaagcagctcgatctttttgccaatctgcggcctgttaaagtatttgaaagccttgcgggagcttctccgttaaaaaccgaatatatcgaaggtgttgactttgtcatcgttcgcgagctgacgggcggcttgtattttggaaagccgagcgagcagtacgtcaatcagaacggcgaggaagaagcggttgacacgctgttttataaaaagtcggaaatggaaagggtcatcagggaagccttccaaatggcgcagagtcgaaaaggcaaagtgacctccgttgataaagccaacgttcttgagtcaagcaaactatggcgcaagacggcggaagaagtggcgaaagagtttcctgacgtcaagcttgagcacatgctcgtcgacaatgcagccatgcagctcatctatgcgcctggacagtttgatattatcgtgacagaaaacatgttcggcgatattttaagcgatgaagcatcgatgctgaccggatcgctcggcatgctgccgtcggccagcttatcaagctctggacttcatttatacgaacctgtgcacggctcggctcctgatatcgcgggacagaacattgccaatccgcttgcggcgatcttgtccgcggctatgatgctcaggacgtcattcggtcttgaagctgaagcgcaagctgttgaacatgcagtcgatcaagttctccgggcaggaaaacggacgaaagacctggcaaaaggctcggaacattgcacaactcaatcgattacaggggaagtaaaagccgcgctggcagacgacaatgccatttcaaacatcatgaccgcttacgtttaa

SEQ ID NO: 3438 - DNA, 1557 bp, Bacillus licheniformis
gtgcgaaaaattaacttttttgatacgacactccgtgacggtgaacagtcgccgggcgttaatttaaacacgcaggagaagctggcgatcgcccagcagcttgaaaaactcggggtcaacattatggaagcgggctttcccgcttcatcccccggggatttcaatgcagtaaaagaaatcgcaaggacgattaaaaactgttcggtaacagggcttgcccgctctgtcaaaggagatatcgactcggcgtgggaagcgctcaaagacggagctgaaccaaggcttcacatttttatcgccacttctgacatccacttaaaatataagctgaaaaaaacgcgcgaacaggttctggaacaggcggtcgcaatggtgaaatacgccaaagaacgcttcccgatcgtccagtggtctgccgaagatgcgtgccggactgatcttccgtttttagccgagattgtaagcgaagtgatcgccgcgggagcggatgtcgtcaatctgccggatacggtcggttatttagcgcctgccgagtatggaaatatcttccgccatattaaagaaaatgcccgcaatgccgacaaagtccagctttcagcccattgccacgatgacttgggcatggctgtcgccaactctttggctgcgattgaaaacggagcggatcaagtcgaatcggtcatcaacggcataggcgaaagagcggggaacgcctcgcttgaagaaatcgccgtcgccctccatatccgaaaagatttctaccaggcggaatcaacgattcagctgaatgagattaaacggacaagtgatttagtgagcaagctgaccggcatggccgtgccgcggaacaaagcggttgtcggcgataatgcctttgcccacgaatcaggcattcaccaggacggcttcttaaaagaaaaaacaacatatgaaattatttctccggaacttgtcggcgtgaaaacggatgcgcttgtgctcggaaagcattcagggcgccacgcatttaaagataagctgcaaaacctcggattccagcttggagaagaagaaatcaataaattcttcaacatttttaaagagcttaccggaaagaaaaaggaatttacggatgaagatctcatctcgctgatactcgaagagaaaacggcagaccgcaaaatcggctatgattttatttcactgcaggttcattacggcacctcccaggttccgacagcaacagtctcccttaaagatcaggaaacggatcaggtcatccaggaagcggcgaccggagcgggaagcgttgaagcggtgtacaacacgctgaagcgctgtatggataaagaagtccagctccttgattaccggattcaatccaaccgcaagggacaggatgcattcgcgcaagtatacgtcagggtgatgatcgatggaaaagaatcgggaggacgcggggttgcccaggatgttctcgaagcatctgccaaagcctacttgaatgctgtgaaccgctatctcgtattgaagacgaatacggaaggattgtcaaaacaggcggctgtaggatcataa

SEQ ID NO: 3439 - DNA, 1029 bp, Bacillus licheniformis
atggtaaaagtatattataacggtgatatcaaagaaaacgtattagcaggcaaaaaagtagcggtgatcggatacggctcacaaggccatgcgcacgcactgaacctgaaagaaagcggagtggacgtcattgtcggcgtcagaaaagggaaatcctttgcaaaagcagaggaagacggccatcaagttttcacggtaagagaagcggcagaacaggccgacatcgtcatggtgcttcttccggatgaacagcagcaaaaagtgtatgaagcggaaattaaagacggacttcaagctggcaattcacttgtattcgcccacggattcaacgttcatttccatcagatcgtgcctccggcggatgttgacgtattccttgtcgctcctaaaggaccgggacatcttgtcagaagaacgtttgaacaaggtgcgggggttccggcgctgtttgcgatctatcaggatgtgacaggggaagcgaaagacaaagcccttgcttatgctaaagcgatcggcggcgcaagagccggtgttcttgaaacaacatttaaagaagaaactgaaaccgatcttttcggagaacaggcggtgctgtgcggaggattgacttcccttgtcaaagccgggttcgaaacgctgacagaagcgggctatcagcctgaactcgcatacttcgagtgtctgcacgagctgaagctcatcgtcgacttgatgtatgaagaaggtttggcagggatgagatattcgatttccgacacagcgcagtggggagacttcgtatcaggtccgcgcgttgtcgatgagaaggtaaaagaatcaatgaaagaagtattgaaagacatccaaaacggtacattcgcaaaagagtggatcgtcgaaaaccaagtcaaccgtccgcgtttcaacgccatcaatgcaagcgaaaacgaacaccaaatcgaagtggtcggcagaaagcttcgcgaaatgatgccgtttgtcaagcagggcaagaaaaaggaagcggtggtagccggtgcgaaaaattaa

SEQ ID NO: 3440 - DNA, 519 bp, Bacillus licheniformis
ttgaaaagaatcatcacgctgacggttttgaaccaaagcggcgtcttaaacagaatcacagggttgtttacaaaacggcattacaacattgaaagcattacggtcggccacaccgaaaccgcgggaatttccagaatcacgtttgttgttcatgtggcagatgaaaaagaaacggaacagctgacaaaacaattaaacaagcagattgatgtactgaaagtcacggacattacgaatcaatcgatcgtccaaagagagctggcgttaatcagggtggtttcccctccgtcgagcaggacggaaataaacggcgtcatcgaaccgtttcgggcgtctgtcgtcgatgtcgcaaaagacagcgtcgtgattcaagtgacaggggaatcgagcaagatcgaagccctgatcgaactattgaaaccatacgggattaaagaggtagccagaacaggcaccacggcctttgcgaggggaactcagcaaaagccggcctctattaaaacaatatctattgtataa

SEQ ID NO: 3441 - DNA, 1725 bp, Bacillus licheniformis
atggggacgaatgtacagttggatgctgaaaatgcccaatgtacacaaacaatggcaggggcgtcaatgctgatcgaggctttaaaacaggaaaatgttgaagtgatctacgggtatccgggcggtgcggtcctgccgatttatgacaaactctacggatcgggaatgtttcatgtgctgacgcgccatgaacaaggcgccatccacgcagccgaaggatatgcaaggatttccgggaaaccgggtgtcgtcatcgctacatccggaccgggagcgaccaaccttgtaacgggtctggccgacgcgatgatcgattcattgcctctcgtcgtattcaccggtcaggttgcgacatcggttatcggatctgacgcattccaagaagcggacgtcatcggaattacgatgccgattacaaagcacagctaccaggtacgcaatgccgaagatttgccgagaattattaaagaagcattccatatcgcaacaacaggaagaccgggccccgttttaatcgatattcctaaagacatcgccgttgtagaaggagaattccgctatgaccacgacattcaccttccgggctatcagccgacgaaggaaccgaattatctgcagatcagaaagcttgtggaagcggtcagtgcagcgaaaaagccggttattttagcgggtgcgggcgtcttgcacgggaaagcgtcagaagaattaaaaaattatgtcgaacagcagcagattccggtggcacatacgctgttaggcttgggaggatttccggccgatcatccgcttttcctcgggatggccggaatgcacggaacgtatgcggccaacatggctctgtatgaaagcgatctgttaatcagcatcggtgccaggtttgatgaccgggtcacagggaacttgaagcattttgcaaaatatgcgaaagtcgctcacattgacatcgatccggctgaaatcggcaaaaacgttcatacgcacattccggttgtcggcgacagcaagcttgtactgacggagctgatcaagcaaaacggcaagccgagcgcttctgatgagtggaaaaagcagcttgcggcatggaaaaccgaatatccgctctggtatgaagaaaatgaaacagaaggattcaaaccgcagaagctgatcgaatatatccaccgctatacaaagggcgaagctattgtaacaacagacgtcggacagcaccaaatgtgggccgcgcaattttatcagttccaaaaagccgacagatgggtcacttccggcgggctcggcacaatgggcttcggacttccggcggcaatcggagcacagcttgcggataaggatgcgacggttgtatcgatactcggcgacggaggattccagatgacgctgcaggagctgtctgttattcacgatctgaaccttccgatcaaggtcgtggtcttaaacaaccgctgcctcggaatggtccggcaatggcaggaaatcttttacgatgagcgctattcgcactccaagttcacatcacagcctgatttcatcaagctgtctgaagcttacggcatcaaaggcgtccgaatcacatccgaagaagaagcggaagaaaagctggaagcggcgctaacgtcgaatgaaccgatggtcattgatgttcaagttgcacaagctgaaaaagtatttccaatggttgcgcctggaaaagggctgcacgaaatggtgggggtgaaaccttga

SEQ ID NO: 3442 - DNA, 159 bp, Bacillus licheniformis
gtggtaccgcggaaagaaaagccttttcgcccctttggcctgcaaggtgtgcagcgtcaacagtgggcgggaaggctttttttagctgcaaaagcagattggatacatgctttgcggcacatatatattgattattttttgaaaaacaattgtgaatga

SEQ ID NO: 3443 - DNA, 915 bp, Bacillus licheniformis
atgggggaccagaaagaccagtggatcttcctaaacgacaaactcgttaaaaaagaagacgctaaaatatcagtctatgatcacggatttttatacggggacggcgtgtttgaagggatcagggtatacgacggcaacatcttcagaatgcaagagcacatggaccgcctctacgattctgcgagatcgatcatgctggagattccatatccacaggaagaactgacacagcacgtactcaaaacagtcgaaaaaaacgggctgaaagacgcttacatccgcttggtcgtttcaagaggagcaggtgacctcggactcgatccaaacaattgttcaaacccgagtgtcatcataattgtcgaaccattggcaatattcccgaaacatttatatgaaacggggattgacattgttacggttccgacaagaaggaacagacccgatgtgctgagccctaaagtaaaatcgctgaactacttaaacaatattcttgtccggatcgaggcgcatatggcgggtgtgacggaagcgctcatgctcaatgatcaaggctatgtcgccgaagggtctgcggataacgtatttatttataaaaacggaaagctcttgacgcctccgggctatatcggagcgcttgaaggaatcacccggaatgccatcatcgaaatagcgcgagagctcggctatgaagtgaaagaagagccgtttacccgccatgacgtatacacagccgaggaagtgtttttaaccggaacggctgcagaagtcatcgcggtcgtaaaagttgacggccgcaagatcggggacggcaaaccgggagtccacacaaaccggatgcttgaaaagttccgcgagcgcgtcgtccgtgaagggttaaaagtcagcctcaaagatcaaagcttaagtgtcagctga

SEQ ID NO: 3444 - DNA, 228 bp, Bacillus licheniformis
atgtaccgcacatttcctgcgcactctgttccccgcgtgcgccaatacccgggatacttcggctacccggttacttatgtctataatccttcagcacacgggccatatacctattatccgtacggcggggtgttcaccactccgacgctcggattcggcatcggctacccgggaatttccgttccggctgtacacgcctttaccggtggattcagagacaatgaataa

SEQ ID NO: 3445 - DNA, 1383 bp, Bacillus licheniformis
gtgcatacgctagaaaaaatggagcaaacaaatttccagacggcgagagattatgtgacacaagcatacgagacagtacagaagcgaaatttttacgaaagcgaatttcttcaagctgtaaaggaaatatttgattcccttgtccctgtattggcaaggcatccaaagtatatcgaacaccgcattcttgagaggatcgcagagccggaacggatgatcaccttcagggtgccgtgggtcgatgatgaaggcaatatccgggttaaccgagggttccgggttcaatttaacagtgcaatcggtccgtataaaggcggcatccgctttcacccttctgtgaacgcgagcattattaaatttttgggttttgagcagatttttaaaaattctttgaccggactgccgatcggaggcggaaaaggcggggctgattttgatccgaagggcaaatcggacagggagattatgagttttacgcagagcttcatgaatgaactgtacagacatatcggaccggacacggatatccctgccggcgatattggtgtcggagcaagggaagtcgggtttatgttcggacagtataaaaagattcggggccgctatgatgcaggcgtgttaacaggcaaaggccttgaatacgggggcagtttaacgaggaaagaagcgacagggtacggtctggtttatttcgtggaagaaatgctgaaggatcaggggctgcgctttgaaaacagcaccgttgtcgtctccggttcagggaatgtggcgctgtacgcgatggaaaaagccgctcaattcggtgcgaaagtggtggcctgcagcgattctgacggctatgtctatgacgaaaaaggcatctgtcttgagacggtgaagcggctcaaagatgacgggaacggaaggattcgcgagtatgtcagcgagcatccggaagcacactatttcgagggatgtaccggcatttggtctattccatgcgatatcgcgcttccgtgcgcgacccagaacgaaattgacgaagaggcggccgaagtgctcatttcaaatggggtcaaagctgtcggagaaggagcaaatatgccgtctgaagagggcgccgtcaaacgctttttggatgcgggagttctattcggaccggctaaggctgcaaatgccggcggtgtagccgtttcagcgctcgaaatggcgcagaacagcgcacggcttcactggacggcggaagaaacggatgcgaagctcagagcgatcatggctgatatttacaagagaagcgttgaagcggcttcagaatacggacggcccggaaatctgctcgacggctgcaatatagccggatttatcaaagtggcggatgcgatgatcgctcagggagtcgtttaa

SEQ ID NO: 3446 - DNA, 193 bp, Bacillus licheniformis
ttgtatgcagtaggtttcattttaaaaacgggataagatgctcattctctgccgggagtacaaggggggaaatgcgccgatcacaaagaaaatagacattttgtacagaaagaacctgtcagataaagtggtattttatggtttattggtccttttctcctcagcttttaagagctgtccttctatcttatga

SEQ ID NO: 3447 - DNA, 255 bp, Bacillus licheniformis
atggacgacaaaaaagaaatgtcgaacgttgaaacgcaaagaaactttttaacagctgaagaatttcctgaaggtgcgtatggagctgcacagggcaaagacgagcccgttgagaacaaaagcacgccatggaaggaaggccagcaatactacagcaatttcgcatacgaattccgcaatcttcatcaaggaacgccgcgtcaatatcccggagcgcatccaacccatgacgaagaggatcaaaacgaggaatga

SEQ ID NO: 3448 - DNA, 492 bp, Bacillus licheniformis
atgacaaaacaacagcaaaatcagcagcaaaagcagaagcaacaaaaacaaaagcatgagcagctgctcggggccaacatcacagataccgaacttgctcaggaattcggaaacatccagcagcagcttgcccagctggagcaaactgttaatcaaatggggtcacagcagcagggccaaagcggccagcagagctctcaattgagccagggaatcaatcagctgaaacagcaaattcagcagttcagctcccaatctcagcagcaaatgcagcagacggatcagcaaattcagcaaagcattcagcaggctgtccagcagctgaatcaggctcttcaagggatccagacaaaccaggccatgaaccaaatgagccaggcgcttcagcaggcgcagcagtcatttaaccagcaagggcaacaaggacaacagggtcagcaaaatcaacaaaaccagcagcaaaatcaaaattttcaacagcctctacaataa

SEQ ID NO: 3449 - DNA, 222 bp, Bacillus licheniformis
atggctcaacaatctgtgaaagccaccgtgttcaaggcaaatgccccaagtgaaacgaccaaacagatttacgaagatcaattcgactataaaggaaatgacatcatcgagccgccttatagtttgaaggaattgaaaagcaccgcagagtattcaacgatcctgcagcagtgcatccatgcctataagaccaaatattctcggtttttggttttgatgtag

SEQ ID NO: 3450 - DNA, 1296 bp, Bacillus licheniformis
atgacggtaaaagaagtcaatccgcattttgaagattttctctttgactggaaccaaaaatttcagctgctcgttggcggttacggatcatccaaaagctatcacattgctctcaagctcattttgaagcttcttgaagaaaaacggacagtcttagtcattcgtgaagtgtacgacactcatcgggattctacattctctcattttgaagggatcatcaatgacttagagattgatcatattgtgaggtgtatgacatctccgatgcaagtcaggttcccaaatggcagccggatcatcttcaaggggctggacaaaccggccaaactgaaatcgatcaacaacatctcaataatatggattgaggaatgttcagaggtcaaatatgaaggctttaaagagcttctcggccgtctgcggcatcctacactgccgcttcatatgattttttccacgaacccggtcggggaagacaactggacatacaagcatttctttaaagacgatctgaacaatcgatttgtcctagatgataaggagctgtacgaaaagcgaacgatcgtcttaaatgacacatactatcatcattccacggcggaagataatttgtttctgccagaaagctatgtaaggcagctggatgaactgaaagaatacgatccagacctttaccgcatcgccaggaaaggtcattttggcgtgaatggggttcgggtttttcctcagtttgaagagtggccacatgatgaagttatgcaggccatctcgaacattgaccgtcccatcaagcgggtaggcatggactttggttttgaggaatcctataacgccgttgtccggcttgcggtagatcataagaaaaagtacctctatatctattgggaatattacaaaagaggaatgacggatgaccggacagcagaggagctccaagaattcaagaaaacccaggagttgatcaaagctgattcagcggagcctaaaacgattcagtatttccggcagcagggtttcaatatggtgggagctcataagtaccagggttcgcgcctgcagtatacgaaaaagatcaagcggtttaaaaagatcatttgttccggccaatgcaggaacaccatttttgaactcaagccgctgacctataaaaaggacaagctgggtagcatcattgaagatgaattcaagatcgatccccacactctttcggccatctggtatgccctcgatgattacgaggtcaccgatctgaaggagaaaccgaaaatccggcagcggccaaatagagagaggaggtaa

SEQ ID NO: 3451 - DNA, 411 bp, Bacillus licheniformis
atgcagcggatcagtcggatagaaaacggcctatctgaaaaacagcgccgcgtgctgcaacaaatgcgcaaggtcaaggacatcgttcaaaccccggataagaatggactagtcaaacctgttccggttatgaatgagcgtcttgttgtgactgaaattgaagaaaccgagatgcgggctattgatgatattttgaatatcgaggaggcgctcactcgtgtaacggataaacggttgaaagccattcgccagaaatacgatatgatccgcttaatggatgagcaagaattgaagctccgcggcatctatctttcaaacgagacgaaacaggcagagcttgaacgccttaccgcccgccctgtggacaattctgtgaatatcacaattactcgtaagggtgacggcaaatga

SEQ ID NO: 3452 - DNA, 387 bp, Bacillus licheniformis
atggccagaccgcgtgatccaagacgtgacgaagcgttccgtttatggaaagaaagcagcggaaccaagaaattaaaagacatcgcggatgaattgggcgtctcaagcagtaccgtccgcaagtggaaagcaatagataaatgggaagataaaatcaaagggagcgctcctaaatcgaatgggagcgctccttttcgtcccagcgctccaataggcaataaaaacgccaaaggaaacaagggcgggaatgcaccgcctggaaacgaaaatgcgaaagggaatgccgcaccaaaaggaaataaaaattccgcccgtaccggcgaatatgaaacgatcatgtgggattttttaaacgaggatgagagacagctgttcggagaaatctaa

SEQ ID NO: 3453 - DNA, 249 bp, Bacillus licheniformis
atggcaacagaaaatacaaacatacgttcctgcgatgataaagaaaaagagaaactgcttctcctgcatagcgctgaattgcttgaaaacatcagtcaatctaaagagaaatatcgaaaaattattcaggcaggtatcacccaatgggtcaaagattttcaaagcggtcatattaaggtgaacactgttgaagatttaaaaaagctcatcgagctcgatatacagcttcagaaagatgaagaaatttaa

SEQ ID NO: 3454 - DNA, 774 bp, Bacillus licheniformis
atgaccgttgtgccggagaaattgtactgtagagcttgtaagagaaaaacaaaccatcagatagttaaaaatgagcatgacaatgaactaaagtattcaataagtaatttagattatgatgaagaaattgattttcaatttaatgaggattatgcaatagttcaatgtagaggttgtgacgctattgcttttctaaaaatatacggcgatgaagatatgtttcatatagtcggttcaaattatcatactgatagagaatactttgtcgaatacactgtctttccagaagagccaaaaaaggaggatccggtagaacagttattacaattcaaagaaaaatatgaattcgatcacttacctaacttaataaatggaattagaaatgaaacaattaatgcttatcgccaacgtatgaatttattatgcaatacgggaattagaatgcttattgaatcaatatgtatggtaaatggaattgataaaagaccgaagattaagaagggagaaccagtgttagatggtcataaaaacccggtaatggtcaatttaaatttggttcaaaagataaatgaacttaaagaaaagaatataattgatgaggaacaacgaaggatactcttggaaattaaagatgtaggaaatcagacagtacatgaaatatttcgaccgaaacggagagatttattgttatatctagaaacattagatttaatactatttaatatttatgaattacctcatattaaaataacaaattcaccaagccctagttag

SEQ ID NO: 3455 - DNA, 994 bp, Bacillus licheniformis
ttgggcgatttaaaaaacatcaagaaaaatggccttaaagtattcagtacattctcttggggcgggggttcctctatgggctataagctcgccggttacgatcttttggggaactgtgagatcgatccgcaaatgatgaagatttacaggaagaatcataatccgatatatccttttcttatggacatcagagactttaacaaaatggaaaatctgcctgatgaattgttcgatttagatatttttgatggttccccgccctgcagcgtgttttctattgcgggggatcgggaaaaggcttggggaaaagaaaaagcctttcgtaaaggacaggcaaaacagtcacttgatgatctattttttcattaccttgatgctgttgaaaggctgcggccaaaaatctttgtggccgagaatgtcaaaggaatggtcagcggaaatgcaaaaggttatgtgaagctggtgattgaacggaccaaggaaattggatatgatgttcaactgttcttgttgaatgctgccacaatgggagccccgcaacgtagagagcgggtcttttttatttgccgaaggaaggacttgaatttactaccgcttaaattgtccttcaatgagccaccgattgtatataaagaattcagaagcggccatggtgcaaggcttaaagaaacatcaaagctttataaaagatgggtgaagcgacggccgtcggataataatgggagacatcacgaaaaggattgaagggaaagaatctaatttcaatacgatattagtgaaaaatagccttgtcccgcctactctcgggagtggttcggtatttgtccgttatgatgagccctactatatctctgaacgggatatcattttaatgcaatctttcccactcgattatgattttatggacgcatctgttcaatatgtttgtgggatgagtgttcctccggtcatgatgaaaaaaatatcggaacagatttacaatcagtggttttaa

SEQ ID NO: 3456 - DNA, 357 bp, Bacillus licheniformis
atggcttcctataatctttgcgtcctcatggaagaaaatccaaagactctcctggtttcagttgtaaattttgatgaggctgaggaaaaagcgctcaacctggctttaaataagatcagcggtgactgggatgattacaaacttgaacaggttttggaagacctgcagcacaataattttgatctatcccttacaggcttctcagaaagtgaaatagatgaaatcttgggagagctggctgagcatgaaggcaacgaaggaaaaatcaatgacagccaggaattagacctggatgattatgaagatgatcatttccaacatacctgccccaaatgcggattttcatttaatgaatag

SEQ ID NO: 3457 - DNA, 195 bp, Bacillus licheniformis
atgtatcgaatgatgatgaagatcgtcagcttcaaaggaggagcggctggagtctatgcaggattgcgcgcgatagtcgcggggaacgcaagcggtgagatcccgtttgcacaggaagtcatttttatatggcttcctataatctttgcgtcctcatggaagaaaatccaaagactctcctggtttcagttgtaa

SEQ ID NO: 3458 - DNA, 396 bp, Bacillus licheniformis
atggaacgagaaaattatgtctcattatggattggtagtattcaaactgatgataaattaaatgaatacgttgaattaccgtatgatgaagaagaaggtgacttcctcccttctgcgtttttaaaagactttaacatagatattgatgatttagatgaagactttatcgaaaaggtagttcatgatcagaataaagaactgttgcacgaattaataggtggctgttcatatgatgaaatcattttacctcgttttgaagctattcagggtaaaaaacttccgaacaatataaactctgctattttactatataactttgattatgaagggaaaagaaatgaaattgttaacgatgggtatacttttaaatttataggatccgtttcatatgtttaa

SEQ ID NO: 3459 - DNA, 1923 bp, Bacillus licheniformis
atgaagactcttgatgtccatgcgttgcaccatgcaattgatcaaacgctggaacaattaaaacagcagtcagacgaattatccaaagtcaaaaaagccgtagagggcattacatcacttgatgatgctttaaaaggaaaaggcggcgacgcgatccgcgccttttacgaggaatgccacaccccttttctacagttctatgatactttcatagaggaatacagttccacgctgaagaaaatgaaaagcgcgctgaattcgctggaaccaaaccacaacgggtttatttcgcaaagctttcttgagcacgagctggaacaaggattgaatgcggccgaccgcactacgaagcgtttggtttctaaaacaaatgccacgatcgcaaaagtcagccacattgtcgatttgcctgatttgaatgacagcggttttcacgaacagaatcagaaagctttaaaggaaatcaatcagacaattgaaaagctgcacgccttcgaccgcgaacagacaagcgctcttaaaaccgctgaaaacgacctggaaacgatgcagagatacataagccggcttgaaaaaatgtacacaggccctaaaattgaaattaccggttaccaaaaaggctcgattttaaagccagatgagatggatgctttgcgtggtggacaagacacagcgatgggcgtcatgttggataagctggataagagatcaaagcttgaaaaagaggccagcaaaatagaacctatgagtcatactgatacgttgaagaaaaaacttgaaaagttgtatgatgatccggatgagtttctcaaagttgctagagagattggatatgataatcttacatctgaacagatgaattatgttactgccattgaagaagcttatgagttcagagcagatccaattaaaggaactctggaagatggaaaacatgtcttagaaagtatgaaaggctttgtggttggaggatatgaatttgcaaaagatacgatccaaggaacgattgaaacaggtaaagctcttattggacaagcagacgactttattaaaaacccaaaagcaactgtaaattcagtacttgagtatgattacaaagccgctttcgaaagtatgttgcaatcaatcgcagattcttgggatgaaaagatggtacatggggattcatattctcgcggacactatattgcttatgcgattgggacgatatgggggttggcagaggccggtcctactgtcgtatcaggctcaaaaagtcttggcaaagctggcaaggctgcagcccaaacagcaaagaaaaatattaactctgttaaacagcatttcaatccgcctaaaaaccgctatactcctgcattagaagggatgctccaaagagcgggagaggcccctaatgtgaaaaatacgcctttgctgagagagctggttgaggataagaagaagagtgtgcttttcaacagtaataaagggacttcgggtcagactgtaaaaaaagtacggaaaaccattgtaccaactgttaaaagtggggaattcaataaatggtttaattcattatcaactaaacaattagatgaactctggagtgacaaaaaaattagaagagccatagaaaggcagctccgagctccgggaggaatgcatgagtggcatctggtttcacgagccccaacttttaaacactggggagtaacggctgaacaaattagagagctacgaacggcaataaatgaagtggaatttgttaacccgactggaaagcacggtggactaggctctactgctgctcacaacgagctaataaagattatagattcatccaaagattataatatgtttgtacgaaggttaaacaattgggccaattacagactaaaaggtggagttgaagctttacctgaggggctaaggataaaaaaatag

SEQ ID NO: 3460 - DNA, 1110 bp, Bacillus licheniformis
ttggttgttaaaatacgatccgaaaaggtcgggaatatgttgaatcaatggtatgcaacaattaagttacagcaagttcataaagcaactcaaatgaagaaagaaattcagaaggctattgataatatggagaagaatcaagatgttttgctttatttcaatatgatagattctcggtataaattattgatcgaaaaatataacgaatccggaagcatcttaaaaagtcttaagtatagagctgaagaaaagaagacggacgacatgcttcagtattacttttactttttcagcgggctgtatcagttttacataaagaactttacgaaagccattaatttttatcgcattgctgaaaattggataaataaaataccagacgaagcagaacgagcagaattcaattatcaaattgctattgcatattatgaaattcaccaaaattttttctcgttaacacacgcagaaaaagcgctcgaaagctttttagcccttggaaattatgaaaatagggcagcaaccactcaattgataattgcggcaaacagactggatctacatcaatacgaattaactgagtccgtatataaaaaagcaataaaaatggctgctgatacccgacaaaattacgttgagggactcggacatcacaatctcggtcttgcttacgaacgacaagaaaaactcgatttagcgcgtgaatccttcgaaatagctctcgacatttttgaaaatctacattccaaaatcgcaatcatcagaacttcttatatgctggcaagggttttattcaagaaaggtttattcgaagaagggacacattggtatcaaaaagccctcaatctcgcaaaagaaataaacgaaaaaacgtacgaagccaagttattagtcatacactcaatatataaagagttggataagaccttattagataaaggattgaatatgctaagagacaaaaagctttggtcagacgtagcagatttagctatcattgcagcaagacacttcaaaaagaaggaatatcatgaattagcggcgaaatacttcgatgaaggagtagtcgctcgcgacaaaattcaaacatggacggaggaacttgtctcatga

SEQ ID NO: 3461 - DNA, 132 bp, Bacillus licheniformis
atgaaaaaattacttttaggtgcagtaataacaggtgtatttttaactggtattttaaactttactactcaaggaaaagctgaattcggtactggagactttaaagttgctgaaaatgcgttttttggttaa

SEQ ID NO: 3462 - DNA, 249 bp, Bacillus licheniformis
atgaataaccttttcctgcagctcagggatcagcactctttaaatgaattgaaagtttgtcagatggacagggcgcttaaacaaagccttgatggtgatgaattaaagatcataaaggccaagtatctctctccccaaaaaataaaggacattgagatttatatggagatggggttgaaaaaggacaaatgctatcaggtcaaacggcgggccatttacaatcttgcgacagctctcgggataatctga

SEQ ID NO: 3463 - DNA, 147 bp, Bacillus licheniformis
ttgacgaaaaagaaaccgattttcacaatcgacgaagatttttccgatttgactacggcgcagaagcctccggtaaatacgccgaaaaagcgagtgagggatcgaattaccatcgaaatgaaattatttgagagaaacaacaattaa

SEQ ID NO: 3464 - DNA, 522 bp, Bacillus licheniformis
atgaaggttctgattgtcagcgacagccacggccttgaagacgaactggaaatgatcgctgagcggcacgggaaggaaacagatctcatcatccattgcggggattctgaattggacccttcccatcccgcgctttcctcttacttaacggtaaaaggaaactgcgatttttacggggagttcaaagacgaaatcgtcgttcccgccggatcgagaaagctttttttcacacacgggcatttatacggcattaaacagtcgcttttaaatgtgtactaccgggctgaagagctcggcgccgatatcatctgtttcggccattcccacatcgcgggaagcgagctgatggacggaaaactgctgatcaaccccggcagcatccgccttccgcgggtgcggaaagaaaaaacttatgctatactaaacattgacaaagacaatgcaacggttcgctattatgacttggacggccgggaagtcgaaagcctgacgaaccatgtacaattgccagcacattcatga

SEQ ID NO: 3465 - DNA, 591 bp, Bacillus licheniformis
atgaaggaagtcatcattgccacgaaaaacgaagggaaagtcagggaattcaaagcgatgcttgaaccgaggggctacgatgtcaaatctttactggacatcggctatacacccgaaatcgaagaaaccgggcagacttttgaagaaaacgctgtgattaaagcggaaacaatttcgaaagaaaccggaaaaatcgtgattgccgacgactccggcctgtctgtcgactatctcggcggcagccccggcgtatactcggcccgctatgcaggagaagagaaaaacgatctcgccaatctgaaaaagctattgaaagagctcgaaggggtggaaaaagaagaccgttccgcgaggttcagatgcgcgctcgcaatatgcattcccggacaggaaacgaaaacggtcgaaggttctgtggaagggtacattaccgaagagccgcgcggcacaaacggcttcggctacgacccggtttttctcgtcaaagacaaagatcaaacgatggccgagctctcaagcggcgaaaagaacaaaatcagccacagagcggaagcgctgaaaaagctgtccgctttattggatcaagcgtaa

SEQ ID NO: 3466 - DNA, 741 bp, Bacillus licheniformis
atgagatacgatggaagaaaaaacaatgaactgcgccctgtcacaatggacctcgactttattacgcatccggaaggatcggtcctgattacagtcggcgggacaaaggtgatatgcaacgcgtctgtggaagaccgcgtaccgccctttttgagaggagaagggaagggctggatcaccgcggaatacagcatgctgccgcgggccacgaaccaaaggacgatcagggaatcgtcaaaagggaaaatctccgggcggacgatggaaatccaacggctgatcggaagagctcttcgggcggttgttgatttggaaaagctcggtgagcggacgatctggatcgactgcgacgtcattcaggcggacggaggtacgagaactgcgtcgattaccggagcattcaccgccatggcgcttgccgtcggaagactcgtcgaaaaaggcgcgctgaaggagatgccgatcaccgactttttggctgccacttcagtgggcatcgataaggaaaaaggattgatccttgatttgaactaccaggaagattctgcagctgaggttgatatgaacgtcgtcatcacaggcgaaggccgctttgtcgaacttcagggaacaggagaggaagcgacattctcaagaagtgaactggacgggcttttagagctggctgaaaaagggatcgccgaactcatcgaaaagcagaaagaagtgctcggcgacgttgcattatctattcaacaataa

SEQ ID NO: 3467 - DNA, 1110 bp, Bacillus licheniformis
atgctgaaaaaaggaatgaaaggaatcgcggttacggttacggcctccgcgctgcttctttccgggtgcggaatatttcagtcagatcaagcctcagaggagatagatccgccgcaggacatcacatatgtaaaagaggagaaggagcaagacaaaacagacaaaaccaaagataaaacagaagacaaaggcagcaaaacgacaagcgacgataaagccgctcaaacgggcgatacggtcatgagagagctttatctcattgataagaacggctatgtgacagcgcagacgctgccgctgccaaagcaggaagggacggctaaacaagcgcttgaatacctcgttgaaggcggccctgtttcaaacatcctgccaaacggattcagagccgtgctgccggcggatacaacggtcaatgttgatattaaagaagacggaacagcgatcgctgatttctcaaatgaatttaaaaactataaagctgaagatgagcaaaaaatcgtacaggcgattacatggacgttaacgcagtttaactcgattgataaagtgaagctccgcatgaacggccatgatttgaaagaaatgcctgttaacggcacgccgatttcagaagaactcagccgcgaggacggcattaacctcgacacggcgggtgtgacagatataacggcgacacagccggtcaccgtctattatttggctgaatcagataaaggcacatattacgttccggtgacaaagcggacgtctgcaaaagaaaaagatcaggtgacggcggcgattaaagagctgactgaaggaccggacaataaaagcggcctgctctccgatttccagggcgacgtcaagcttgaaaacaagccgaagattgaagacggccatgtaaccctcgactttaacgaagcgatctacggaagtgccgacggccagaaaaaagtgatatcggatgaagtgttaaacagtatcgtgttgacattaaccgaactgcctgatgtgaaaagtgtgtcggttaccgtgaacggaaaatccgagctcgtgaatgaaaaaggagaaaagctttccaagccggtttcaagaccgagcaaggtgaacacaggtagtttttaa

SEQ ID NO: 3468 - DNA, 816 bp, Bacillus licheniformis
ttggatcaaccgataggagtcattgattcgggagtcggcggtttaaccgttgcaaaagaaatcatgaggcagctgccgaaagaaaaaattatatatcttggagacacgaaaaggtgtccatacggaccgagggacagaaaagaagtcctgtcatatacatgggaaatgacaaattatctgttatcccgccaccatattaaaatgctcgtgatcgcctgcaatacagcaacggccatcgcgctagaggaaatcagcagggaagttgcgatacccgtcatcggcgtggtgcagcccggagccagaaccgcgattaaagtgacggaaaaccagcgaatcggcgtaatcggaacggaaaacacgatcaaaagcggcgcatacgaagaagcgcttctttcgctgaacggagatttaacggtggaaaatctggcttgcccaatgtttgtcccgtttgtggaaagcggcaaatttttggatgagacggctgatgaaatcgtcaggacgtcactgcacccgctcagagattcatcaatcgatacgctgattctcggatgtacgcattatccgattttaaaagagccgattcagcgctatatgggagagcgcgtcaacatcatttcctccggagatgaaacggccagggaagtcagtacgatcttgtcatacaacggtttattaagcaaaacggcggaaccgccggaacacttgtttttaacaactggggagcgcgcccgcttcacaaaaattgcaaacgattggtttggatacgaagtgaaaaatgtggaaagcatttctcttcaggagaccgctgtaaaataa

SEQ ID NO: 3469 - DNA, 444 bp, Bacillus licheniformis
atgaattcgaatgcttctttgaatcacatagcggacattgaaaaatcactccgccatattgcgggcatcattaaacaaaaaggaagagaaattctcacccaatatacgattacccctccccagtttgtcggtcttcaatggctgtatgaatacggggatatgacgatcggcgagttatcacaaaagatgtacctggcgtgcagcaccacaacggatttaattgaccgaatggagaaaaacaacctcgttgaacgggttaaagatccgtccgacaggcgcgtagtccgcattcatcttctatcggaaggagagcggatcatccaggaggtcattcaaaaaaggcaggactatttagaagacatgttagaggcgttttccgaggaagaaacagccgcgtttgaaaaattattaattaaacttcagcaggaaatgaacagaaaatga

SEQ ID NO: 3470 - DNA, 225 bp, Bacillus licheniformis
ttgaaggagaaagagtttcaatcaaagccgctgctaacaaaaagagaaagagaagtgttcgaattgctcgttcaagacaagacaacaaaggaaatcgcaagcgagctctttataagtgaaaagactgtacgtaatcacatttccaatgcaatgcaaaaattgggagtgaaaggccgttcgcaagctgttgttgaacttcttcgaatgggtgagctagagctctaa

SEQ ID NO: 3471 - DNA, 135 bp, Bacillus licheniformis
atgggtttcgatatagtcgtgatatcatatgaaacatacgcaaggtcggtgacgtttctgacggagaaaaggattccctcaaacacctatttttcaaatcatgacacaggcatcgtttcagggctgaacttctaa

SEQ ID NO: 3472 - DNA, 699 bp, Bacillus licheniformis
atgaaaaaagcgataatcatcggcgcgagttccggaattggcaatgcgcttgccaagcagctgtcagccggaggagtggaggtcggtcttgctgcaagacggtatgagctgctagccaaattgcgcgacgacctccctggaccttcatacattaaaaagatcgatacagccgacagcgaacactcgcctatactgttgaaagaactgcttgatgagatgaatggggcagacgcagtcttcatctgttcaggtgttggatatttggaaagcgaaatggattggagcaaagaaaaggaaacgatcgatgtcaatgtgacgggatttgtgtcctgctcgaacgtgttgatggagcattttatcaaaaacgggagagggcatttagtcggcatttcatccatcgccgcgctgagaggaaacggaggggccgtcacctacgccgcttcaaaagcattcgtttcaaattatttaaaaggactttgtcaaaaagtgaaaaaactcggttgcgatgaaattgcggtcaccgaaattcagcccggcttcgtggacacggctcttgcaaaaggtgatcatctgttttggacggcttcgcccgaaaaagcggctgcacaaatcatcagcgctgtgcagaagaagaagacgcacgcatatattacgaagagatggcggctgatctcctggattttaaaatgtcttccttag

SEQ ID NO: 3473 - DNA, 471 bp, Bacillus licheniformis
ttgaaattgccgggatatatcgaagaaccgtttgacacatggtgtcagtcattttctttttttgatgaagtttccgtccgtttttcagaaacggacatgttcggtcatatgaacaatgtcacaccgtttgtctacttcgaagaagcgaggatttcctatttcaagcacctgggcgtcatggaccgcctttcagacgggaagagcgcggccattcccgtcgtggcgagccagcaatgcgactattttcagcaggtcatgcttcatgaacgtttaaaaatcggcgtcaaaacagcatctgtcggcaacgcctcgctcaccctccattacgcagcgaaaaatggggaaggcggcctttgctttacaggactggcggttatggtgcaaattgcgaaagatacgggtaaacccgtgaaatggacagacgaacaaaaagcaaaactgcttggcaataactcatttcctgagaaataa

SEQ ID NO: 3474 - DNA, 765 bp, Bacillus licheniformis
atgagtgaaaataagacaatcaagtttatcatcactcgtcaggatacatcggattctaatccttaccaggaagagtttgaaattccataccgtccgaatatgaacgtgatttccgctttgatggaaatcagaaggaacccggtgaatgcaaagggagaaaaaacgtcgccgattgcttgggatatgaactgtctcgaggaagtgtgcggcgcttgctccatggtgatcaacggcaagccgagacagtcctgtacagcgctgatcgaccagcttgagcagccgatccgccttgaaccgatgaaaacattcccggttgtccgcgaccttcaagtggatcggagccgcatgtttgattcgttaaagaaagtcaaagcatgggtgccgatcgacggcacatatgatctcggaccgggaccgagaatgcctgaaagaagacgtcagtgggcttatgagctgtcaaaatgcatgacttgcggcgtgtgtcttgaagcttgtccgaacgtgaacgataaaacaaactttatgggacctgcaccgctctcgcaagttcgcttattcaacacccatccgacgggagcgatgaacaaatctgaacggcttgaagcgattatgggagacggcggactggccgaatgcggcaactcgcaaaactgcgtgcagtcgtgtccgaaaggcatcccgctcacaacctcaatcgctgcattaaacagggatacgaccgttcaggcgtttaaaaacttcttcggaagcgacaacacggaataa

SEQ ID NO: 3475 - DNA, 1764 bp, Bacillus licheniformis
atgagcaattcaagcatcatcgttgtcggcggaggactagcgggtctgatggcgaccattaaagctgcggaagcaggaacaaatgtaaaactattttcgatcgttcccgttaagcgctcacattccgtatgtgcgcagggcggaatcaacggagcggtcaatacaaaaggtgaaggagactccccatgggagcattttgacgacacggtgtacggaggcgactttctggcgaaccagccgccggtcaaagcgatgtgtgaagcggcgccgtcgatcattcatttgcttgaccgcatgggcgtcatgtttaacagaacgcctgaagggctgcttgacttccggcgcttcggaggaacccagcatcacagaacggcatatgcgggggcgacgaccggacagcagctcttgtacgcgctggatgagcaggttcgccgcttcgaagttgaagggctcgtttcgaaatatgaaggctgggagtttctcggagccgttcttgatgatgacaatacgtgcaggggcatcgtcgcccaaaacttaacgacgatggaaatcgagtcgttccgttcggacgcagtcatcatggcgaccggggggccgggcatcatcttcggaaaatcgacgaactcgatgatcaataccggatcagccgcttcgatcgtttaccagcagggtgcttactatgcgaacggagagttcatccagatccatccgaccgccattcctggagacgacaagctgcggctgatgagcgaatcggcgcgcggtgaaggcggacgagtctggacgtataaagacggcaagccttggtatttcctcgaagagaaatatccggcatatggaaaccttgtgccgcgtgatattgcgacgcgtgaaatatttgatgtgtgcgtcagacaaaagctcggcatcaacggcgaaaacatggtttatctcgatctttcccacaaagatccgaaggaattggacatcaagctgggcggaatcattgaaatctatgaaaaattcatgggtgacgatccgcgcaagctgccgatgaaaatcttccctgcggttcactactcaatgggcggactttgggtcgactacgatcagatgaccaacattcctggactgtttgccgcgggagaatgcgactattcgatgcacggcggaaaccgcctgggagcgaactcgctcttgtcagccatttacggcggcatggtggcaggtccgaaagccgttgaatacattcaaggtctcgaaacatccgcagaagatctgtcttcttccgttttcgatgcatacgtcaaaaaggaagaagaaaagtgggctgacataatgaaaatggacggcaatgaaaatgcttatgtccttcataaagagctcggcgaatggatgacagacaacgtgacggtcgtgcgctacaatgacaagctgctgaaaacggatgaaaaaatccaagagcttgccgagcgctaccgaaacatcaatatcaacgatacggcaaaatggagcaaccagggcgccgtattcacgcgccagctgcacaacatgctgcaattggcacgggtgatcacgctcggtgcatacaaccggaatgagagccgcggcgcccattataaaccggatttccctgaacgtaatgacgaggaatggctgaaaacaacaatggcgaaacatgcaggcgattttgaagccccgaaattccattatgaggatgtcgatgtttcattaatcgcaccgcgtaaacgggattactcgaagaaaaaggtggcgaaatcatga

SEQ ID NO: 3476 - DNA, 609 bp, Bacillus licheniformis
atggccgggaacagagagtttgtttatcgaagactgcattctttgcttggcgtcataccggtgggcatatttttaatccagcatttggttgtcaaccattttgcggcaagcggagaagaggcgtttaataacgccgctcactttatggaaaacctgccgttcaggtacgctttggaaatcttcgtgattttccttccgctgatttatcatgctgtttatggagtatacatagcttttacagcgaaaaacaatgcgaacagattcggcttttttagaaactggatgttcgttctgcagcggattacaggaatcattaccttgatttttgtcagctggcacgtgtgggaaacacggattgccgcccaaatgggggcagaggtgaactttgacatgatggctgatattttgagctccccgatcatgctcggcttttacattgtaggtgtcctctcaacaatcttccacttttcaaacggtttatggtcgtttgctgtcacttggggaatcactgtttctcctcgctcacagcgaatcgccacgtttgtgacaatgggagtctttgttgtgctgtcctatgtagggctgagagcgattttggcatttgtgtaa

SEQ ID NO: 3477 - DNA, 450 bp, Bacillus licheniformis
ttggatatgaataaatatgaagcaaacttagcgcaattaaaagagctggaagtctccgcatatggctatgagttgatcagggaagtgctgcttcccgatatgctgggacaagactacgcagatatgatgtactgggcgggaaaaaagctcgcccgcaagttcccgcttgaatcccgggaggatcttcccgctttctttcaggatgcaggctggggaacgcttgcgatcgtccattcaaaaaaacaggagcttgagtttgaactcgaaggcccgctggtttcaaaccgcctcaagtatcaaaaggagccctgctttcagcttgaagccgggtttatcgccgagcaaatccagctgatgaacgaacaaattgccgaatcttatgaacaggtgaaaaaaagagccggaaaagtggttttaacggtgaaatgggatttgaaagacccggcataa

SEQ ID NO: 3478 - DNA, 1230 bp, Bacillus licheniformis
atgggtctcatcgtccaaaaatttggcggaacttccgtagggtcagtggaaaaaatattgaatgtcgcataccgcgtcatcgaagaaaaacagcgcggtcatgatgttgtcgtcgtcgtttcggcgatgggcaaatcgacggactccctcgtcgcgcttgccaaggaaatcaccgagcagccgagcagcagggaaatggacatgctgctgacaacaggagagcaggtgacgatttcgctgttgacaatggctttgcagaacaaggggtatgatgcggtttcctatacaggctggcaggccggcatcgaaaccgaaaatattcacggcaacgcaagaattacgaacattgatacagccaagctgaaagagcgcctgaatgaagggaaaatcgccgttgtcgccggattccagggcgtcacagcggaaggcgaaatcacaacgctcggcagagggggatcagatacgacagccgttgatttcgcagcagccctgaaagctgataaatgcgacatttacaccgatgtgccgggggttttcacgacggatccccgctatgtgaaaacagcgcggaagctggccggaatctcctacgatgaaatgctggagcttgccaatcttggagcaggcgtccttcatccgagagctgttgaatttgcgaaaaactaccaggtgcctttggaagtccgttcaagcaccgaaaaagaagccggcacattaatcgaggaggaatcatcaatggaacagaatttaatcgtaagaggcattgcatttgaagatcagatcacacgcgtgaccgtatgcggcctggcgagcggcctgacgacgctgtcaacgatttttacaacgctcgccaaacagaacatcaacgttgacatcatcattcaatcggtgacaggcacaagcaaaacgtcgatttctttctcagtgaaaacggaagacttaaaacggacggttgaagttctcgaagaatacaaagacgcgctcgactatgaacagattgaaacggaaaacaggcttgccaaagtgtcgatcgtcggttctggcatgatctccaacccgggagtagcagcggaaatgttcgctgtgctggcggaaaaaaacatccaggtcaaaatggtcagcacatccgaaatcaaagtttcgactgtcgtcaacgaaggcgatatggtgaaagccgttgaagcgctgcatgatgcttttgaactgtcgaagcagacagcagtcatttaa

SEQ ID NO: 3479 - DNA, 1773 bp, Bacillus licheniformis
atgaacaaaaaaatcaaagaaaagctggcccttcttccggatcagcctggctgctacttgatgaaagacaggcaggataccgtcatctacgtcgggaaagcgaaaatcttaaaaaacagggtccgctcctatttcagcgggtcccatgatgccaaaacacagcgtcttgtcagtgaaattgaagacttcgaatacattgtcacatcctcgaacatcgaagcgctcattcttgaaatgaatttaatcaaaaagtacgacccgaaatataacgtgatgcttaaagatgataaaagctacccgttcattaaaatcacgaacgagcggcatccgaagctggttgtcacaaggaaggtcaaaaaagacaaaggccgctatttcgggccgtaccccaatgtccaggctgcgagggaaacaaaaaagctgctggaccgcctctatccgctcagaaagtgcgccaagctgcctgaccgcgtctgtttgtactatcatctcggacaatgtctggcgccatgcgtatatgatgtgtctgaggagacaaacagacagctcacagaagaaattacccgctttttaaaaggcggctacaatgaagtgaagaaagagcttgaagcaaaaatgctcgaagcctcggaaaacctgcagtttgaacgggcgaaagaattccgcgatcaaattgcccatatcgagtcaacgatggaaaaacagaaaatgatgctgaatgacatggttgaccgcgatgtatttgcctattcgtatgacaagggctggatgtgcgtccaggtattcttcatcaggcagggcaaattgattgaaagagatgtcagcatgtttcctttatacagggaagcagacgaggaatttctgacattcatcgggcaattttactccaaaaacaaccattttcttccgaaggaaattttggtgcctgacagcgtcgacaaggacatgattgaggagcttttggacgtgaacgtgcgccagccgaaaagaggagcgaaaaaagacctgctgctccttgcccataaaaatgcaaagctcgctttgaaggagaagttttcgctcattgaacgggatgaagagcggacgatcggcgcgattgaaaagctcggaaaagcgctggacatctacacgccatacagaattgaagcgtttgataactcaaatattcaaggaacggaccctgtttcggccatggttgtatttctcgatggaaaaccgcataaaaaagagtaccgcaaatataagatcaagacggttgaaggtcctgacgactacggatcaatgcgcgaagtcatcagaagaagatatacaagggtgctgaaagagaatctgccgctgcctgatttaattttgatcgacggcggaaaggggcaggtgtctgccgcccttgacgttctggaaaatgaactgggtctcgatgtccctgttgccggtctggtgaaagacgataagcacagaacatccaaccttttgatcggcgatccccttgagatcgtccagcttgagcggaacagccaggaattttacctgcttcagcgcattcaggacgaagtgcacaggtttgcgatcagcttccacaggcagctcaggggaaaaagcgcatttcaatcggtgctggacggcataccgggcgtcggcgaacagcggaaaaaactgctgttaaaacatttcggttccgttaagaaaatgaaggaagcgagcgccgaagatatccgcaagctcggcatacctctgaaaacggcgcagctgatcgaagaggcattgaaaaaataa

SEQ ID NO: 3480 - DNA, 315 bp, Bacillus licheniformis
atggctatcgtaaaagcaactgatcaaacattctcatctgaaacaagcgaaggcgtagttcttgccgacttttgggctccttggtgcggaccttgtaaaatgatcgcgccggtacttgaagagcttgatcaagaaatgggagacaaactgaaaatcgtaaaaatcgatgttgacgaaaaccaagaaactgccggcaaatacggcgtgatgagcatcccgactctcctcgtactaaaagacggcgaagtggtcgaaacatctgtcggctttaaaccgaaagaagcgcttgaagaactggtcaacaaacatttgtaa

SEQ ID NO: 3481 - DNA, 978 bp, Bacillus licheniformis
atgagcaaaaaagttatcgtattgggagagttcagagacggttcgttgaggaatgtgactttcgaagcgatagccgcaggaaaaacggttgccgaagggggagaggtgatcggcgtactgttcggtgaaagcgtttcaagtcatgcggcagaactgatccattacggcgctgacagagtgcttacagccgaaaacccgctcttgaaaaactatacgtctgacggctatgttcaagccttgttgccgatcatagaacgcgagaatccggacgtcatcattttcggacatacgtcaatgggaaaagacttgtcgccgaagctttcagcccgtatgggaacagggctgatatcggatgccgtcgatgtcgaagtggccggcggcaacatcgtgtttacaaggccgatttactcgggcaaagcgtttgaacggatcatttccgaagatgaaacgatttttgcaacgatcagaccgaataatatcgccccgcttgacaaagatgagacgcggacaggagcggtcgaaagcatcgaagcagatattcgggacatcagaacggtcatcaaggacattgtcaaaaaaacgtccgaaggcgtcgatttgtctgaagcgaaaattatcgtagccggcggtcgcggcgtcaaaagcgaggaaggctttaaaccgctgcaggagctcgccgatgtattgggcggggcggtcggcgcttcaaggggagcctgtgacgcagactactgcgactattcgcttcaaatcggccagaccggcaaagttgtgacacctgacttatatattgcctgcggcatttcaggagcgattcagcacctcgcagggatgtcaaacagcaaaatcatcgttgccatcaacaaagatccggaagctgatatatttaaaattgccgactacgggatcgtcggcgacttatttgaaatcgttccgctgctcacggaggaatttaaaaagctgagcgtcagcacatga

SEQ ID NO: 3482 - DNA, 774 bp, Bacillus licheniformis
atgaacatttatgtcttaatgaagcgcacgtttgatacagaggagaaaattcagatcgaacaaggggaaatcaacacggacggagcggaattcatcatcaatccgtacgatgagtacgccattgaagaagcgctccagttgaaagagaagcacggcggtgaaattacggtcgtgacagtcggcgaggaagaagctgaaaaagaactcaggacggctctggcgatggggtgcgacaaagccgttctgatcaacattgaagacgacgtggaagaagcggaccaatatacggcttcagccatcctttacaactatttgaaagaccgcgagtacgacattatactcggcgggaatgtggcgatcgacgggggatcgggacaggttgcgcctcgtttggccgaactgctgggcattccttgtattacgacgattacaaagctgacggtaaacggcggagatgttgaagcggaacgcgacgccgagggcgatcttgaagtgatccaaacatcgcttccaatcgtagcgactgcacagcaggggttgaacgagccgcgttatccgtctcttccgggaatcatgaaggcaaagaaaaagcctctcgaggagcttgagcttgatgatctcgacatcgacgaagaagacgtggctgcgaaaacaaaaacgatcgaacggttcctgcctccgaaaaaagaagccgggaaaatccttgaaggggagccggagcagcaggcggcagaacttgtatcactgctgagaagcgaagcaaaggtcgtatga

SEQ ID NO: 3483 - DNA, 777 bp, Bacillus licheniformis
atggcagcattatcatacgccgtagacggccatgttgcgacgattacgattcagcacccgccggcaaatgcgctatcgacgcaagtgcttgaagatctttctgcatgccttgatgaactttcagaacgtcaggatgtcagaagcgtcgttattcacggggaaggaagatttttctcggcaggcgctgatattaaagagtttacatcattgatggacgggtctgattatgcaaatttggctgataagggccagcagattttcgaaaaagtagaatcttttccaaaaccggtgatcgccgcgattcacggggccgctcttggaggcggtcttgagctagcgatggcatgccacatccggattgccgaggaaagcgcaaagctcggccttcccgaactgaatctcggaatcattcccggctttgcgggaacgcagcgccttcccaagtatgtgggcaccgccaaagcgcttgaaatgatcgggacatcagagccgatatccggcaaggaagcttttgaatacggtcttgtcacgattttggcggcgaatgaagaagaagtgctgcaaaaggcaaaagagctcgcacaaaaattcgctgaaaaaagtccgcagacgatggcttatgtcattgaactcctgaattcgagcaaagtgtattcgtatgaaggaggcctcaagctagaagggaaatacttcggcgaagtgttccaatccgaggatgcgaaggaagggattcaggcatttcttgaaaagcggaagccgcattttaaagggaaataa

SEQ ID NO: 3484 - DNA, 603 bp, Bacillus licheniformis
ttgaaacaaaagagaccaaagtatatgcagattatcgacgcagctgtcattgtgattgcagaaaacggataccatcaggcgcaggtttcaaaaatcgccaagcaggccggggtggcggacggcaccatttatctttattttaaaaacaaagaagacattctcatctcattattcaaagagaaaatgggacagtttatcgagcagatgagcgaagaaatgacagcgaaaaattcggcgacagaaaagctttcgctgttcatcaaaaagcactttgaactgctcagcagcgatcgccacctcgcgattgtcacccagcttgagctgaggcagtcgaatcttgagctgaggctgaaaatcaatgagattctcaaagggtacttaacgatcctggaagacatcatcaccgaaggaaaagaagctggagaatttaaaagcacgcttgacgtccgccttgcgaagcagatgattttcggtacggtggatgagacggttacaacctgggtgatgaatgatcaaaaatacgatctcccaaacctggcagacagcattcatgaattgctgatccacgggttcagcagccaaaagacgaaggaggaggaataa

SEQ ID NO: 3485 - DNA, 1680 bp, Bacillus licheniformis
atgccgactgaaaaaccgtggctgcgtcattatcccgaacaaattcctcacgagctgcaatttgaagatcaaacactccattccatcctgcaacaatccgcccagcagttttcagaaaaaacagcgattcattttctaggaaaaaaacgttcgtaccgggaagtttacgaggatgctttaaaaatggcagattacctgctgtcgctcggcattcaaaaaggagacagagtatcgatcatgctgccgaactgcccgcaggcggttatcgcgtattacggcgttcttttctccggcggcatcgtcgtccagacaaatccgctgtatacggaaagggagcttgaacatctgcttcatgacagcggggcaaccatcatcattacgctcgacatgctgtacccggcggcatataaaatgaaagcgctaacaagcattaggcacatcattgcgacaagcataaaagattacctgcctttccctaaaaatctgctgtacccgatcgttcaaaaaaaagagaatcaaatgtccgttgagatcaatgaaaatgagacgacccaccttttccgcaccatcatgaaacgccccgttccaagcggaccgcccggtattgaaattgatccggcccacgacattgccgtcctgcagtataccggaggaacgacaggcacgccaaaaggcgtcatgctcagccaccgcaacatactagccaacatggagatgtgcgccgcctggttttatcaattgaataaaggggaggagaaggtgctggggatcgttccgttttttcacgtctacggaatgacggccgtcttgaatttcacgatcaggcaggggtatgaaatgatcctgctgccgagatttgacgcgcgcgcagcgctgaaaacgatcgataaagaaaagccgacgatatttccgggggcgccgacgatttatatcgccctgttgaaccatcccgaccttcaccaatacgatctgtcatcgattaagagctgtttgagcggatctgcggcgcttcctgttgaagtcaaacagcagtttgaaaaggtgacgggcggaaggcttgtcgaaggttatggaatgtctgaaacgtcgccggtcactcacgccaattttatttgggatttgaataaagcgggcagtatcgggtgtccttggcctggtacagacgctgctatctattcggaagaaaccggcggttttctcgggccttatgagcatggagaaatcgctgtcaaaggaccgcaggtgatgaaaggctactggaacaatgatgaagaaaccgctcagagtctaagggacggctggttttttaccggagacatcggctacatggataaagacggcttcttttatatcgtcgaccgcaaaaaagacgtgatcattgccgggggatacaacatctacccgcgcgaaatcgaagaagtgctctacgagcatgaagccgttcaggaggcggtcgttgccggcatccctgatgaatacaggggggaaacggttaaggcttttgttgtgctgaaagatcatgttacaataacggagaaggaattggacgaatatgccagatcgcgtctcgctccttataaagtgccaaaagtatacgagttcagggacgaacttccgaaaacggcggtcggaaagattttaagaagagcgctcgttcaagaggaaaagaccggcgtctga

SEQ ID NO: 3486 - DNA, 83 bp, Bacillus licheniformis
atggagaaattagcgaaagtcctgttttttacagctggggtatttgtggttatcggcctgatttatatgatcttttatgcttg

SEQ ID NO: 3487 - DNA, 405 bp, Bacillus licheniformis
atgaaagagttttgggagaacaaccttgtggaaatcgccgcgtactacagtgtttccgttttgtgtcttgtgatatttttatctgtgtttgaactcgtcaccacgtataaaaattgggaggagattcaaaaaggaaacatggcggttgcgatggcaacaggcggaaaaattttaggcatcgccaacgtgctgcaaaaatcgatcagccagcataattccctgctgcaaatgatggggtgggggctgttcggttttatcctgcttttgatcggctacttcatttttgaatttctgacgccgcgctttaaaattgacaaggagattgaaaacgacaaccgcgcagtcggcttcatttcattcgtcatttcagtaggcctgtcatttgtcgtggcttcgggtatctaa

SEQ ID NO: 3488 - DNA, 2358 bp, Bacillus licheniformis
ttgcagcaaaaagcgctatcagcacttgaatttcataaagtaaaagaacagctcacagagcatgcggcatcttctttggggaaggaaatgcttttggaactcaaaccttcccgttcgctcgaagaagttaaaaagctgcaggaagaagtcgatgaagcaggaaccgtcctgcgtttaaaaggaagcgcccctttcggcggccttacggacattagaaaagcgttaagaagggcagaaatcggcagcattttaagcccggcggaattgactgaaatatcgggtctgctatacgcagcaaaacagatgaagcactttcttgaaggcctgttcgaagacggggttgagattccttatcttcatcaatatgcagaaaagctcataccgctttccgaattggaaagggacatcaattcgtgcatcgatgatcatggggaagtgcttgatcatgcatcagagacgttaaggggaatcaggacccagctgcggacgcttgaatcaagaatcagggaccggctggaatcgatgctgcgttcttcatctgcgcaaaaaatgctgtcggatacgatcatcacgattcgcaacgaccgcttcgtcatccctgtcaaacaggagtacagatcaagctacggaggaatcgtgcacgatcagtcttcttccggtgcgacattgtttatcgagcctcaggcgattgtcgatatgaacaatgcgcttcgccaggcaaaagtaaacgaaaaacaggagattgaacggattttgcgcgtcctgacagaaaagacggcagagcacacaaatgagctctttcacgatgtcaaagtgcttcagacgctggactttatttttgcaaaagcaaaatatgcaaaagcgacaaaagcggttaaaccggctgtcaacgctgacggctatgtccgcctgattcaagcccgccacccgcttttgcccctggatgaggtcgttccgaatgatattgagctcggcggagagtatacgacaattgtcatcacgggcccgaacacgggggggaaaacggtgacgctcaaaacgctcgggcttttgaccatgatggcgcagtcgggattgcacgtaccggcggaagaaggatcagagaccgccgtatttgatcaagtatttgccgatatcggcgatgaacagtcaatcgaacaaagcttaagtacgttctcgtcgcatatggtcaacatcgtcgatattttgaaagacatgacggaaaacagccttgtgctttttgacgagctcggtgccggaacagacccgcaggaaggcgcggcccttgcgatcagcatccttgatgaggtgtgccagacaggcgcacgcgtcattgccacgacccattacccggagctgaaggcatacggctacaatcgcgaaaatgtcattaatgcaagcgtcgaatttgatatcgatacactatcaccgacatacaagcttttaattggagtgcccggccgaagcaatgcgttcgaaatctcgaagcgcctcgggctgcctgattacctgatcggccgcgcaaaagcggagatgacggccgaacataatgaagttgatacgatgatcgcatcgctggaagacagcaaaaagcgcgcagaagcggagctcaaggagaccgaagccatccgcgcggaagctgaagcccttcaccgcgacctgcagcagcagatcagcgaatggcaggagaaaaaagacaagctctacgaagaagcggagcaaaaagcggctgaaaaagtcaaagcagcgatgaaagaagcagacgacatcatccagtcgctccgcatgatcaaagaagaccataaagcatttaaagaccatgagctgatcgaggcgaaaaagcgccttgaagaagccgtgccttcgtttgaaaaagcgaaaaagccggctcagaaaaaaacggacaagcgcgaattaaaaccgggcgatgaagtcaaagttttaacctttggccaaaaagggacgctgctcgaaaaaacgggtgcggccgaatggaatgtgcaaatcggcatcctgaaaatgaaggtcaaggaaaaggatctggaattcctgaaatcggcacccgaacccgagaaacaaaaaacgatcgccgccgtcaaagggaaagattatcacgtctcgctcgaactcgaccttaggggggagcggtttgaaaatgcgcttcaccgggttgaaaaatacttggatgatgcggtgcttgcgggctatccgagagtctcgatcattcacggaaaaggaaccggcgccctccgaaaaggcgtccaggacctattgaaatcccaccgcaatgtgaaaaactcccggttcggcgaagcgggagagggaggatcaggagtcaccattgtcgaattaaaataa

SEQ ID NO: 3489 - DNA, 1716 bp, Bacillus licheniformis
atgcataaaaaagatatcatcaaattgcttgaaacgattgcgatatatatggaactaaaaggggacaacccgtttaaaatctccgctttcagaaaggctgcggcagctcttgaacaagacgaccggagcctctcggaaatcgatgatatgacgtccctgtccgggatcggcaaaggcacatacgctgtcatcaaggaatatatggacacgggagcatccggaacgctggaacgattaaaggaagaggttccggaaggacttgtcccgcttttgaagcttccgggtctcggcggcaaaaaaatcgccaagctgtatcaggagctcggcgtctgtgatgcggcatctttaaaagaggcctgcgaacagcaaaaggttcaggggcttgccggattcggcaaaaagacggaggaaaaaatcctgcaggctttgggtgaagcgggaaaacgccctgaacggtacccgatcgcggtcgctttggccgtcgctgacatcatcgaagagcagcttgaagggctcccgggcctcattaagttttcacgggccggaagcctgcgccgcgccaaagaaacggtgaaagacctcgattacattatggctgtcactgatccggaacttgtccgggaagggctcttaaagctttcgaacatcaaggaggtcattgccgcaggagatacgaaagtgtctctcacatttgcgtttgaatacgaaatcagtgcggatttccggctggtgacagaggaacagttcccaacgacgcttcatcattttaccggatcaaaagaccacaatatcaaaatgcgccagcttgccaaagaaaaaggcgaaagaatcagtgaatacggcgtcgaaaccgttgaaactggagaaattaaaactttctcaagcgaaaaagagtttttcgcccatttcgggcttccgtttattccgcccgaactgcgggagacaggaagagaagtcgaggactacagcgttgacatcggactcgtttccgccgaggatattcaaggagaccttcacatgcactcggcttggagcgacggtgctttttcgatcagggaaatggcggaagcatgcatggcaaaagggtaccgctatatggcgatcacagaccattcccaatatttaaaagtcgcaggcggtttgacgcctgagcgccttcgcatgcaggcgaaggaaattgatgaactgaataaggaatttaccgattttcatatttttaaaggcgtggaaatggacatcctgcctgacggaacactggattatgacgacgagctgctggcggaaatggatcttgtcattgcttccatccattcaagcttttcacagccgcagcatgtcatcatgaagcggcttgaaaccgcgctgctgaatcagcacgttgacattatcgctcatccgaccggccgtctgatcggaagaagggcggggtatgaagtcgatattgaccagctgatcgaacttgcgaaaaaaacgaatacagcattggagctgaacgcaaatccagcgcggctcgatctcagaatggagcacttgatcaaagcgaatgctgccggagtgacactcgttattaatacggatgcccacaacacagcgatgcttgatgatatgaaaacgggcgttacggcagcgagaaaaggatggacgccaaaggccaatgtattaaacacccgctcctttgaagaagtccaggcatttttgtcgcgccatcgatcttaa

SEQ ID NO: 3490 - DNA, 537 bp, Bacillus licheniformis
atgttagatatcatcattatcattttgcttttgtccggtttgtttattggactcaaaagagggtttatccgccagtttatccgtttggttacgtttatcgcagcgatcgctgtggccgcaacctattacggcgaccttgcgcctaagctcggctggattccgtctcccgactttacgggcggccaggctgcgctggcgtttgtaaacggaagccttgaaggcgcttattacaatatgattgcgtttttgattctctttatcctgacgattatccttttgagagttgccgcatcgtttttggatgccgtcgcaagcataccggttctcaaacagatcaaccaaatactcggagccgtgctcggttttgcggaaatctatctgttcgtgtttgtcgttctgttcatcggaacgcttctgccgattgatgtcctgcaaagcatgatggccggttcagtcatggctgatttgatcattcataaaacaccgtttttatcaaacatgttaaacaatctgctgcatcagtacggatctttgtaa

SEQ ID NO: 3491 - DNA, 259 bp, Bacillus licheniformis
ttgtctgatggtcaaaaaacgaaaacaacagttgacatctacggtcagcaattcacaattgtcggcgatgagagcaagagccatatgaggcacgttgcctcgattgtggatgataaaatgagagaaatcaaacgaaaaaaatccgtatcttgatataaataaactggccgttttgacggctgtaaatgtggttcacgattatttgaagcttaaggaagagcttgagagattaaaaggacaaataaaagaaaaggattga

SEQ ID NO: 3492 - DNA, 942 bp, Bacillus licheniformis
gtgtcacattctgttttaaaagttcccccgtctgttattgaacggatgcaaagccactacgggcctgacattacttcactttccgtacagggcgcagttttccaagccaaaccccaagggtgcaccattacagcataccggtcggggaaggtgctgttccaaggaaaaaacgcggaaaaggaagcggagcgctggacggcggatgctgaaacaccggctcccaaaaagcccgcatcgaaaaaaagcatcccgtccgtctatcagccgcctgaaggcatcggttccatgtctgtgatcggctccgatgaagtcgggacaggcgattatttcggcccgatcaccgtcgcgtgcgtatacgctgacaaggcgaagcttccgctgttaaaagaactcggtgttaaagactcgaaaaacttaaaagatccgcaaatcgttcagatcgcgcgcgacttaatcaagacagtcccttacagcctgctcgttttaagaaacgaaaagtataatgaaatgcaggaaaaagggatgagccaaggaaaaatgaaagctcttctccacaaccaggcgatcggcaaccttctcaaaaaattggacggaacccggcctgaagcgattttaatcgaccagttcgccgaaccggccgtatacttcaagcatctggcaggcaaaaccgccgtcaaagaacgtacatatttcagcacaaaagcggaaggcatccatctttcagttgcagcagcctcgatcattgcacgctattcatttttaatggaaatggataagctgtcaaaacaagccggcattacgcttccgaaaggagcgggcccgctcgtcgatgaagccggcgccaagctgatcaagaaacacggcgaagacgcattgcgggtattcacaaagctgcattttgccaatacgcagaaggcgaagcggattgcgtcgaaacggtaa

SEQ ID NO: 3493 - DNA, 165 bp, Bacillus licheniformis
atggcttttgaatgtgtactcctttgtttctggatacttctaagatataaggcggggatttggatgaagaaatcaggttcatttggcattcttttaattatttcagctctcataatatcaatgtattttatgttaaatacaaaggctttgatcttcaggatatga

SEQ ID NO: 3494 - DNA, 804 bp, Bacillus licheniformis
atgtcaaaaataaaatggatcatcacgctcaccatatgcacagctctggcattttctctctttattttcttcaacaaggcgaactttacagaggccagcgaaaataaagaaaccgggcttttctttgcccgaaactacatcagccatatgatggaaaacgagacgatgtcgtttaacattttcggcctgcaaaaagcaaacgccggcgttcctctaagcggtgagacggttacgtcgctcgcttttgataacaatcatatacaaatcagcgattacaaggttgaaacagggattcgccataaaggctatacgctcgtcaacatcatcgtagatgtccgggtctcaagcgataaaccggaaaaagcggatcagctgctgatatcttttaacggacgtgataaagaagcatttcaaatcggaaagatcacccttcaaaaccatcacaatgttcgaagcggcgatctgtcgcctgccggtcaatatactgcaggatatccaaaaccgtccttggacgttcggctgaaaaacaatctcgcaaaagatatttcccttgaaaagatcaccgatctaaacggcgtcatggcgtatacatttgacaaggggaccgccattcaagcgaaacaaagcaaacacatcgtcgtcccgtcttttcatatgacaggcgaatatgatttttatacggtcacccctgttttacgttatactgcagcagggaagcggaatcaatacagcatgcccggtgtactgtacggagctttagactccgatgaagagaaaatcgaacggatgctgaagcgtcaatag

SEQ ID NO: 3495 - DNA, 141 bp, Bacillus licheniformis
atgactcaattctcaagaattctggaaaaaggcatttatagcccgcatattaaaatcctagccaaggaagaagtgacaaaagttcacgaccaagtgctgaaggcacttgaggatacgtatcaggctgtattgagaggataa

SEQ ID NO: 3496 - DNA, 297 bp, Bacillus licheniformis
atgacaatttctaaaaaacaacgcatcaacgcttctttagccttaggtctactttttacacttacatttttcacaatgttatacgcaacaacagcaccagttttaccgattgcagacctagcagcaacctatcctcagattccgggatgggctcttacttcaattagtgccatcttaaatgctgctggcactgttggagcaattgcagcggttctagggacttttggactcggagcgattgcatccctagttttttcctatgcaaaaaaatacggaattagatatgctatcgcttac

SEQ ID NO: 3497 - DNA, 1443 bp, Bacillus licheniformis
atgaataataaatacttaatttattcaaaaattcttttaaccaacgacattcgaaaatttaatactaaaagcaaatggcttgcattattcgtattgatattgtcattcgttgttttccctttaataattggcagctttgctgggtacatcattaaaaatctagtcatcattcatctttctttttttctgtttatccttactgtaaatattgataaaagtattttcagagttatgttttcctctgacaaaaaacaaatggccattctgggaatcaaattagatcaatttatattaggaaaagatattagtaaattttatagttcatttttatctttaatatctttttatgttggttcatcgattgtatattatctcattcatcagtctttggaagaagtcttcgcgattgctgtgattggtttattgtccgctatactaggatatttgcttagacttcattttataaggctattagtattgcctaaattcataaatgtctcaagcattattggctttttcacaaatggaattttaattctttggatcttttttatactcaaatataatttgttatttctaaacatcaataatatgcgaattttttcaatatctataccaataatggtatctttaacaatcctgttaattatagtgtggtataaaagtttaagaaacctttccatttttaatgatcatttaaatagcaagactgatacaaatttgaagaagtctagagagagcagaagccttctatattacgagctgatccttctatataggaacccgcctgtaaggtggtcggttttattatttattttaagtttatcagcaggtttactaacaatcattttgtatggttttaacactgatcgatttgcagacactggaatttccaacgaattcagctttatgttcagcgtgctgttcccgttagtctttatctctatcatgattcaatcattggtttcttttgatattgatggtcttattatacctttgaatcagcacaagccaaactttattaaaaacaaaataaaagcaaaaaccaaaatctctgtcttagcacatgtgttatttgttttaatctatgctgcgatttcaaatttttatataaaaccggatcattttattgcattatccattatcttattgatgatagctgttactttggggttaagctgtctcacttcaactatattgtttccatattttaaatgggattacatttatcaagttcccagtactttaagcaaaatctttcttaatttagtatttggattactaatagggttagccattgtttcaacttacaacaaagttttgtatgttgttatttttatcactttgttatgtatcataacgctactgcactccataaacaagcaaatatggaaatcaacaatcaacaaaaattacatatcaataaaatctttattcgagtga

SEQ ID NO: 3498 - DNA, 693 bp, Bacillus licheniformis
atgcttaaactgcaaaatatatcaaaagaatatcctcaatccaattttagcatgaagaatttagaattcgcttgcgggcgaaatcagattattggattgctcggtaaaaacggagcaggaaaaacgaccctattagaaattattgcaggcctcattcctccggatagcggtgaggtagtcgttgatggacatcttaccaattatttagagaaaatcggatacctagaagacgatccaaaattatttgagaatttaacgtgttatgaattaatcaagtaccaatctttattaattgaaaaaccattatcccaagaacaaatcattgaaaccttagacatgttcagtctaaaagaacaaaaagaccaaatggcatcttcgctatcaagaggaatgcgtcaaagaatgtcttttattctttccactttgcatcaacctgatgttatcttgcttgatgagccttttacaggacttgatccaaaaaacatggcggatatgaaaaagattttaattaatattagaaatcaaaatagaattattattttatccacgcatatcttacagtttgcagcagatctttgtgatgagatattatttattaataacggaaatattatccacactgaaaaaaaattagccggggagacatttaatgaagccagccttgaaaaaaaattccttgaatacctatgctaa

SEQ ID NO: 3499 - DNA, 239 bp, Bacillus licheniformis
gtgtttttaaacggttatttctcaggggcaattttcttttcatatgagaagtctttaggtttttggaaatcactacaatatctcttatttcacggcccctttgaaatccttgcccttcttgctttttatgtaatatcttctgatatttcttcccgttttttaagatttctaaaaaagtctgaaataaacctaatgattaagccgaaagtaaaagagtcacaatatatgatagtgcagta

SEQ ID NO: 3500 - DNA, 549 bp, Bacillus licheniformis
atgaagaagactaaattcaacttaatatgtatttgtctattatctggagctgcagccttatgtgtttccattttaaaaatgaatgagatcgatgctagcttacatgaattaaacgaagatgaatatggaaatcttattactatcagtaaatggattggcattacaatagcagtaattggcgaagcgataaaaccccttcttgagcttttatttttcactttaatcatttggctcgctattatgatttttggagcaaaggattcctttaaaaacattttttcaaaaggtgttctttcctactatttcaatcttgtaggcagtgtcttagttattgtcttttatctatttggcttaaaagatgctgaaagtcttttttctattccttttttaagaaatttaaacattttttctttaatttcgttatttttttggtgctatttatgtctagaaaagaaagaaaactcactaaaaattaaatactctttttcttttttcatattgtttttattttctattgccatatctattttctccgatattcttgcatag

SEQ ID NO: 3501 - DNA, 2415 bp, Bacillus licheniformis
atgtttgtttcatataaatggctgcaagaatacgtgaatttagacgggatgactcccgagattctcgctgaaaagattacaagaagcggaattgaagtggaaggcatcgaatataagggagaaggaattaaaggtgttgtcattggacatgtgctggagcgcgaacagcatccgaacgccgacaaattaaacaaatgcctcgtcgatatcggcgaagaagagcctgtccagatcatctgcggggctccgaatgtggacaaagggcaaaaagttgccgtcgccacggttggcgcggtattgcccggcaattttaaaatcaaaaaggcgaagctccgcggggaagcgtctaacggcatgatctgctctttgcaggagcttggcattcaaggcaagcttgtgccgaaagaatatgcggaaggcatcttcgttttcccgggcgatgctgaaaccggggcggacgcccttcaaagcctggcgctcgacgatgcggttctcgaactgggactgacgccaaaccgcgccgacgccatgaacatgctcggcgttgcctatgaagtggctgcgattctcggccgcgaagtcaagctccctgagacggcttatcaggcaggcgccgaaaaagcggcggactatatttccgtcaaaattgaagatcctgaagccaatcctttatacgcggcgaaaatcattaaagacgtcaaaatcggcccgtcgccgctttggatgcagacgaagctgatcaacgccggcatcagaccgcacaacaatgtcgtcgacgttacgaactttgtgctgctcgaatacggccagccgctccacgcgtttgattatgaccgcttcggctcaaaagaggtcgtcatccgcaaagcgtacgagaacgaaacgataacgacgctcgacgaacaagaaagaacgctgaccactgagcaccttgtcatcacaaacggctctcttccgcaggcagtcgcaggcgtaatgggcggagcggaatcagaagtccgcgaagatactgcgacagtgctgctggaagcggcgtatttcaacggccagaccgttcgcaaagcatcaaaggacctcggtcttcgcagcgaatcaagcgtccgctttgaaaaaggcatcgatcctgcacgggtgcgcctcgctgcagaacgcgcggcagatttgatcagccggtatgccggaggaaccgtcttggaaggtacggtcgaagaaaaccatcttgacatcaaagagaatgtcatccgcctttccgttgataaagtgacgaaggttctcggcatgtccatcagcaaagaagaaatggtcaacatttttgaaaggctcggctttgcagttgaagacgctgaacgtgaactggtcgtgacggttccgtcaagaagaggcgatattgcgattgaagaagatttgatcgaagaggtcgcaagactgtacggatatgacaacattccgtcgacactgccggaagtaacaggctttgcgggcggactgacgccttatcaggacaagcgcagaaaagtaagacgcttcctggaaggagcagggctttcccaggcgatcacatactcattaacaaacgataaaaaagcgacggcttatgcattggaaaaatcgtttaaaacgatcctttcactgccgatgagcgaggaaagaagcgtgctgaggcacagcctgctccctaatctgctcgattcggttgcatacaacttggcaaggcaggccgattcagctgctttttatgaaatcggttctgttttcttgaaagccgaagaacatacgaaaccggtcgaaaaagaacacgtcgccggagccgtgacaggcctgtggcacaaaaacctctggcagggcgagaaaaagccggttgatttcttcgtcgtaaaaggcatcgtcgaaggtctgttggaaaagctcggaatcaccgaaggcatcgaattcgctcaatctgaaagaaaagagcttcatcctgggcggacagccaatattttgcacaacggctcattagtcggcttcatcggccagctgcatccgtcagttgaaaaagagctggacctgagcgacacgtatgtgtttgaactggacctgcacgagctcctccgattggatgtaccggagatcacgtatacaccaattccgaagtatccttctgttacaagggacatcgcgcttgttgtagacaaacaaacaacggccggccagcttgaggacgtcatcaaaacagcaggcggcaaatggctgaaagaagtccatgtctttgacgtctatgaaggcgagcacatggaagaaggcaagaagtccgtcgccttcagcctgcaatatttgaatcctgaacagacattgacagaagaagaagtgacaaaagtccacgaccaagtgctgaaagcgctggaagataaatatcaggctgtattgagaggataa

SEQ ID NO: 3502 - DNA, 1035 bp, Bacillus licheniformis
atgcaggaagagctgaaacggcttgaaaaagaagcggttgaaaaagtggaagccgctggttcattaaaagaagtcaacgatgtccgcgttgcgtatctgggaaaaaagggaccgatcacagaagtgcttcggggaatgggaaagctgtccgctgaagaaaggccgaaaatgggggccttggcgaacgaagtaagagagaaaatcgccgcggcgatcgccgaaaaaaatgcccgccttgaggaagaagaggtgaaaaggaagctgaaagagcagacgattgacgtgacgcttccgggaagccctgtgaaaacaggagcgcggcatccgctgacgatcgttattgaagaaatcgaagacttgtttatcagcatgggatattcggtggaagaggggcctgaagtggaaaccgactattataacttcgaagcgctcaaccttccgaaagagcacccggcccgggatatgcaagacagcttttatattacggaagatacgctgatgagaacacagacatctcctgttcagacgcgcacgatggaaaaacataaaggcaaaggccctgtcaaaatcatctgccccggcaaagtgtaccgccgcgacaacgatgatgcgacacattcccatcagtttatgcagattgaagggctctgcgttgaccgtgatatcagcatgagcgacttaaaaggaaccctggaaacggtcgcgaaaaagatgttcggcgaagagcgcgaaatcagactgcgtccaagcttcttcccgtttacagagccgtctgtcgaagtcgatgtttcctgctttaaatgcggaggcaaaggctgctccgtttgtaaacaaacgggctggatcgaaattctcggcgccggaatggtgcatccgaacgtgctcgaaatggccggattcgattccaaacaatatcagggatttgcttttgggatgggcgttgaacggatcgcaatgctgaagtacggcattgacgacattcgtcatttctatacgaacgatgtcagatttttatctcaatttaaacaagcttaa

SEQ ID NO: 3503 - DNA, 117 bp, Bacillus licheniformis
atgtgtaaaggtgaaccggatttattccgttatgccaatgaagtaagcagcaaagcttttttgctttgttttaaaaaagggtggtaccacggccacgattcgtccctttcattataa

SEQ ID NO: 3504 - DNA, 117 bp, Bacillus licheniformis
gtgacaactcaagaggtgaagcgttttccggcctgccataaaaatgcttgcagtctcaggcattttctccctgaatggcggcatgtgaaaaaacggagcctctatcactgtttttaa

SEQ ID NO: 3505 - DNA, 747 bp, Bacillus licheniformis
ttgaaacgaattgaatcagccaaaaatcaaaaagtgaaggactggaaaaaacttcatgcaaaaaaagagcggacaaaaacgaatactttcttaatagaaggcgagcatctcgttgaggaagcgctgaagacaccgggtgttgtgaaagaaatcatggtcgcagacgaagcggacttcccggctatgattgatgagtctgttgcccgctatgttttgagcgccgatgctttttcagcgattgccgaaacggagacgcctcaggcggtcgccgctgtatgccgaatgcccgaaagcggaccttttcaatacgaaaagctgctgctagctgatgctgtgcaggacccgggcaatttagggacgatcatccggacggcagacgcggcggggatcgatgccgttgttatcggacaagggactgtcgacccttacaatgccaaaacgctcaggtcggctcaaggctcgcattttcacatcccgattttaaaacgcgagctttcagagctgattgaagagctgaagggaaaaagcgtcccggtttacggcacagcgctgcagggtgccgtgccatttagagaagcggagccgtcgcagtcgtttgcgctattgatcggaaacgaaggatctggggtcgatccggccctcctcgcacagaccgaccaaaatctgtacgttccgatctacggaaaagcggagtcgctcaatgtggcggccgcagccgcggtccttctttatcatctccgcggataa

SEQ ID NO: 3506 - DNA, 213 bp, Bacillus licheniformis
atggatttgaatttgcgccatgccgttattgccaatgtatcagggaactcgcaagaagagcttgaacatacgatcgtcgatgcgatccaaagcggtgaagaaaaaatgcttccgggattgggtgtgttgttcgaggtcatctggcagcacgcaactgaatcagacaaaaccgaaatgctcgagacattggaacaaggattaaaagcgaaataa

SEQ ID NO: 3507 - DNA, 1797 bp, Bacillus licheniformis
atgaatgcaataacaattgtgatcgcttccatctgtattttggcgatcgcctatcgtttgtacggaacatttatgatggtgaaagtgttgaaggttgatgacgacaagccgactcctgcccatcttcagaaagacggcaaagattatgtgccgacgaacaaatgggtgtctttcggccaccactttgcggccatcgcagccgcggggccgcttgtcgggccgatcttggcggcgcagttcggctacttgccggggctgttgtggctcctgatcggagcggtcatcgggggcgccgtgcatgatattgttgttttatttgcgtcgatgcggaggaagggaaagtcgctttcagaagtggcgaaagaagagctcgggcctgttgcgggattttgcacggggcttgcgatgctgtttattattacaatcacgatggcggggctgtcgatggttgtgcttcatgcgcttgaacgcaatccgtgggggatgttcgccgttgcgattacaattccgatcgcgatgggggtcggcttattttataaaaagacaggcaacttaaaattagcgtctaccggcggatttattttgctgatggccggtgtcttcatcgggccctccattgcagagacgccgcttggagacgccttgacgctcgatacgaaaacgcttgctgtcgcacttcctgtctatgcattttttgcagcggcgctgcctgtatggctgctgctcgcaccgcgcgattatttgagcagctttatgaaaatcggggtgtttatcgctttgattgccggggttttcgttgtcaatccggcgattccgtttccggcgtttaccgagtttacgggcggagggggacctgtttcgcctggtccggtctggccgttcatttcaattacgatcgcctgcggtgcgatttccggtttccatgcgtttgtcggttcaggcacgacgccgaagatgcttgacaagtggagcgacatgaaattcgtcggcttcggagcgatgctcgttgagtgtcttgtcggcatcatggctttaatcgcggcaacggcgttgcagccgggcgattattttgccatcaacagttcgccagaagtctttcggacgcttggcatgaatgtcgtccatctgcctgaactcagccgcgaaatcggtctcgatcttgaaggaagaacaggcggagctgttacccttgccgtcggcatggcttatattttcacggatattccgtttttcagccatttggcctcttactttttccaatttgtcatcatgtttgaagctgtctttattttaacggcgatcgatgccggtacaagggtggcgcgttatttgattcaagactttttcggggaagtgtacaaaccgctgaaaaaaacggactggcttccgggttcggtcgcagcgagcgcccttgcctgtttcatgtggggatatttgctgtactcaggcgatatcagctcgatttgggcgctgtttggcgtatccaaccagctgatggcatccgtcggtttaattatcggagcgacggtcattttaaaaattgcggacaaacggcgttatatgctgacatgtctcattccgctcgcttatttgtatgtgacggtcaactatgcgggatactggatgatcaaaaacgtttattttaatgcggaagctgccggtttcagcgttttaaacggcattttatcgatcattatgcttgtgttgggacttgtgatcatggctgcagccattaaaaaatggacggagatttggcgcgatccggcattgcggatggagccttctatacctggatga

SEQ ID NO: 3508 - DNA, 339 bp, Bacillus licheniformis
atgaagacgtttttttcggctgcgtactgttttttgatgtacgcatttttagcatacctttggcttctgtttatcacggcgatccttgaccggccccggtttcttaatcactcacttttagaggcgggcgtcatcttgatcggcaccattttgtttttttcgctgtcccaccatttctcagcttcgccttgtcaaaacaaatgtcaatcgaatcgcggggaccgccgctttttgtctagtgatggccgttcatttttttatcgttccgttatgctgacagaaaaaaggcggatatccgatgatacccgccaattacgccttaaaaaaggcagcagatga

SEQ ID NO: 3509 - DNA, 219 bp, Bacillus licheniformis
gtgataaacagaagccaaaggtatgctaaaaatgcgtacatcaaaaaacagtacgcagccgaaaaaaacgtcttcataaatcctcctcccgttttaacttattcttcggcatatttgctgaagcctttttttcatctgaaaaaaccggcctcttcgggccggtttttcaatcattgtttcttcattctgatcacattccaggaaagcttcggaaggtga

SEQ ID NO: 3510 - DNA, 1509 bp, Bacillus licheniformis
atgactgtacacaaagcgaagatgacgattgacaaggaatataaggtggcagagattgataagcgaatttacggctcctttatcgagcatctcggcagagccgtttatgaaggcatttatgagcctgatcatcctgaagctgacgaatcaggctttcggaaagatgtcattaaactagtcagagaactaaaggtgccgtttatcaggtatcccggcggaaactttgtatctggatataactgggaggatggagtcggacctgtcgaacagcggccgacaagacttgatttggcgtgggcgacaaccgagccgaacttaatcggtacgaacgaatttatggattgggcaaagcttgtcggggcagaggtgaatatggccgtcaacctcggaacgagaggaattgatgccgcacgcaacctagtagaatattgcaaccatccgtcaggatcgtactacagcgacttgagaaaatcccacggatataaggaaccgcataaaattaaaacatggtgcctcggcaatgaaatggacggtccatggcaaatcggccataaaacagcggccgaatacggaagacttgctgctgaagccgcgaaggtgatgaaatggacggacccgtcgatcgagcttgtcgcctgcggaagttcgggaagcggaatgccgacattcatcgactgggaaacgaccgtgcttgaccatacgtacgaacacgtcgagtacatctcgcttcactcgtattacggcaaccgcgacaatgatcttccaaactatttggcgagatcgctagacatggatcactttatcaaaacggtcatctcagtctgcgactatatgaaagcgaaaaagaaaagcaagaaaacgattcacctttcatatgatgagtggaatgtctggtatcactcgaatgaaaaagacaaagaagctgaacgctgggcgaaagcgccgcaccttcttgaagacatctacaactttgaggatgcgcttctcgtcggctgtatgctgattacgatgctcaagcatgccgaccgcgtgaaaatcgcctgtctggctcagcttgtcaatgtcatcgcgccgattatgacagacaaagggggagaagcatggcgtcagaccattttctatccgtttatgcacgcttccgtctacggcagaggaacggtactgcagacggcggtatcgtctccaaagtatgatgcgaaagactttacggatgtgccgtacttggagtccgtgtctgttttcaatgaagaagccgaggaattaaccgtttttgccgtcaaccgcgcaacagacgccggccttgaaatggaagccgatatgagaagctttgaagggtacagtgtctctgagcacatcgttctggaacacgaagatcataaagcgacgaatgaaaaagaccgcaacaacgtcgttccgcacagcggcggagacgccaaagtatgtgacggcaggctgacggctcaccttccgaagctttcctggaatgtgatcagaatgaagaaacaatga

SEQ ID NO: 3511 - DNA, 843 bp, Bacillus licheniformis
atgcgtcctgccggaggcctcaacattgcgaaagtagctctgtttctgctgtttgcgatattaagctttttgtttgtgtttccgctcttctgccttgtactcggctcgctcaagccatcttcggaattgctgcgcttcggcctgaatttaaagctgagccctgaaatcctgagccttgacaattacacttacttgtttaacggaggcagcatttattttcaatggttttcgaacagcttgattctcgtggtgatatccaccgtgctgacgctcttgttttcttcaatggtcggatacgggcttgccgtctacgactttaaaggaaaaaatctcttgttcgtagccgtgctcctgatcatgatggtgccgatcgaaattctcatgctgcctttatttaaaatgacggtttctcttcatattgtcgacacatacgccggtgtgatcctgccgtttatcgtctcgcctgtagccgtgtttttcttcagacagtatgcgctcggcctgccgagagatttgcttgattccgcgagaatggacggctgcacagagttcggcatttacttcaggatcatggcgcccttgatgaagccggcatttggagcgatgatcattcttcaatccttaaacagctggaacaacttcttatggccgctgatcgttttgcgatcgaaagaaatgtttacgctcccaatcggactgtccgctttgctcagtccgtacgggaacaattatgacatgttgatttcgggttctgtgctggcgattctgcccgtgattctcatcttcctgttcttccagaagtactttatatcaggtttgacggcgggcggaatcaaaggctga

SEQ ID NO: 3512 - DNA, 945 bp, Bacillus licheniformis
ttgaagactgttaaaacagatacagtgcattcgtttccgccggtgagcagaaaaagaaagatcagacgtttattatattcagcaaaagccgcaccctacatttttacagcaccttttgtactctccttttgcatattttttctttatccgcttatcagcgtcgtcatcatgagttttcaaagcattctccccggggaagtccgcttcatcgggacggagaactataaagcattaaacaatcctacattttataccgcactattcaacaccgtaaaatacaccttttggacattgctgattttaatacctgttcctcttattctggcagtctttttagattctaaactcgtaaagtttaaaaacgtgttcaaatcggctttattcatcccggctctgacttcaaccattgtggcggggattattttcaggctgatttttggagaaatggatacatccctggcgaattcgatattggctaagctcggaggttcgccgtacaactggctgaacaatgaacataccggcatgtttttaatggtgatgctcgcatcttggagatggatggggatcaatgtcctgtactttttggcgggcttgcagaacgttccgaaagaattgtatgaagctgccgaaatcgacggggcaggcacgttcaagaagttttaccatattacgcttccgtttttaaagcccgtcagcgtctacgtgctgacgatcagcatcatcggcggcttccggatgtttgaagaaagctacgtgctgtggcagaacaactctccgggcaacatcggcctgacgatggtcggatacatttatcagcaggggcttgcctacaacaacatgggctacggatcggcgctcggcatcgtgctcttgatcatcattttcatctgcagcctcatttcattaaagctgtctggatcttttaaaaaggagggctattaa

SEQ ID NO: 3513 - DNA, 1305 bp, Bacillus licheniformis
gtgaaaaggttcctttcatctatctttatggtcacggtcgctgtatgtttgcttttatcggggtgcaaggcgagtcctgcctccgatcaagcggacggcaccgaactgacattttggacattcaacggccttcatgaacagttttatgctgagatggtgaaagaatggaacaaaaagtatcccgagcgaaaaatcaaattaaatacagtggtgtatccgtatggacagatgcatgacaatttatctatctcgcttttagccgggaaaggggttccagatattgccgatgttgagctggggcgctattcgaactttttgaagggctctgacattcctcttaccgatttaacgccgcttgtggaggacgaacgcgacaagtttgttgaagcgaggctgacgctctacagcaagaacggcaagctttacggacttgacacacatgtcggaactaccgtgatgtattacaacatggaaatgatgaataaagcaggcgttgatccggacgacatcaaaacatgggaagattacagggaagcgggcaaaaaggtcgtcaaagctctcggaaagccgatgacgacgattgaaacgaccgacccgaattcatttctgccgctggtttcccagcagggatccggttactttgatgagcaggggcggttgacattaaacaatgagacaaacgtgaaaacgctcgaatttttaaagactttaattgagaaagacaaaattgccgtcacaacgcccggaggcaatcatcacagtgaagagtattacggatttatgaaccaaggcggcgcggcgtctgtcttaatgccgatctggtatatgggccgttttttggattatatgcctgacttgaaagggaaaatcgcgatcagaccgctgccggcatgggaagaagggggagaccgctcagcgggaatgggcggaacggccaccgtgattccaaaacaggcgaaacaggtcgatctggccaaggatttcttgaaatttgccaaagcgtcaaaagaaggcaacaccaagctgtggaccgtgctcgggttcgatccgctcagatgggatgtgtgggactcggacgaattgaaaaaaacaaatcaatatacagaatactttcaaaacggacaacacatcttttccgtgcttcttgacataaaggatgagatcaatccgctttaccttactgaggattatgcgaagacttccgatctcgtcaacagaaacatactgtacgaagcgctcaaaacgaagagcaaaacaccgaaagaagcattggacaaagcagcagctgaagtgaaagggcaatag

SEQ ID NO: 3514 - DNA, 1206 bp, Bacillus licheniformis
atgaatgacttgatctcttatgtgaaaaaaactttgggcgcatgcgaatgcggaaccgtccaccacccgcttacagtcgaaaaaatcgcgatcggcgacaatgctgttgagcaagagctgcccgctttcgtgaaatcggcttcctataaaaaagccgctgtcatttatgatgaaacgaccggacggttagccggcaagcggattgcctctcttcttgaggaaacggctgaaacggttccggtgctgctggaagctaatgaagcgggcgatgtgacggcggatgagcaaacattggtgagtgcattgatcggtgtaccgattgatgcggatgtactaattgcggccggagcgggcacgattcacgacatcgtcaggttttgcgcctatcagcgcggcattccgtttatttcagttcctacggctccgtcggttgacggttttacttcagccggcgcaccgctgattttaaaaggaaagaaacagacggttcaaacgacagcgccgatcgcgctttttgccgatttggagctcttgtgtcaagcgccgcagaacatggtagccgcaggttttggcgatatgctcggcaaggtgacgtcgcttgcggattgggagatttcccgcttgcttgccggcgagccgtattgtccggccgccagccggctcacgagggaagcgcttgatcaatgtcttgaccgaaaagatgacatcgccgccaagatgcgggatgggattgagaaattgatggaatcgctgatcctttctggcctagtcatgctggttctcgaccattcaaggccggcttccggcggcgagcaccatctttcccactaccttgaaatgaaagcgctggagaacaataagcggcaagtgctccacggtgctaaagtcggctgcagcgcgattatgctgactgacatttaccgatctcttatcggtgcaagcctgggtgatcaacacgctgagcaagcgattcgctccgtttatgaaaagctccctgacggtaagaaaatggcagagtggatgaggcgtatcggcgggcctgtatcattcaaagaactcgatgttgaagaagagctggtgagagaagcgctcgcatacgcccatcagctcagagaccggtatacgggactgaaaatcatcaatcaatacggccttttgccggggcttttaggcaaaggaccaggcgtgaaaggggttaaaatgtga

SEQ ID NO: 3515 - DNA, 687 bp, Bacillus licheniformis
gtgctggaatctttgaaagaacaagtattaaaagcgaatttgcagcttgaagaataccggcttgtcacctttacatggggaaatgtcagcggtattgaccgggagaataagctggtcgtcatcaagccgagcggtgtcaaatacagcgatttgaaagccgaagatttagtggttctgaatatggacggcgagattgtggaaggggatctgaagccatcttccgatacgccgacacacctctatctttaccggcagtttcaatcgatcggcgggatcgtccatacgcattccccgtgggcgacaagctgggctcagtcagggaaggacattccgtcgctcggaacgactcatgccgactactaccacggcgacattccgtgtacacgggaaatggatcccgatgaaatcaggagtcaatacgagctgaatacaggaaaagtgattgtagagacgttccggcatcttgaccccctggcggtgcccgccgttctcgtgaacaatcacgggccgttttgctggggaaaagacgccttaactgccgtacacaatgccgtcgtcctggaagaagtcgccaagatggcgtaccgctccctgatgctgaatccgtctcttaagcggattaagagcgctttgcaggataagcattattttcgaaagcacggggcagacgcctattacggccaatag

SEQ ID NO: 3516 - DNA, 1659 bp, Bacillus licheniformis
ttgtcagggcgtgcagttctcgtcgatgtccggacaggtgaggaaatcgcgacagctgtcaaagagtacacgcacggggtgatagaccgggagcttccggtctcaaagcgaaagcttccgagagactgggcgctccagcatccggccgattacattgaagtgctggaggaaacgattccgagccttttgaaacagtcaaaagcggatccgaaagaaatcatcggaatcggaatcgatttcacggcttgcacgattttgcccgttgacgagaacgggactcctctttgtatgagggaagagtatgcgtcagaaccgcacagctatgtgaagctttggaagcaccatgctgcacaggagcaggcgaatcgcttaaatcaaatcgcggaagaaagaaatgaaccttttcttcaaacatacggcgggaaaatttcttccgagtggctcgttccaaaagtgatgcaaatcgcggaagaagcgcctgacatttatgatgccgcagccgagatcatggaagcggccgactggatcgtctatatgctgtgcggaaccagaaagcgcaacaattgcacagcgggttataaagcgatttggaacaataagagcggctatccttccgacgatttcttcgcaagcctgcatccgaagctgaaaaatatcgttcgggaaaaactaacggaggatatttattctgtaggcgaaaaagcgggcggactgactgaagaaatggccgggaagacagggcttctggcaggtacggcggtcgctgtcgcaaatgttgatgctcatgtgtcggttccggcggtcggcatcacagagccgggcaagatgctgatgatcatgggaacgtctacctgtcacatgctgctcggcgaggatgtcaggatggtgccgggaatgtgcggcgtcgttgaagacgggattctgccgggctatgtcggctatgaagcgggccaatcgtgcgttggcgaccattttcattggctgattcaacactttgttccagaagcgtatttgaaagaagctgaagccgaagggatttccatttacgaactgctgtctcaaaaggccggcagtctccaaatcggtgaaagcggtttgcttgcattggattggtggaacggaaaccgttcaacactcgttgatgccgatctgacgggaatgctgctcggtatgacccttgccactaagcctgaagagatataccgtgcattggttgaagcgactgcctgcgggacgaggatcattattgaaacgttcagacaaagcggcgtgccgatcgaggagctgtatgccgcaggaggaatcgccgaaaaaaatccgtttatcatgcaggtttacgcggatgtcaccaacatggaaatcaaaatttccggatctccgcaggcgccggctttaggttcagcgatattcggagcgctcgcggccggaagcatgaacggcggttacgaccatatcgaagaagcagtcgcacatatgggcaagatcaaggataaaacgtacaaaccaattcctgaaaacgtttccttatacgatcagctttatgcggaatataaggagctttacacgtacttcggaaagcaaaacaatgtgatgaaacgccttaaaaaattgaaaaacatccagtcccttagttctgaccccggtaaagcgatggcttag

SEQ ID NO: 3517 - DNA, 1482 bp, Bacillus licheniformis
ttgattcaggcaaagacgcatgtgttttggtttgtgacaggcagccagcatttatatggcgaagaggcggtacaagaggtagaagagcattccaaaatgatctgcaacggattaaatgacggagatttaaggtttcaagtcgagtacaaagcggtggccacttcgctggacggcgtcagaaaactgtttgaagaggcgaaccgggacgatgagtgcgcaggcatcatcacctggatgcatacgttttcaccggccaaaatgtggattcccggcctttccgagctgaataagccgctgctccattttcatacccagtttaaccgggacattccgtgggataaaatcgacatggatttcatgaatattaatcagtctgcccacggcgaccgcgaatacggttttatcggagcgagattgggcattcctcgaaaagtaatcgccggatattgggaagacagagaagtaaagcgctcgatcgacaaatggatgagcgcagcggtcgcatatattgaaagccgccatatcaaagtcgcccgatttggggacaacatgcggaatgtggcggtaacagaaggagataagattgaagcgcagattcagcttggctggtctgtcgacggatatggaatcggcgatctcgtcacggagatcaatgctgtatcagaacagagtctaagcgagctcatctccgaatatgaggagctttatgagtggccggaaggcgaagcggcaagggaatccgtcaaggagcaggcgcggattgagcttggattaaagcgctttctttcgagcggaggctatacggcctttacgacaacctttgaagacctccacggcatgaagcagcttccgggtttggctgttcagcggctgatggctgaaggctatggcttcggaggagaaggagattggaaaacggctgcgcttgtcaggatgatgaaaatgatggccggcggaaaagaaacgtcatttatggaggattacacgtaccattttgaaccgggcaatgaaatgatcctcggctcccacatgcttgaagtgtgcccttcgattgccgaacacaaaccgagaattgaagtccatccgctgtcaatgggtgcaaaggatgatccggcgcggctcgtgtttgacggaattgcaggtcctgcggtcaatgtctcccttattgatttgggcggacgtttcaggcttgtcatcaatgaagtgggagctgtgaaggttccgcatgatatgccgaatcttccggtggcgcgcgtactttggaagcctcagccgtctctgagaacatcggctgaagcgtggattttggctggcggtgctcaccatacatgcctttcgtaccagctgacagccgagcagatgctcgattgggccgaaatgtcgggcattgaagcggtgttgatcaatcgtgatacaacgattttaaatcttcgcaatgaactcaaatggagtgaagctgcatatcggcttcgcaagttttaa

SEQ ID NO: 3518 - DNA, 963 bp, Bacillus licheniformis
atgaaaaatgtgttgcggaaaatgtctttggcggccttgatattcggactgctgctgtctttttcgatgcctgaatcaggcaaagcggcgttttgggacacaaaaggggacaatttcatccatgacccttctatcattaaagagggaaatacatggtatacatttggaacagggctcggcacagggctgcgtgtcattaagtcaacagacgggagaaactggagtgctgccccgagtatttttccaactccattgtcatggtggaagatgtacgtaccaaatcatgaaccgcatcaatgggcaccggatatcagctactataacggccggtattggctgtactactcggtttcgtctttcggttcaaacacatcagcgatagggctcgcatcgacagaccggatttcatccggccaatggcgggatgacgggctggtcatcaggtcgacatccggcgatcagtttaatgccattgaccctgatctggtcattgacaaagacggaaagccctggctctcattcggttccttctggagcggcattaagctgacaaggcttgataaaaacacgatgaaaccgacgggaagcctgtattcgatcgcctcaaggccgaataacggaggagcggttgaagccccgaacattacctacaaagacggctactattacttatttgtctcgtttgacagctgctgcaaaggggtggacagcacatataaaatagcctatggccgttcaacgagcattacgggaccctattatgataaaagcggcaaaaatatgatgaacggcggagggacgatcctggactccggcaatgaccgctggaaagggccgggacatcaggatgttctgaacaactcgatccttgtcaggcatgcttacgacgcgctggacaatggtgtatcaaagctgctcatcaatgacttgtactgggattcccaaggatggccgacttattaa

SEQ ID NO: 3519 - DNA, 111 bp, Bacillus licheniformis
ttgtttttttcattacaagaacaggagtgtgagctgaatgaaaaatgtgttgcggaaaatgtctttggcggccttgatattcggactgctgctgtctttttcgatgcctga

SEQ ID NO: 3520 - DNA, 1086 bp, Bacillus licheniformis
atggcaaagcttgatgaaacattgacgatgctaaaggaattaactgatgcaaaaggaattccggcgaatgaaaaagaacccagacaagtcatgaaatcgtacatagaaccgtttgccgacgaggttacgacagacagactgggaagcttaatcgcaaaaaagaccggacaggctgacggaccgaagattatgattgccggccatcttgatgaggtcggttttatggttacgcggatcgatgacaggggctatctccgctttcagacggtcggaggctggtggagccaggtcatgctggcgcagcgtgtgacggtcgtgacaaagaaaggcgacatcaccggtatcatcggttcaaagcctcctcatgtcctgtctcaggaggcgagaaaaaaatcggtcgatattaaagatatgtttatcgacatcggggcgtcgagcagggaggaagcgatggaatggggcgttcttccgggagaccaggtcgtcccttactttgaatttacggtgatgaataatgaaaaaatgctgcttgccaaagcatgggacaaccgtatcggctgcgcgatcgcaatcgacgtgctgaaaaacctgaaaggagccgatcatccgaatgtcgtctacggcgtcggaaccgtacaagaggaagtagggctgagaggcgcgaaaacagccgcgcatacgatcaagcctgatatcgctttcggtgtcgacgtgggaattgcgggtgatacgcctggtattaccgaaaaagagtcgacaagcaaaatgggaaaaggcccgcagatcatactttatgatgcatcaatggtgtcccataaagggcttcgcgactttgtaacgaatgtggcagatgaagccggcattccgtatcaatttgacgccctctcaggcggaggaacagattcaggatcaatccaccttaccgcgaacggagtgcctgccctgtcgatcacgatcgcgacgaggtatatccatacgcacgcggccatgcttcaccgggatgactatgaacatgcggtaaaattaattaccgaagtcattaaacgactggataaagagacggttcaaaacattacgtttgactga

SEQ ID NO: 3521 - DNA, 402 bp, Bacillus licheniformis
atgattgtcatcatattgagactggctttgctggcgcttttggtctacgtcgtgtacagggccgttcaatttttggggagcccggacagaaggctgaaatcagcacaggcaaaaaagcacttttattttttggacgaacaaaagaatacacgcaaaaatctcaagctgacatttaaaggcgtgcttttcgaaggagaaaaacacattccttcaaaagaccatccgctgttcatccatacgatttttgtatggacggaagcgcctgaagaaaagctcagctcttttacggatgaagacttcgcggaacttgaagaaaatattaaagagcactatcccgattgcaaaatcgactgggattcgaacatccaaaagtggagaaacaaaaaagcagaagagcaataa

SEQ ID NO: 3522 - DNA, 264 bp, Bacillus licheniformis
ttgactctcatatggatatacatgatcctcataaacggatacggttttttcttaatgaaagccgataagcaaaaagcggtcagaggtaaatggagggtgtctgagcgccgcatctggctcgttgcggctgcttttggctccgcaggcgtctggttcgggatgatgcggttcagacataagacaaaacacctttccttcaggctcggcattccttttttcctcggcgtgcaagctgttttgaccggcttttatatgatgaattaa

SEQ ID NO: 3523 - DNA, 360 bp, Bacillus licheniformis
atgccaagagtaaaaggcggaactgttacacgcaaacgtcgtaaaaaggttctcaaattagcaaaaggttattttggttcaaaacatacattatataaagtagctaaccagcaggttatgaaatcaggaaactacgctttccgcgaccgtcgtcagaaaaagcgcgatttccgcaaactttggatcactcgtatcaatgctgcagcgcgcatgaacggtctttcttacagccgtttaatgcacggtcttaagctttccggtatcgaagtaaaccgcaaaatgcttgctgaccttgctgtaaacgatctgaacgcattcaatcagcttgcagacgctgctaaagcgcaattgaataaataa

SEQ ID NO: 3524 - DNA, 200 bp, Bacillus licheniformis
atgccaaaaatgaaaactcaccgcggatctgcgaaacgttttaaaaagacaggttccgggaaactgaaacgttctcatgcatatacaagtcacttgttcgcaaataaatctcaaaaacaaaagcgcaagcttcgcaaaagtgcagtcgtaagcgccggcgatttcaaacgcatcaagcagcagcttgccaacattaagta

SEQ ID NO: 3525 - DNA, 561 bp, Bacillus licheniformis
atgagttgtgaaatcaattcaaagattctatggaggtggctcattattagcaaagatcaattggttaatgagggtatccgtgcgcgtgaagttcgtttgatcggacaaaatggcgatcagcttgggatcaaatcccgccaggaagcactggaaattgcgggtcgcgcaaatcttgaccttgtgttggttgcagcgaatgcaaaaccgcctgtctgccggatcatggactatggaaagtacagattcgagcagcagaagaaggaaaaggaagcacgcaaaaatcaaaaaatcattaacttaaaagaagttcggctgagccctggtattgaagaacacgacttcaatacaaagcttcgcaacgccatcaagttcctgcaaaaaggggacaaagtgaaagcgtccatccgctttaaaggccgtgcgatcacgcataaagaaatcgggcagcgcgtgctggaccgtttttcagaagcctgcgcggaagtggcgactgttgaaacgaagccgaaaatggacggccgcagcatgttcctggtgctcgcgcctaaaactgaaaagtaa

SEQ ID NO: 3526 - DNA, 576 bp, Bacillus licheniformis
atgattcttgggatcgcgtttttaaaaatcggcggtttttcatatgaggactacaagagcggcggagacatcattaagttctttttggagcccgccacaattgcgttcgccattcctttatataaacaggcggacaagttgaaaaagtattggctgcaaatccttggtgccattattgcaggctccgtctgctcggttgccgtcgtctatctgatcgcaaacgcgctccatcttgacggagccgtcatgaaaagcatgctgccccaggccgccacaacggcgattgctcttcctttatcaaaagggatcggcgggattcaagatattacggccttcgccgtcatctttaacgcagtgatcgtctatgcgctcggcgcgctttttttgaaaatcttcaaagtgcagcatccgatcgccaaagggttggcgctcggaacatcaggacatgccctcggcgtcgccgtcggaattgaaatgggggaagtcgaagcggcaatggcgagtattgcagttgtcgtcgtcggcgtcgtgaccgtgtttgtcgttccgttatgtgttcaaatgatcggcggatag

SEQ ID NO: 3527 - DNA, 414 bp, Bacillus licheniformis
atgaagggtaaaaaagaatacggctttttaactcaggcatttatttttgctgttatgatgtttatttcaaacggaatcgccgcggttctgcccatcccgattcctccatctgtcatcggtttggtgctgttgtttgcattgctgtgtacgaaagtgctgaagcttgaacaagttgaatcgctcggcacggcgctcacttcgctgatcggctttttgttcgttccgtcgggaatatcagtgatgaattcgctcggcgtcatggagaaatacggattgccgatcgtcctcgtgattttcctggccaccgtcattctgcttgcagcgacaggattgttttcacagttcattctgtctgtcggcaaaaaggaccgtcaagacacacgagttgaaccagccaaaaaaacagcatcttga

SEQ ID NO: 3528 - DNA, 1557 bp, Bacillus licheniformis
atggaccattcaagaggaggccgctttgttccgtctggcgaatttgcatctttggcaaggcgcggcttgatgcctgaagacgcttcaatcgccgcaggcgcgccccgatttgcagattatccattcaagcttggagtggcttcaggagacccgcatcccgacgggtttgtcatctggacgaggcttgcccccgatccgcttgccgaagacggattagggggaatgcctgacaaagctgtccctgttcagtgggaagtagctgaagatgaacattttcacaaagtggtgaagcgcgggacgtcctctgcgctcgctgagcttgcccactccgttcatgttgaagtgcacggtttaaagccgggaagctattattggtacaggtttaaagcgggcagggaaatcagccggacaggccgtacaaaaaccgcgcctgccccgcacgccgacatcaaggggatgtcgttcgccctcgcctcgtgccaagcttggtaccacgggtattttacggcttaccggcatatggccgaagaccatccggacgttgtttttttcctcggagactatatttacgaatatgccattaatgctaaaaatcttttccgcgatgtgactttatccgctgcccacaacgcaaaaaccgtcaccctcagccaatacagactcagatattctctttttaagacagatccggaccttcaggccattcatgcgctggctccctgggttgtgacgatggatgaccatgaggttgaaaacaattatgccggcatccattcgcaatacaacacttttccggacgattttctccggcagcgcgcagcggcgtatcaagctttctatgaaaatatcccgatccgcagcacatcgattccaaaggggcctgacatgctgatgtacaggcggttccgctatggaaacctggctgaattcaatgttttggacacccggcagtaccgcaataattttccggcaaatgaggctgaacggcttgagccatcccgctccatactcggatttgaccaggagcgctggctttttcacggcttgagccggtctgacacgatttggaactttttagtccagcaagtcgtgctggctcaaatcgaccgcgacacaggtcctggagttgagtacagcacagaccagtgggacggctttcccgcttgccgcgataggcttttttccgcatacaaggcatacggcatccaaaaccccgttgtactgacaggggatattcacagacatgccgccgccgacttaaaagcggacttcgatgatgcggggtcagcgacaatcggaaccgagctgatcacaacttcgatatcttcggacgctgacggcagcgagaccgattctttggcgccgatctggctcggaaacccgcatgtcaaactgtacaatgcacagcgcggctatgttcgctgccgcttgacgccccggcagctcgaagccgactttcaggttcttccttatatcacacgtcccggcgctccagcctcaacttatgccaagttcgccgttgaagcaggacgccccgggctccagcgcatgttttag

SEQ ID NO: 3529 - DNA, 723 bp, Bacillus licheniformis
atgctcaaggtattaatcgtggatgatgaaatgtttgcgcgggacgagctgagatatttactagagcagactgaagaagtggatgcgattgacgaagctgaacatatcgaagaagcgtttgacaaaatggcggatcgcaaacccgatatcctcttcctggacatcgatctgtcaggggagaacggttttgacattgcgcagcggctgaaaaaaatgtcggcgcctccggctgtcgtttttgcgaccgcttatgatgaatatgcgctgaaagcatttgaagtggatgcgattgattatttgacaaagccgtttgatgaggagcgaatcagacagacaatccacaaatataaaaggatgcgccccggcaaacaggaggagcggcagcttgcaggccaccacaggctggctctcagcattgacgaatcgatcgtcgtgctcgatcccgatgaaatcgtatacgccgggttagaaggcggacacgtcacagtgaagacttttgatcaggcatacacggttcacgatacattggttgtactcgaacaaaagctttcgcagacggcattgatcagggtgcacagaagttttctcgcaaatatggatcatattaaacaggtcaaaccctggttcaattcgacatacaacctcctgatgaaagacggctccacgatccctgtcagccgtacatacgcgaaagagctgaaaaaacggctgcatatggtgtga

SEQ ID NO: 3530 - DNA, 1785 bp, Bacillus licheniformis
atggtccaactcatgattatgatgctggagagagtggggatcatcgtcattctgggctttatgttggcccatatgaaggtgttccgtcagcacctacagcatccggaagggtataagggcaagggagttctcatctttattttttccttgttcagcatcatcagcaactatacaggcattgaaatccgggagcgcgagattttgaacaatgactggattttcgcaatcgacccgtcaagctcgattgccaatacgagaattctcggcgtcgaaatcggcggcttgatcggagggccgtttgtcggagcgggtgtcggactgctctcaggcattcaccgtttttcactgggagggacgacggctttgagctgcgcggtttcttcactgctggcaggtgtcattgcgggttatatcggcagctttttcaggaatcggcaccagatggtgacaccgcgggtagccgctcttgcgggcatttgtatggagggcctgcagatgcttatgattctcgtgcttgcaaaaccgcaggctgaggcacttgcgcttgttcagatgatcggcattccaatgatgattgtcaacgggacgggcagctttatttttctatcgatcattcagtctattatccgcaaagaggaacaggcgcgggccgttcagacccataaggtattttcgatagcggatcagacgcttccttttttccgccggggactgaatgaggattcctgcaaaagcgccgctctcattatacaccgcatgacagggacggatgccgtatcgattacggatagagagaacattctcgctcatgtcggagatggagcagatcatcatattccttcgaaaaatctgatcaccggtttatcgaaaaaagtcattcaaaccggaaaggtcatgaaagtgaagtcgcgcgatgaaatcgagtgtgcgcaccgttcctgtccgctgcaggcggcgatcgtactgccgctcttctccaaccgcgaaacaatcggcacgctgaagctgtacttcaagcacccgtccggtcttaaccgtgtgacggaagagctggccgaagggcttgccatgcttttttccactcagctagaactcggtgaggctgagctgcaaagcaagcttttgaaagatgccgaaatcaaggcgcttcaagcgcaggtcaatccgcactttttatttaatgccatccatacgatttctgctctgtgcaggacagatccggaaaaaacgcgaaaacttctcttgcagctgagcgtttattttcgttccaatctgcagggagccaggcagctgatgattccgctttcaaaagagctgaaccatctggaagcctatttatcattggagcaggcccgatttccgggcaagtatcatattgattttcatatcgaggacggccttgaaaatatggaaatccctccttttatcttgcagctgctcgttgaaaacgcgcttcgccatgcatttccgagaaaacaaaaggtatgcacggtaaaagtatccgctgtgagagagcgggacggcgttttgatgaaggtgtcagacaacggcaggggaattaatccggagatgcttggacagctggggcaggcgcccgccccttcaaaggaaggaaatgggacggcgctttacaatgtgaaccagcggctcaccggtttgttcgggcaccaggctgctctgcagattgccagcgaacttgataaaggaacagagatatccttcaagattccttttcaaaccgaaagagaggggaacagagatgctcaaggtattaatcgtggatga

SEQ ID NO: 3531 - DNA, 228 bp, Bacillus licheniformis
gtgaaaaaacgctgggtattttggtggatttgcaacatattgtggacggccgtttttgtaatcggagcagctgttgtttggctgagagatgttgatggcgctggtgttgctcaaacacctgaacttaaattaatagcatttatcgttttgttaattgcatttatatttccattcatcattcaagttgtgtggctgattgttaatttcaaagtgggaagcagcaaataa

SEQ ID NO: 3532 - DNA, 813 bp, Bacillus licheniformis
atgaaagccgtattttttgatttagacgatacattgctctgggatgaaaaaagcgtcagcacagcattttccaaaacgtgccttaaagctgaagaaaaatacggaatccatgcggaagaatttgaagcagccgtgcgcgaagcagcgcgaaagctttacatgtcttatgaaacatatccatacaccgtcatgatcggcatcaacccatttgaaggactgtggtcaaacttcagcgagccgatcagcgaagggtttcaaaaactgaacaaaattgttcccgaatacagaagaaacgcatggacaaacggattgaaggcgtttggcatcgacgatcccgccttcggggaagaactcggcgaatattttgcggcagtgcgccgaaagagcccttttgtttatgaagaaacatttgccgttttagatgagctgaaaggaaaagtagagcttcttttgctgacaaacggcgatccgagcctgcagaaagaaaagttggcaggcgtaccggaacttgctccttattttaatgaaatcgtgatttccggtgaatttggaaaaggaaagcctgatccaagcatatttgaacactgcctcaccctcctcggcatgacaaaatatgatgccgtgatggtcggagacaacttgaacaccgacattctcggggcttccagagcaggcatccaaaccgtctgggtcaaccgcaaaggcaaaaagaatgaaactgatgttgcacctgatcacgaaatcagccatttaagcgaactgttcgatatcctccgcggacaagcagcggacaagctaagcaaaaaagcatga

SEQ ID NO: 3533 - DNA, 1932 bp, Bacillus licheniformis
atgtcagatatggtaaaaatcaaatttcctgacggagcggttaaggagtttgcaaaagcgacgacaacagaagatatcgcggcattaatcagtcccggcttaaagaaaaaagcgatagcggggaaattaaacggcaaagaaatcgatctgcgcgcaccgatccttgaggacggcgccatcgaaatcattacagaaggcagcgaagaagcgcttgaaatcatgcgccacagtactgcacacttaatggcccaggcgatcaagcgcctgtataaaaaagtgaaactcggggtcggcccggttatcgaaaacggcttctactacgacgtggatttggaagaagcgctgactccggaagaccttccgaagattgagaaggaaatgaaaaaaatcgtcggggaaaatctgccgatcgtaagaaaagaagtcagccgagaggaagccagagccctgtttgccgaaatcggcgatgatctgaaattggaactgcttgatgcgattccggaaggcgagacggtatcgatctatgagcagggcgaattcttcgatctgtgccgcggtgttcacgttccttcgacgggcaaaatcaaggagttcaagctgctgagccttgcgggggcatactggcgcggagacagcaacaacaagatgctccagcgcatctatgggacggctttcttcaaaaaagccgagcttgaagagcatcttcgcctccttgaggaagcgaaagaacgcgaccacagaaaactcggaaaagaactgaagctgttcgccaattcgcaaaaagtcggccagggtctgccgctttggctgccaaagggtgcgaccatcagacgcgtcatcgagcgctatatcgttgacaaagagctcgcgctcggctatgagcacgtgtacacccctgtcctcggcagcaaagacctgtatgaaacatcaggccactgggatcattatcaagacggcatgttcccgccgatggagatggacaatgaaacacttgtgcttcgtccgatgaactgtccgcaccatatgatgatttataaaaacgacattcacagctaccgtgagcttccgatccggatcgccgagctcggaacgatgcaccgctatgaaatgtcaggggctctttcagggctgcagcgcgtccgcggaatgacgctgaatgacgcccacattttcgtccgtccagatcaaatcaaagacgagttcattcgaactgtccgcctgattcaggatgtatacgaagacttcggactggaagagtattcattccgcttgtcttaccgcgaccctgaagatacagagaaatactacgatgacgatgaaatgtggaacaaagcgcaatcgatgctgaaggaggcgatggacgagatcggccatgattattacgaagctgaaggggaagcggccttctacggaccgaagcttgacgttcaggtcaaaacagcaatcggcaaagaggaaactctgtcaactgttcagctggacttccttcttcctgaaaaattcgatctgacatatgtcggggaagacggaaaacctcatcgtccggtcgtcattcacagaggtgtcgtatcgacaatggaacgctttgtcgctttcttaattgaggagcataaaggcgcattgccgacatggcttgcccctgttcagttccaggtcatccctgtatcgccgtctgtgcatcttgactacgccaaaaaagttcaagagcgcctgcagcgtgaagggcttcgcgttgaagtcgatacccgcgacgagaaaatcggctataaaatccgtgaagcgcagatgcaaaaaatcccttacatgcttgtcgtcggcgaccaggaagttgaaaacgaagccgtcaacgtccgcaaatacggagagcaaaaatcagaaacggttgcaattgcagactttatcaaaaaagccgttgctgaagcaaagaaataa

SEQ ID NO: 3534 - DNA, 843 bp, Bacillus licheniformis
atgcttgaaattacatttgaagatgattatgatacagccgcgtttttgcatctccttcgcaatgcggatgcgaatcggcatatcaggattcacgaagcgccagggaagatcggaattgaaaagacccattcctctgtcagtattcaggcctatattgagccggttctgacgagattttttacagaatgcaaagaagatgaatacatgctttcggtcattgaaggcgattattactttttggaccgggatgaacagcagcagattcttcaattggcccacagcattatggagggcgaacttgaagggcttcctctcaacaaggacgacacccctcgcgaacattacatcattcaggagctccaagcgatctgtcttgaggaaaacgtcttttcgattcggtcatttatgacgtttcgccttgcgaagtattatgaacgcctcagatcttatgtggaggcggcgatcgacgagtataaaatggagcaggaatatcagacattcattcaatcgctgagagactacgtcatgtcgaaagagccgatgcttgaccatgtccacattgtgcacgacggttactttgtattgtgggaattaaagtatatttctgaacgggaacaaaaaaaatacatagacaggcggttcgtaagagaacacccaatgtatattgattcccatctcctggctccgctcgtatcgattgcgccggaaaaaatagacctctatacagaagaccgggaacacgccatggttcagaccattcaaaatatttttcaggagagggtgcggattcttccgcttggcgcctttcatccgcgggaaaacattttggaagagcattcttga

SEQ ID NO: 3535 - DNA, 633 bp, Bacillus licheniformis
atgcgaaaaagaaccttggccaaatggacggtaatcgccgtaatcgcggcggccggactatggctgaatgcgaaatacctgaatctgagccctgctcatataagagaaggcgtcttatcctttgggattttcgccccgttgatctatatcggactattgatgatccggccgtttttgctgcttcctgcttccgttttcgccgtcagcggcggcctcgcattcggtccgctgtttggctctttgtattcttttatcggtgcggcaggcggtgcatttttatcattcgctcttgcatacaggctcggcggatactttcagcacatgccgctgaagctcgacagcctgcggacgcttttgcggaaaaacggctttttctgcattttgctcttgaggctggcgccgattcattttgacgcggtcagctatgcggcaggcgtttccaaagtgaagcctctgtcgtttgccctggcgacggccgcgggtatcataccgggcaccattattttaaacgtgctcgggtcaagcctcttgaccggcgacatcatagcgattgcggttacagccgcaatttacctgatattcattacagtgccgcttttgttcagaaaaaaagtgcaggcgctcctcgattaa

SEQ ID NO: 3536 - DNA, 936 bp, Bacillus licheniformis
atgatggagccgattaaacgcgctttgcaaggcgtgacgacgagacccgattttaaaaaacgccttgaagatatgaaagaaaaagtgctctctgacaaggatgttcaggcgtttttaaacagccgccagtcagaagtggatcaaggaatgatcgacaggagccttaacaagctttatgaatatacacagcaaagcaaagcatgccaagactgcccgggtctgaaagaatgcaaaaacctgatacagggttatcatccaaagcttgtgctgaacggaaaaacaatcgatgttcaatacgataggtgtccggaaaaaaagaaagcggacgagagggaaagacagaggtcgctgattaaaagcatctatattcaacaggatcttctgaatgctacgtttgccgatattgacggagatgacccgagcagattgaaggtccttcagcttgtgacgggattcttgcatgactataacgaaacgggaaagggaaaaggcatttacgtctacgggaagttcggggtcggaaagacctttatgctggccgccattgcaaatgagcttgccgcaaaggatcatccgtccattctcgtctatgtccctgaatttgtcagggagctgaaaaatgcgatacatgatcagtcgcttgaggaaaagcttgatatggtcaagtctacgccgattctgatgctcgatgacatcggtgcggagtccatgtcaagctgggtgagggatgaggtgctcggcgccatccttcagcacagaatgtcccagcagctgccgacgtttttctcttcaaactttgatcctgatgaactgaaacaccatttcacctattcgcaaaggggagaaaaagaagaagtaaaagcggcaaggctgatggaaagggtgctgtatttagcgacgcctgtccggctggacgggaaaaaccggcgtcagtaa

SEQ ID NO: 3537 - DNA, 1425 bp, Bacillus licheniformis
atgagtaattattggaaagatttgcttcctgtcgatccgtatgttgtcaaaagcagcggattgctgcaggacttggaccggcaaattgtcacgctattgtatcagcctttaatcggctctttttcgttcagcttgtttctcacgctgtggggagagctggagcaaaacagagtctggggaaaaagctcgactcacagacagctgatggcggcgatgcagaccagcctgaagacgatccactcagaaaaggaaaagcttgaggggatcggactgttgaaaacttatataaaagaaacggaacacgaacgtttgtttatatatgaattgattccgccgctcagaccggacgagttctttcaggacggcatgctgaatgtcttcttgtacaaccgcgtcggaaaggcgaggtttcagcagctgaaagaatatttttcccacccgtctgttcctgaagaagcacgggacatcacccgttctttcaatgaagtttttgcatctgtccagccgagcgaatggaagatgtccgacgatatgatcgaagcgatggagcttcgcgaagatcatgaatggatgaaagaagggaatagccaaccggcagcagtcacagacgacgcctttgactttcaactgtttctcgccggtttatctgacacgcttatcccgagaaaagcgctgacagaccaagtgaaggaaacgattaaaaagctggcctttctctacggtatcgaaccgcttcagatgcaaaacgtcgtcatgtcagccgttgacgaacacgatatgatcacgacagaggcgctcagaaaagcggcgagcgactggtatcagatcgagcgcggcggcccgcttccggaactcgtcgacaaagtgcagccgatgaatctccgcgaacagccgaatcaacagtcgtccacaaacgccaaggaagacaatttgatcgctttgcttgagcaagtatcgccaagaaagctgctgcaggatattggcggcggagcggaaccatccaaagccgatctgaaaattatagaagaaattatgcttgaccaaaaattagagcccggcgtcatcaatgttctgatttattatgtcatgctgaaaaccgatatgaagctttcgaaaaattacacccaaaaaatcgcttcccactgggccagaaaaaaagttcgtacggttagagaggccatgaagcttgcgaaagaagaaaaccgccaatatcttgaatgggcggaagggaagaaaaagacttcccggaacaagaaagtcatcagagaagaaaagctgcctgattggcttcgggaaagtgacgatgctgacagcaaaccgctggaaacagagcaggctgatcctgcaaccagagaaggctttgaccagcagaaacagaagctgctcgaagaagtaaaaaaactgaaaaaccattccgctctttaa

SEQ ID NO: 3538 - DNA, 459 bp, Bacillus licheniformis
atgaaatgtccagcatgtcagcataatgggacgagggttttggactcccgtccggttgacgaaggcagatcgattcgcagaagacgcgaatgcgaatcgtgcaactatcgatttactacatttgaaaaagtggaagaaattccgctcatcgtcgtaaaaaaagaaggaatccgggaagaattcagccgcgagaaaatgctccgcggtttgatcaaagcgtgcgaaaagcgccctgtcgccttgaagcagcttgaggatatttgctttgaaattgataaagagcttagaaatcaaggcgtttctgaagtgaaaagcgacatgatcggagaaatggtgatggacaggcttgcgaaaatcgacgaagtcgcatatgtacggtttgcttcagtataccgccaatttaaagatattaacgtatttatcgacgagctgaaagatttaataaagaaagaacggtaa

SEQ ID NO: 3539 - DNA, 393 bp, Bacillus licheniformis
atgagtctttttcaaaacattcaacggtttttttctacacacgccgaaacgtctgaccgccatccttcggaagagctgaagagccgctattataaagcggcgtcaaaagaagcgctcaatgctgtaaaggaagtgctggaaggccttgacggctgcaaggtgacgtcagtgtcggaggaaagaggagaaatcagcgccgaagttaaaaaaacgagaaaagcttttgtggtggcgacagtcgtttcgattcggccttttgatacagcggtggactttaatgtgtcaactgaaacgtttttgccgaccgattttggctacagccgcgggcttgtctcgacgctatacagcgaactggacggaaagctgcaggaatctgtacattcaaacaattga

SEQ ID NO: 3540 - DNA, 387 bp, Bacillus licheniformis
atggaaacaatggggcgtcacgttatctccgaactgtggggatgcgattttgataagctgaatgacatggattttattgaaaaaacgtttgtaaatgcggcactgaagtcaggtgctgaggtacgtgaggtagcctttcataagtttgcacctcaaggtgtaagcggagtcgtgattatttcagaatctcacttgaccattcacagttttcctgaacacggatatgccagcattgatgtttatacttgcggagatttagatccgaacgtagctgccgattatatcgcagaagagttaagagcggaaacaagagagaacattgaaataccgagaggcatgggacctgttcaggtgaaacaggccaaagccaaagcacaggcactttaa

SEQ ID NO: 3541 - DNA, 1024 bp, Bacillus licheniformis
atgaaagtgaaagttgcgataaacggattcggccggatcggcagaatggtgtttagaaaagcgatgcttgatgaacagattgacattgcggcgatcaatgcgagctaccctccggaaacgctcgctcatttaataaagtatgacacaaatcacggccgttatgaacttgatgtaaaggctggagaagactgcctgttcgttaacggtaaaaaaggtcatgctgaccaatcagagggaccctaagcttcttccgtgggcacaatacggaatcgacatcgccgtggaagcgacggggaaattcaactcaaaggaaaaagcggaagcacatattgaaaccggcgcgaaaaaagttattttgacggcgccgggcaaaaatgaagacatcacaatcgtgatgggcgtcaacgaacgcgattttgatgcggagcgtcatacgattatttcaaacgcttcctgtacgacgaattgtctcgctccagtcgcaaaagtgcttgatgatgcattcggcattgaaaacggcctggtgacaaccgtacacgcttttacaaatgatcaaaaaaatattgataatccgcacaaagacttgaggagggcacgcgcctgcggatcttcgatcattccgacaacgacaggcgccgcgaaagcgctgtcacttgtcatgccccatttaaagggtagaatgcacggcctggccctgcgcgttcccgtctcaaatgtgtcgctcgttgaccttgtggctgatttgaaaagcgatgtgacgtcggaggatattaatgaggcgttccgcatggcggcggcaggctccatgtccgggatcatcgatgtatgcgatgaaccgctcgtttcatccgattttaatacgaatccatactcggcggtgatcgacagtctttcgacaatggtgcttgaaaacagaaaggtgaaagtgctcgcatggtatgacaatgaatggggatattcgtgcagggttgtcgatttgatcagatacgcggcttcaagaatgaaacacccctcagctgtataa

SEQ ID NO: 3542 - DNA, 1506 bp, Bacillus licheniformis
gtgtcttcaaggaaggacaaccatgaaactgatcaaaaacgcatcttttatcatttcttttttggctgcggccggcatttattttttattaggtacagtcgctgcttctgcggcaaacaaagattatccgaaacagatgatcaggctggaaagctcctcaggcttaaacattacgcctgccgggaatcaagacaacgcaccgctaacaacaaaacagacgagcggaaaaaaacagaaagatggaggctggatacgtctgacggcaaacagttcaaaatcagaaatatggatagcggcaaaattatcatccctgcccattacgcactgtcagacaataatcccgctgtgctctactatgacaattcacggaaggaagagttgtggaatattatcggggctgacaaagacggaaacggagactttatcacgtataaaatcgtcagtgcacaaaacaacagccttgcactgacactggacggcagcggagtgaagcttgccaaatatacaggcagctccgtccaaaagtggaagcttccaagcgacgggctcgaaggtttcgcaggctatgcaaaggaaacgaacggcaagcagaaaacaggcacaaccggcggcctgcttggaaaagtcgtctatgtcaataatctgggcgaactgaaagccaatattgaagattcaacgccccgcacaattgtcgtctccagcaatatcggcgcttcagccaaaacggtattaacggtgggcgccaataaaacaatcatcggctcgtatgaaaaacataagctgaataacatttactttaaaacaaaagcggactctggcaacgttattttcaaaaatctggtcattgcacatgatgcatccataaatgaaaacaatgacatccctgtttacattaccgattcgagaaactactggattgaccatgtcacattccaaggccacagctatacggcaaacggccacgatctcgacaagctcttatacgtcggcgctaaagccgattacgtcacactgtcgcacagcacattcacagaccacaggtacggcctgattctcggctggcctcaagatgacaagcaataccacagtatatataatggctatccgcggatgacaatcagccacagccgctttgagaatctctatgtcagggcgcccgggttgatgcgttacggctattatcacgtgaaaaacaattatatcaacaattaccaccttggcttcacgattacgacattggcgaaaatatattctgaagccaattacttcggcacgggcaatgagaaaggcatactggatgattacggagacggcgcgtttaaagatgtcgggtcatatccggcgataaaggggcagaaatcgcctgagacaagctggacaccttcatccaactacagctatcggacgatgaaggccggcaatgccaaagcttttgccaaacggtacgcaggtgcgcagcgcaccgctctgtactatgcgaattacagccagtttaaaaaagactaa

SEQ ID NO: 3543 - DNA, 606 bp, Bacillus licheniformis
ttgacattggtcatcggattaaccggggggattgccagcggcaaaagcactgtcgcgcaaatgttccagcagtgcggcatcacggtcgtcgatgcggacgtgatcgcgaaagaggccgttgaacaggggatgcccgcttatcagaaaatcgctgagacatttggtgaaggcgtgctgcttgaaacaggcgatatcgaccggagaaaacttggagaaattgtttttgctaatgaagaaaaaaggctgcagttaaatgcaatcgtccatcccgaagtgagaaaaatgatgatcaagcagcgcgacgaagccatccgggccggtgaacggtttgttgttctcgatattccgcttttatatgaaagcgggctcgaacatttgacagataaagtgatcgttgtctgggttccgatggagcttcagcttgagcggctgatgaaaagaaaccggcttaataaagacgaggcgctgaacagaattcacgcccagcaatctcttgacgaaaaaaagaaaagggcagacgcggtgatcgataacagcggcagtctgaaagatacagaagcgcagcttcatcagctgcttgatacatggtcaaatattgaaaagtga

SEQ ID NO: 3544 - DNA, 633 bp, Bacillus licheniformis
atgatgtttgcatctttcttgctgctggcatttgccgtcagcttggacagtttttcagtcggatttacttacggattgcgaaagatgaaaatcccatttaaagcgattttgattattgctttttgctctggtgccgtgatgtatattgccatgatgatcggaacccttttggcgaaattcctgcccgttgtcgtaacagaaaggctcggagccgtcatcttaatgggaatcggcgcatgggtgctgtatcagtttttccggccggagaaagaacaggatctcgtcttctctgaaaaaacgcttattaaccttgaattgaaatcgctcggaatcgtgatacacattttaagaaaaccgacaagcgccgacattgataaatcaggaatcattaccggtatagaagctttccttctcggtttcgccctctctattgacgcgttcggcgcagggatcggcgcggccgcgctgggcttttcccctgtaccgatgagcattacggtaggcatcatgagctcattgttcgtattttgcggaatacaggcaggccgatttttatcgaaatggaactggatggataaactgacctttcttcccggtatattgctgattatgatcggcatctggaaactgtaa

SEQ ID NO: 3545 - DNA, 828 bp, Bacillus licheniformis
gtgccggaattaccagaagtcgaaacggtccggcgcactcttgccgggcttgtaagagggaaaacgatcgatgcggttgatgtcagatggacaaaaatcataaaacgtccggaggagcctgaggaattcgcaagactcctggccggccagacgattcagtcgatcggaagaaggggaaaattcctgttgtttcatcttgatgactgtgtcatggtttcccatttgagaatggaaggaaagtacgggcttcatcaaaacgatgaaccccttgataaacatgtgcacgtcattttcaggttcacggacggaagcgagctgcgctaccgggatgtcagaaagttcggcaccatgcatttgtttaagccgggagaggaactgacagagctgcctctcaggcagctcggccccgagcccttcagcagcgaatttacagccgattacttaagagagcgcctgaagaaaacaaaccgctcggtgaaaaccgcgctgctcgatcagcggacagtcgtcggactgggcaatatttatgtcgacgaggctttgttcagagccggtatccatcccgaggcaacagcgaacaagctcacaaaaaaacagacggttcttctccataaagagatcattcaaacgttaaaggaagctgttgaagcagggggaagcacagtcagatcttacatcaattcacaaggtgagatcggcatgttccagctcaaacttttcgtttacggcaggaaagacgaaccttgtaaaaaatgcggatctccaattgaaaaaacagtcgttggcggaaggggcacgcatttttgcataaagtgccagaaaaaatga

SEQ ID NO: 3546 - DNA, 2640 bp, Bacillus licheniformis
atgactgaaagaaaaaaattagtattggttgacggaaacagcctggcttaccgtgcgtttttcgccctgcctcttctcagcaatgaaaaagggatacatacaaacgcggtgtacggttttaccacgatcttaatgaagatgcttgaagaggaaaaaccgacccacatgctcgtcgcttttgatgcggggaaaacgacattcagacataaaacgtttaaagaatataaaggcggcagacaaaaaacgccgccggagctgtcagagcaattgccgtttatccgcgagctgctcgacgcatatagaatctcaaggtatgagcttgaaaactacgaggccgatgatattatcggcacccttgccaaatcagcggaaaaagacggatttgaagtgaagattttttccggcgacaaggacctgacacagctggctacagaaggaacgacggtcgccatcacaaaaaagggcattacagatgtcgaatactatacgcctgaacatgtccgggaaaagtacggacttacccctgaacagatcattgatatgaaagggctgatgggagactcgtcagacaatattccaggcgtgccgggagtcggcgaaaagacggcgatcaagcttttgaaacagttccatacagtagaggagctgctgtcgtcaatagacgaagtcagcggaaaaaaactgaaagaaaagcttgaagaatttaaagaacaggctttgatgagcaaagagcttgcgacgattacgacagaagcgccgcttgaagtcagcctcgattccctcggatatgaaggttttgacagggaagcggtcgtcaagatttttaaagatctcggctttcattctttgctcgaaaggattggcgaagaggcgggagagaaagaagaagaacagttggaagagatcgatgtcatgatcaaaacagacatcacggatgacttgtttgcgtcaccggcttcactcgtagtcgaacagctcggcgacaattatcacgaggcgccgatcctcggtttttcgatcgtcaacgaacatggcgctttcttcattccggaagagacggccgttcagtcggaccgttttaaagaatgggccgaagatgagtcgaaaaagaaatgggtgtttgatgcaaaacgtgcggcggtcgctttgcgctggcggggcattgaactgaaaggcgctgagtttgacgttcttcttgcggcctatatcatcaacccggggcactcctacgatgatgtggcaagcgttgcgaaagaacatcaattacacatcgtttcagcagatgaagcggtctacggaaaaggagcgaaacaggcggttccggatgagaaggagcttgccgaccatttagccagaaaggcgaaggcgatatcgctgctgcgcgaaaagctccttgatgaactggaagaaaacgagcagctcgaactgtttgaagcgctcgaaatgcccctcgcccacattctcggtgagatggaatcgatcggtgtccaagtcgatgtcgacagactgaaaaaaatgggtgaagaactgtccgctaaattagcggaatacgagaaaaaaatccacgagtcagcaggtgaaaccttcaacattaattcaccaaagcagctcggtgtgattttgtttgaaaaactcgggctgcctgtcgtcaaaaaaacaaaaacgggctattcaacttcagccgatgtgcttgaaaagctgcgcgataaacatgtcattatcgaagatatcctgcactacaggcagattggcaagctccagtccacatacgtagaagggcttttgaaagtgatcaaaaaagacagccataaagtgcatacccgctttaatcaagctttaacacagacgggaaggctcagctcaaccgatccgaatctgcaaaatataccgatccgccttgaggagggccgcaaaatccggcaggcgtttgtcccttcgcaaaaaggctggctcatatttgcggcggattactcacagatcgagctgagggttctcgcccacatttcaaaggataaaaatttgattgaagcgttcacgaacgatatggacgttcacacaaaaacggcgatggacgtttttcatgtatcagaagaagaagtcacccctgcgatgagaaggcaggcgaaagcagtcaatttcggaatcgtctacggaatcagcgactacggcttgtcgcaaaacctgggaattacaagaaaggaagcggcagcgtttattgaacgctatttccacagcttccagggagtcaaagaatacatggaagagaccgttcaggaagcgaagcagcgaggctatgtaacgactcttttaagccggaggcggtatataccggaattgacgagccggaatttcaatctgcgcagctttgccgaacggacggcgatgaacacaccgatccagggaagcgccgcagatattattaaaaaagcgatgatcgacatggcggacaagctgaaagaaaaaaatctccaggccaaactgctgctgcaggttcatgacgaattgatttttgaagcgcctgaagatgaaatcaaagtgcttgaaaaactggttccggaagtcatggaacatgcattggagctcgatgttccactaaaagtggactgcgcttcagggccttcatggtacgatgcaaaatag

SEQ ID NO: 3547 - DNA, 1746 bp, Bacillus licheniformis
atgattaaattccggacccggcttttagctgccctgctgacgcttttgattctcgtatttgcttcactcggttttctgctcgttcacttgtttcactcctcttacgatgccaaactgagcagccatattgaaaaagaggccgctttggtcgcttcattggcaaatggtgaaaacatgaagtcttcggagcaaggagctattttagagaaggcaagccgtgaactggacagtcgtgtatcgcttattgatacaaaaggtcaggttctttttcattttgggggccgcgccgaagagcaatccgttatcaaggaagcgcttgagtcggatttaaacggtgaaggaggaggcttcaggatcaaccctgatgacgagtccgtttaccgttacgtgcagccgctcaaagatgacgggaatgtgaatggatatattctgatcagcactcctgtcgattcattgcaagacatcaatcaaaagatctggattctcctcggcgtgagccttggaacggcctttttaatcatcgccgggcttggggcgagaataacctctcaatatacgaatccgattgagtctgcgacacaagtggcgattgagcttgccaaaggaaactataaagcaagaacattcaacgaagatgaaacgatgctgagccagtccatcaatatgctggcgcagaacctgcaggacatgacaagagcccaggaaatgcagcgcgaccgtctgcaaaccgtcatcgaaaatatcgattccggtctgatcttaatcgacggaaagggttatattcaccttgtgaaccgcgcttatcaaaagcaatttcacgtagaagccgatcagcttctttaccatttctatcacgaagtgctcgaacacgaagagatcattaatctcattgaagaaatttttatgacggaaacaaaggtccgcaaaatgtttaaactgccgatcaaaattgaaagaaggtattttgaagtcgacggggttccgattatcggcatcaatgatgagtggaaaggcatcgttctcgttttccatgacatgacggaaagaaagcagcttgaagaaatgaggaaggactttgtcgccaatgtctcccatgagctgaaaacgccgattacatcaatcaaagggttcaccgaaacgcttctggacggagcgatgaacgaacgggagacgctgttgcagtttctatcgatcatcttaaaagagagcagccgtctgcaaaccttgatccaggacctgttggatctgtcgaaaatcgaacagcaaaacttcaccctgaatattcaaaattgcaatatcggtgaaatcctcgccgaaattgagatgcttttgaagaataaagcggaggaaaaaggaatcaccttgacactggaaaagccggataagccggccgttgcttccggagacccgcacagactaaagcagatctttttgaatttggtgaacaatgcgctcacatatacgcctgaagatggaagcgtgacgatttcggctgatgttctggaagatgcagtgcaagtcaaagtgagggatacgggcatcgggatcaagcagtccgaaatcccgaggatatttgaacggttctacaggatcgataaagacaggagcagaaattcaggaggaaccggtctcggtcttgcgatcgtcaagcatttagtcgaagcccaccaaggcgaaatcgacgtcgaaagcgagcggggaaaaggcaccgaattcacggtccgcttaaaacgcgcatccgagtag

SEQ ID NO: 3548 - DNA, 723 bp, Bacillus licheniformis
atgagcaaaaagatattagttgtagatgatgaggaatcgattgttacccttctaaaatataaccttgaacggtcgggctatcatgtggtgaccgccatggacggagaggccggcttattaaaggcgattgaagagaagccggatctgatcgtgctcgatctgatgcttcctaaaatggacggcattgaagtatgcaaggaactcagacagaagaagctgatgtatccgattttgatgctgaccgcaaaggatgatgaatttgataaagtgctcggtctcgagctgggtgccgatgactatatgacaaagccgttcagcccgagagaggtgacggcaagggtcaaagcgattttaagaagaacacagacgctgtccgttcagccggaggagacggaagaaccggatgcaggcgagctgatcataggcgaactgaaaatactgcctgaacattatgaggtttattttcaaaacgaacgcctcgagctgacgccgaaggaattcgaacttctcttatatttgggaaggcataaagggagggtgctgacgagagaccttctcctcaacgctgtctggaactacgacttcgcgggcgatacgcgcatcgtcgatgtccacatcagccaccttcgcgataagatcgaaaaaaatacaaaaaaaccggaatacattaaaacaatcagaggtcttggctacaaaatggaggagccgaaactgaatgattaa

SEQ ID NO: 3549 - DNA, 102 bp, Bacillus licheniformis
atggggattccatcacttaaaacagcggcttatggccgaaaaagagagattttaagcaaaacactgaaaaatcaaattgtcgaacggataggctttcgttaa

SEQ ID NO: 3550 - DNA, 939 bp, Bacillus licheniformis
atgggaaagaagcgaaataaagtatctgtcatcggagcgggttttacaggtgcaacaactgcgtttttaacggctcaaaaagaattggctgatgtcgtgctagtcgacattccgcagcttgaaaaccctacaaaagggaaagcgctcgatatgctggaagcgagccctgtccaaggatttgacgcgaatattacaggaacggcaaactatgaagatacggctggttcagatatcgtcgtcatcacggcggggatcgcaagaaagccgggaatgagccgggacgacctcgtggctacaaatgaaaagatcatgaggagcgtaacgaaggaagttgttaaatactcacctgattgtatcatcatcgttctgacaaaccctgtagatgcgatgacatacgccgtctataaagaatcgggcttcccgaaagagcgggtcatcggccagtcgggaattttggatacggcaagattcagaacgtttgtcgctcaggagctcaacctttccgtcaaagacattacaggttttgtactgggcggacacggggacgatatggttccgctcgttcgctactcttatgcaggcggcattccgcttgaaacgcttcttccgaaagaccggatcgatgcgattgttgaaagaacgagaaaaggcgggggagaaattgtcaacctgttaggaaacggaagcgcgtactatgcgccggccgcttccctgacagaaatggttgaagcaatcttaaaagaccagcgccgcgtgctgccgaccattgcctaccttgaaggcgaatacggctatgaaggcatttatctcggcgttccgacgattatcggcggaaacggtcttgaacagatcattgaacttgaactgactgaaaccgaaaaaagtcagctcgataaatccattgaatcagtcaaaaacgtcatgaaagtattatcataa

SEQ ID NO: 3551 - DNA, 1272 bp, Bacillus licheniformis
gtggcacaaggcgaaaaaattacagtctccggcggagtattaaacgttccaaacaacccggtcatcccgtttattgaaggggacggaacaggtcctgatatttggagagcggcttccagggttcttgaagcggctgtggagaaagcgtataacggcgaaaagaaaatcacttggaaagaagtctacgccggggaaaaagcgtacaacaaaaccggcgaatggcttccggaagaaacgcttgatacgatccgcgaatacctgatcgcgattaaaggtcctttaacaactcctgtaggcgggggaatccgctcattaaacgtagcgctcagacaagagcttgacttgtttacatgcctgcgtcctgtccgctatttcacaggcgttccttcaccggttaagcgccctgaagatacggacatggtcatcttccgtgagaatactgaagatatctacgccggcatcgagtacgcgaaaggctctgaagaagtgcaaaagctgatttcattcctgaaaaacgagcttggcgttaacaaaatccgcttccctgaaacatcaggcatcggcatcaagccggtttctgaagaaggaacatcaaggcttgtcagagctgcgatcgagtatgcgatcgagcacgaccgcaaatctgtgacgctcgtccataaaggaaacatcatgaaattcacggaaggcgcctttaaaaactggggctatgaagtggctgaaaaagaattcggcgataaagtattcacttgggccgaatacgaccgcatcgctgaaaaagacggcaaagacgctgcaaacaaagcgcaaagcgaagctgaagctgccggcaaaatcatcatcaaagacagcatcgccgacatcttcctgcagcagattctgacacgtcctgccgagtttgacgttgtggcgacaatgaacctgaacggggactacatttcagatgcgctggctgcccaagtcggcggaatcggcatcgcacctggagcaaacatcaactatgagacaggacatgccatctttgaggcgacacatggtacagcgcctaaatacgccggcctcgacaaagtaaacccgtcttcagtcatcctatccggcgtgctgcttcttgagcatttgggctggaatgaggcggccgaccttgtcattaaatcaatggagaaaacaatcgcatccaaagtcgtcacatacgatttcgctcgtttgatggacggcgcgactgaagtcaaatgctctgaattcggtgatgagcttatcaaaaacatgtcttaa

SEQ ID NO: 3552 - DNA, 1119 bp, Bacillus licheniformis
atgacagcaacacgcggccttgaaggggtagtcgccactacatcatcagtaagttcaattattgatgatactcttacatatgtagggtataacatcgatgatttgacagaaaaagctagctttgaagaagttgtttatctgctttggcatttaaagctgccgaacaaagaggagcttgccgagcttaaaaaacagctttctgaaaatgccggtatccccaaagaagtcattgaccatttcaaatcctacccgaatggaaaagtccacccgatggcagctcttcggacagccgtttctttactcgggctgtttgacgaagaagcagatcaaatggatgcggaagcaaactacagaaaagcggtgcgtctccaagcgaagatgcctgcgcttgtcgctgctttttcaagaatccgcaaagggcttgagccgattgagccgaatccggaactcggctttgcagccaactttctctacatgctgaatggaaaagaaccttcacctgtcgaagtggaagcgtttgacaaagctttgatccttcatgcggatcatgagctgaacgcatctacgttcacagccagagtatgcgtcgcgacgctttcagacgtttactcagggataacggccgcaatcggagccttgaaaggtccgcttcacggcggagcaaacgaagcagttatgaaaatgctttcagagattggcgaggttgaaaacgtagattcatatattcacgccaagcttgaaaagaaagaaaagatcatggggttcggccaccgcgtataccgccagggcgatccccgcgcaaaacatttgaaggaaatgagcaggcgtttgacgaatttaacgggtgaaagcaaatggtatgagatttcagagcggactgaggaaatcgtcacgtctcagaaaaagctgccgccaaacgtagacttttattctgcgtcggtttatcatagcttaggaatcgaccatgatctgtttacgccgatttttgcgatcagcagggtatcaggctggctcgctcacattcttgaacagtatgaaaataaccgcctgattcgtccgcgggctgactacaccggccctgacatgcagacgttcattccgattgaagaaagaagctga

SEQ ID NO: 3553 - DNA, 465 bp, Bacillus licheniformis
atgtttactcaagctaatttatttttgatcctgcttttggccatcgctttaatcgcgaaaaatcagtcgttgatcatcgctgtatccgtcctgcttttgatcaagctgatcggcctcgatcaaaagctgtttccagccatccaatccaaagggatcaactggggcgttaccgttattacaattgcggttcttgtgccgatcgcaacaggagagatcggctttaaacagcttggcgaagcgatgaagtcatattacgcatggattgcactcggagcgggcattctcgtagcattgatcgccaaaaacgggatcacattgcttgcagaagacccgcatatcacgaccgctcttgtatttggaacgattttagcggtcgctttattcaaaggcgttgccgtcggcccgctgatcggtgccgggattgcctatcttgtcatgcaggccgtccagcatttcacatcttag

SEQ ID NO: 3554 - DNA, 1116 bp, Bacillus licheniformis
ttgaaccaatcctatctcacagctgcgcttcgggcagtgtatgtgctgtttttgaccgctgtttgcggagcggtcggctactactcttttccgttaacctatccttttgtgattgcgcttattctcgccatcatgatcaatccttttgtggaatggctcgataagctgaccgggttcccgagaggcgtcaatgtcggaatcgttctgttcggctttttgaccgccggagccggctttttgacactggtcgttgccgagatcgtctctggaacggcctatttggctaaaatacttcccctccagtttaataaagccgctctttatatcgaatcgttttttacgaatcaaatcatgccgctgtataatgagctggccgctttttttgacggccttgaagccgcccagcaggaatcgatcattacacaggtccaaaatttgggcagtgaactcgcttcaggcacggctttattgctttcaaaaattcttgagacggtgcccctttttttcgcctttctgccgaatatggcggccgtgctgatcttttcgctcctggccactttttttatcagcaaagatctgcataaaatacaaaacaaggcacggtctgttcttcctgatcgtctgatctcgggtgcagcggctgtctatgcagaattgaaaagagcactggcaggctttgtgaaggcccagcttacccttgtggcgatgacgatggtgctcgtgttgatcgggctttccgtgttgaaggtcaatcatgctgtggcgatcgcttttctgatcgggctggtcgacctgctgccgtatttgggaacagggtctgtatttgtgccgtggattgtctatttagcagcggccaaacagctgccgctggcgatcggccttggaattctgtacatcgtcgtacttgtcttcaggcagcttgccgaaccgaagattttaagccggtcaatcggacttcaccctttgggaacattaatcgcgctgtttgccggtttcaaattgtttggctttctcggattgatcatgggccccgcccttctcgttcttattcaggctctctttacaacaggtatttttagagacatatggctgtttattaaaggaaatgaaaaataa

SEQ ID NO: 3555 - DNA, 387 bp, Bacillus licheniformis
atgaagtttttcttattatttctcgtcatttttccagcgagtgaaatcggtctgttcctcttgtccgctaattggatcggtgtgctgccgaccgttttgctgatcattttgacgggctttctcggggccgctctcgccaaaaaacaaggaatcgaagtctactacaaagtccagcgcgatcttcagtacggaaagatgcctggggccgcgattttggacgggctttgtattttcatagggggcatgctgcttttgttgcccggttttttatcggatatcatcggtttactgctgctgctgccggcaacgcgcggccgtttcaaaccatttatctcccgcaagctgaagagaatgtctgaaggcaggcggatcaacattatcaaataa

SEQ ID NO: 3556 - DNA, 1758 bp, Bacillus licheniformis
atgagaaagactaaaatagtttgtacaattggaccggccagcgaaagtgttgaaaagctcacccagctgatggaagccggaatgaacgtggcgcgcctgaacttttcccatggagatttcgaagagcacggcgcaagaattaaaaacattcgtgaagcagccggcaagctgggaaaagatatcggcatccttcttgacacgaaagggcctgaaatccgcacgcacacaatggaaaacggttcgatcgaactggcagcgggttctcagctgatcgtttcaatggacgaagccatcggtacgcctgataaaatctcagttacatatgatgggttgattcacgatgtgtcagtcggttcaacgattttgcttgacgatggattgatcggacttgaagtcactgacataaacaaggacaagcgtgaaatcgtcacgaaagtgatgaacagcggaacgttgaaaaacaaaaaaggcgtgaatgtgccgggcgtcagcgtcaatcttccgggaattacggaaaaagatgcaaacgacatcgtattcggcatcgagcagggcgttgatttcatcgcggcatcctttgtgcgccgtccgtcggatgtccttgaaatccgcgaacttcttgaagagcacaatgcggcagatattcaaatcattccaaaaatcgaaaaccaggaaggcgttgacaacatcgatgccattcttgaagtatcagacggtctgatggttgcgcgtggagacctgggtgtagaaatccctgccgaagaagtgccgctcgttcaaaaagaactgatcaaaaaatgcaatgcgcttggcaagcctgtcatcacggctacccaaatgctcgacagcatgcagcgcaatccgcgtccgacacgcgcggaagcgagcgacgttgccaatgcgatctttgacggaactgacgcaatcatgctttcaggtgaaacggcagcgggaaattatcctgttgaagccgttcagacgatgcacaatatcgcttcccgttcagaagaagcgctcaaccataaaaaaatcctttccgcacgaagcaagcaagtcagcatgtcaattacggatgcgatcggccaatctgtggcgcatacggcaatcaaccttgatgtgaatgccatcgtcacaccgacggaaagcggccatacggcgagaatgatttccaaatatcgcccgcaggcgccgattgttgcagttacggtaaacgatgcggtgtcaagaaagctgtcacttgtgtttggcgttttcgcaacaagcggacaaaaccacagctccactgacgaaatgcttgaaaaagcggtgcaaaaatcactcgatacaggcatcgtacgccacggcgacttgatcgttatcacggccggagctgtcggtgaagccggtacaacaaacttgatgaaagtgtatgttgtcggagacgtggtcgcaaaaggccagggcatcggacgcaaatccgcgtttggtgaagtggtcatcgctcaaaacgcacaagaagcggccaaaaaaatgaaagatggcgccgttttagttacaaaaagcacggatcgtgacatgatggcatcccttgaaaaagcggctgcgctgattacggaagaaggcggcttaacaagccacgcggcagtcgtaggcttaagccttggcatccctgtcatcgtcggaatggaaaatgcgacttccattctgaaagagggagaagacatcacggtcgactccgcccgcggagctgtttacaaaggacgtgcaagcgtgctttaa

SEQ ID NO: 3557 - DNA, 960 bp, Bacillus licheniformis
atgaaacgtatcggagtattgacaagcggcggagattccccgggaatgaacgcggcggtccgcgcggttgtcaggaaagcgatctaccatgacgtagaagtatacggaatttacaacgggtattcaggtttaatcagcggaaaaatagaaaagcttgaaatcggttctgtcggagatatcattcaccgcggaggaacgaagctatatacagcaaggtgtcctgagtttaaaacggtagaaggacgggaaaaaggaatagcgaatttaaaaaaatatggtatagaaggattagtcgtcattggcggcgacggttcttatatgggagccaaaaagctcacagaacacggttttccttgtgtgggagtgccgggaacgatcgacaatgacatcccaggcacagatctgacgatcggattcgatacggcgctaaataccgttatcgacgccatcgataaaatcagggatacagctacatcccatgaacgtacatacgtgattgaagtaatgggccgccatgccggggacattgctttatggtcaggtttggccggaggcgcggaatccattttgattcctgaagccgactacgatatggaagaaattattgcaaggctgaaaagagggcatgagcgcggcaagaaacacagcatcatcattgtggcggaaggcgtcggcagcggcgttgaattcggaaaaagaattgaagaagccacaaatctcgaaactagagtatcggtgcttggacatatccagcgcggcggttccccgactgcagcagaccgcgtattggcaagccgtctaggggcatttgcggttgaactgcttcttgaaggaaaaggcggacgttgtgtaggaattcaaaataaccagcttgtgcatcatgatatcattgaaatactcgagcaaaaacatacaattgatcaaagcatgtaccgcttgtctcaagaactgtcaatctag

SEQ ID NO: 3558 - DNA, 138 bp, Bacillus licheniformis
ttggctcacgtttattttttatgggtgaaggtgaaaagtgaaaggattgtgtctgccgcccgcgatttttcaaagagtttgcttaaaatttattttaaaaactttttgtttaattgtataatgagtaaggttttatag

SEQ ID NO: 3559 - DNA, 978 bp, Bacillus licheniformis
gtggctggagaattagaatttgaaaaaccggtggtcgaactgcgtgaaaagatctccgaattgaaaaagttcacacaggattccgatatggatttgagctctgaaattacgaagcttgaagctcgtcttgaaaggcttgaagaagacatttatacaaatctgaaagcctgggacagagtccagattgcaaggcacccgaaccgtccgacaacgctcgattatatcgaacatctctttaccgatttttttgaatgccacggagatcgttatttcggtgatgatgaagcaattgtcggcggaattgccaagttccggggtcttcctgtgacagtaatcggtcagcagcgcggcaaggatacaaaagaaaacatccgccgcaatttcggaatgccgcatcctgaaggctaccgcaaagcgctcaggctgatgaagcaggccgacaaatttaacaggccgatcatctgctttattgatacaaaaggagcatacccgggcaaagcagctgaagagcgggggcaaagcgaagcgattgccaagaatctttttgaaatggcgggactctccgtgccggtcatctcgatcgtcatcggggaaggcggcagcgggggagcgcttgcgctcggcgtcgcaaaccgcttattgatgctggaaaactcaacttattcggtgatctctcccgagggagctgctgctatcctctggaaggattcaggactcgcgaaaaaagcggcagaaacaatgaaaatcaccgctccggaccttaaagaattggatattatagatcatgttataaaagaagtaagaggcggagcacaccgcgatgtggagcagcaggctgcctacatcgacgaagcgctgaaaggcgagcttaaatccctgctgaaactggataagaacgagctgatccaacaaagatataacaagtataagtcaattggaaaaatttcgactgaaaaccaatatgttgggataaaataa

SEQ ID NO: 3560 - DNA, 876 bp, Bacillus licheniformis
ttgttaaaagatatattcagcaaaaagaaaaaaaaatacgcttccgttcccgcggaatcagcgaagcaagatgtaccggaagggatcatgacaaagtgcccggattgtaaaaaaatcatgctcacaaaagagctggataaaaatttaagggtctgcatgaattgcggttaccatcttcaaatgaacgcgaagcagcgtataaaaagcctgctggacgatggctcctttgaagaattcaatcaggatatgatgtctgaaaacccgctggagttcccgggataccttgaaaaattgcaaaaagaccgggaaaaaacgtcgctgaatgaagcggttgttaccgggaaagggacgattgacggatctccggcggtcgtggccgtgatggattcatctttcagaatgggaagcatgggatctgtcgttggcgaaaaaattacgcttgcaatcgaaaaggcaagagaagaaaaagtacctttcatcatttttaccgcatcaggcggtgcaagaatgcaggaaggccttctcagcttgatgcaaatggctaaaacaagctccgctttgaagctgttcagcgaagagcagggcttgatcatttcagtgatgacgcatccgacaacaggcggcgtatccgcaagcttcgcatccctcggcgattacaaccttgccgaaccgggcgcgctgatcggctttgccggaagaagaattatcgaacaaaccatccgtgaagaactgcccgaggattttcagactgcggaatttctgttaaagcatggccagcttgattccgtcgttcacagagctgacatgaaaaaaacgctcggcagcattttgaaaatgcaccaaactggaggtgatctcgagtggctggagaattag

SEQ ID NO: 3561 - DNA, 1236 bp, Bacillus licheniformis
atgtcattgaaagaaaaagcactgcatatgcacaaagtaaaccagggcaaattggaatcaaaatcaaaagtgcaggttcgcaatgcggacgatttaagccttgcatattctccgggtgtggctgaaccctgcaaagcgatttacgatgataacagcaaagtatatgattatacaatgaagggaaacatggtagcagtcgtctcggacggaacggctgtgctcggcctcggcaatatcggccctgaagccgccctccctgtgatggaaggaaaagcggttcttttcaaaagctttgccggtgtggacgctttcccaatctgtttaaatacatctgatgtcgataaaattgttgagacggtcaagctgcttgagccgacattcggcggcgtcaaccttgaagacattgcagctccaaactgttttgtcattgaagaacgcctcaaaaaagaaacgaaaattccggtgtttcacgatgaccagcacggtacagcaatcgtaacggtagccggtctcgtcaatgcgcttaagctgtccggcaaaacgatgtcttccgtcaaagttgtggcgaacggcgccggcgcagcgggaattgccatcattaagcttctttatcatttcggcgtgcgcgacatcatcatgtgcgacacgaaaggcgcgatctacgaaggccgtccgaacggcatgaacgcagttaaagaagaagtcgcaaaatatacgaacaaaaaccgcatagacggttcgctcaaagacgtgatcaaagacgccgatgtctttatcggggtttccgtcgaaggcgctctgacaaaagaaatggttgaaagcatggctgacaaaccgatcatcttcgccatggcgaatccaaatcctgagatcatgcctgccgaagcgcatgaagccggagcaagcgtcgttggaacgggacgctctgacttccctaaccaagtgaacaacgttctcgcttttcctggcatcttccgcggggcgctcgacgtccgcgcgacacatatcaacgaggagatgaaaatcgccgcggttgaggcgatcgcgtcactcgtttccgacgaagagctgagacctgaatatgtcattccggctccgttcgatccaagggtcgcaccagctgttgccaaagcggtagccaaagccgcgatggaaacaggcgttgcacgaatcgatgtcaatccagaagaagtcgctgaaaaaacaagaaagcttgcagtgattgaagggaaataa

SEQ ID NO: 3562 - DNA, 3345 bp, Bacillus licheniformis
atgccttttgttcacctgcaagtacatagcggttacagcttattaaacagcgccgcttccgtagaggatctcacggccaaagccaaagagctgggctacagcgcaatggcgctgacggatgacgaggtcatgtacggggcggtggaattttataaatcatgcaaaaaacgcggcatcaagccgattatcgggctgacggcttctgttttaacagatgaaaaagagcagctatcatatccgctcgttcttttggcgaaaacaaacaaaggctatcaaaacctgctgaaaatcagcagcgtgttgcagtcaaaatcaaaaaccggcatcaaggaaaaatggctcaaaagctatcatgaaggcctcatcgcgctgacaacgggcgggacaagccatgttgaagcgctgttgaaagaagggctgatcgaagaggcgaaggacgctgccctccgctgcctttcgatctttggagagggcagcttctatttgtcgtatcagccgtacaagggagacccgcttctttctgaacgcattttagagctaagcgaacatacgggaattccgattgccgcaaccggcgatgtacgctacatcgaaaaggaggacgcggcagcttacacgtgtttaaaagcgattaaagcgggcgagaagctgaacgaagacatgaaggccgaaggagatctgcatcttgagctcaagccgcccgctgaaatgctggacatttacagagatcgtccggacgcgttggagaatacagtcaaaatcgcggaccgatgccaggtggacctgagccttggccagacgcgcctgccgaaatatccggcgccttccggcaagaatgccgacgattatttggccgagctttgctttctcggactgaaaaaacggttcgaagccgctccgaaggagtatgtcgagcggcttaagtatgagctgaaagtgattcgcgacatggctttcagcgactattttttgatcgtctgggatttcatgaagttcgcccacgataacggcattatcacagggccggggcgcggatcggcggccggttctctcgtcgcttatacgctgtttatcacagatgtcgatccgcttaagcacaaattgctgtttgaacggtttttaaatccggagcgcatcagcatgcccgatatcgatatcgattttcccgatacgagaagggatgaagttattcagtacgtgaaaaataagtacggggcactgcacgtagcacaaataaccacgttcggtacattggccgcaaaagcggcgctccgagacgtcgggagggtgatgggcatcagtccgaaagaagccgaccagctggcgaagctgattccctccaaacccggagtgacgctgaaagaggcgagagcactttcacctgaacttgacaagcgcctaaacggctcaaaaaagcttcaggacatatttaaaacggcgcagaaaatcgaagggcttccccggcatacgtccattcatgcggctggcgtcgtattgagcgaggagccgctgacgaatatcataccggtacaggaaggtcatggcggcgtatatttaacgcaatattcgatgggctatctcgaagacttgggacttttgaaaatggattttctcggcttgcgcaatttaacgctcattgaatcgatcaaaacgctgatcgaaaaaagcgagcgggtcactatcgatttctcggcgattccctatgatgatgaacagacgtttaagctgctggctgaaggagatacgacaggtattttccagctcgaatcagccggcatgagaaacgttttaaaaaggctcaagccatcgagccttgaagatattgtcgccgtcaatgccttgtaccgcccgggcccgatggaaaacatcccgctgtatatcgaaaggaagcacggacgggttcctgtgtcttatccgcacgaggatttggccgatatcctgaaagatacgtacggcgtgatcgtttatcaggaacaaatcatgatgatcgcatcccggatggcgggtttcaggcttggagaagccgaccttttgcgaagggcggtcggcaaaaaaaacaaggaaattctcgatacagagagaaatcattttattagtggatgtttgaaaaaaggatattccgtacaggcggctaatgaagtatacgatctgattgtgaaattcgccaattacggttttaaccggagccatgccgttgcatacagcatgatcggctaccagctcgcttatttaaaagcgcattatcccctctactttatgtgcggcctcttgacgagtgcgatcggaaatgaggaaaagcttgctcagtacatctatgaagcaaaagggaaagggctgaatgttctaggtccttccatcaataagagcggctatccgtttgtcgtggaaaacggggcgctgcgctacagtttaagagctgttaaaggcgtcgggatagcggctgtaaaagagatctacagagccagaaaagaaaagccgttcgcagatttgtttgatttttgtgtgaggacttctgtgaaaagcgtaaatcggaaaacgattgaagccttaatttttgccggagcaatggatgaattcggtgaaaaccgggctactttgctcgcttctgtcgatgtcgcgctggagcatgccgaattgtttgcaggagacaatgatcagctaggcttctttctcgatgaaggcttgacaatcaagccgaagtacgccgagacggaggaaatgccgctcgtcgacctgctggcacacgagaaggaaacgcttggcatttacttttctgaccatccgctgagcgtccaccgcaagaaactggaccgtgcaggtgcgctgccgattattcagctgctcgcctccggccgcaaaaaagcggctctgggcggacttttgacgaggatgaagacgatccgcacaaaaacgggacagacgatggcttttctggagctgagcgatgaaagcggggaaatggaggcggttgtttttcctgaacagttcaggcagctttccccgatcctggaagaaggcgtatcgctttttgcagaaggacgccttgagacaaggaatgaaaaacgccagctgattatttccggggcatcgctcgtcgaatcgcttcatgcgaaaaagcagccgtccgtctatattaaagtggaggaaagccagcacacccacgatattttcaagaagatcagcagcatcctgcttgaacacaaaggggaaacgccggtctgcgtctattatgaaaaacggaagcagacgatgcagctgccggaaagctataatatcaaggctgatcacgctgctctatacaggcttaaaagcgttgtaggtgagaaaaatgtcgtgctcagatag

SEQ ID NO: 3563 - DNA, 342 bp, Bacillus licheniformis
atggatcctgaacagccctttttcccaaactttatcagctgttattttattgcgcttggagtgcttctcggcggttgtttaatcggggggatcggcgcctatctgtcggggcagccgcctttaacgatcattacaagtctcgcaaaccgcctgaaaatctgggcgctggttgcggcaatcggcggcacgtttgatgcggtctacagctttgaaaggggcattatcgaaggcaatacgagagacatcgtaaaacagcttctcctgattctttcggcgatgggaggagcgcagaccggttatctgatcatcaactggctcacacaggagcatatttcctcatga

SEQ ID NO: 3564 - DNA, 504 bp, Bacillus licheniformis
atgagaatccctccatattataaaaagcctgggtggcagcgtttttttgcgggaatgatgtgcggagccatcatcagctggttcgtgttcctgtttacatacggaacctttcaggagaagcaggtcgtcttgatcagggaacagaaagagcgcatcaatgatttaaatgaccagatcaccatttaccgcgaggatctgcataagctgaatgaagacaataaaagaaaactgctgattcaaagcgtcgacgtcaagctgatcaacggcaagcaatacaagctgtcacagccggacatgatgaactttgaggagcatatccgggataacatttcagatgtcattacaaaggatatcgaaagcgtctaccggacgaaggagcttttaaagcggacgattgaaaataaagagtatacgataaacgataaaaagtacaaggcgaaagtcaccgaactgacgatttatacgcggctttccgttgaaatcaaaatctctttttccgaataa

SEQ ID NO: 3565 - DNA, 180 bp, Bacillus licheniformis
atgtacatttacagttaccatcagctggcaagagataaagtcaaccggatcaagctgggctactcggcttatgcggaaactgaaagtctcgcgtcccttatcaaaaaagagttaaaggcccaaaacatccatgtttatgaggatgtaacagatatcggatcatggtttatacctgaataa

SEQ ID NO: 3566 - DNA, 945 bp, Bacillus licheniformis
atgaaaaaagaaatcatcagaaccatatcattatatgacacgatcattatacatagacatgtgagaccggatcctgacgcctacggatcccaatgcggccttacggaaatcctgagggcaacctaccccgaaaaaaatattttcgcggtcggagctcctgaaccttctctcgcttttttgtataccccagatgtgattgaagacccggtgtatgaaaatgcacttgtcatcgtttgcgacacggcaaatcaagcgagaatttcagattcgcgctacaacctgggcgacaagctgatcaaaatcgaccaccatccgaatgaagaccggtacggcgaccttttatgggtggatacgagtgcgagctcgacgagcgagatgatttacgaactgtatttagcgggtaaagaacaagcgggatgggcgcttccaacaaagggcgccgaactgatctatgccggcattgtgggggatacagggcgcttcttatttccgaacacgacaaaaaagacattgaaatatgccggagagctgatcgagtatcctttttcttcccaggcgctttttgatcaattatatgagacgaaattaaatgttgtgaggctgaacggctatatttaccagaatgtttctctgtccgaaaacggtgttgcgtcggttttcatcacccgcgatattttacatcaatacaatattacgccgtctgaagcttcacagcttgtcagcacgctcggcaatatttcggggatcaaagcatgggtgttttttgtggaggaagccgatcaaatcagggtaaggcttcgttcaaaggggccgattgtcaatgaagtcgctaaaaaatacaacggcgggggccatccgctcgcagccggcgcttccatctatgactggaaagacgctgatcttgtcatcgctgacctggagcgtatatgcaaagaaaacaaataa

SEQ ID NO: 3567 - DNA, 303 bp, Bacillus licheniformis
atgccgttttttgttttttttattgtggtttcagcgatagcttatgtgtacttcaaagtaaggtatgtgcgcaccaaaaaaacggttgaacgggaatactattcggccaagtcaagcatgagtctgggcctgtttatcatgttcttcggcgccaatcagctgattttaaaccgcggcacgctggctgtcgtcatcggcgttatttttatgctgaccgggctcgggagcatgtgggccggctacaaggcctataagcactatgtccctttgcttgcgaaagaaaacgaacgggagaacgcataa

SEQ ID NO: 3568 - DNA, 1323 bp, Bacillus licheniformis
ttggcgacaaaacacgaacagattttaaaatatattgattctttgtctgtcggcgaaaaaatctccgtcaggcggattgccaaagaaatgaaagtcagtgaaggaactgcttacagagcgataaaagaagccgagaataaagggtttgtcagcacgattgaaagggtcggaacgatcaggatcgagcaaaagaaaaaagagaatattgaaaaactgacatatgctgaagtggtgaatgtcattgacggccatgtgcttggcggaaaagcagggcttcataaaacgctcaacaaattcgtcatcggagcgatgaagcttgatgcgatgatgagatataccggagcgggcaacctgctgattgtcggcaaccgaatcgatgcgcaccgccaggctttggaagcgggtgctgccgtactggtgacgggcggttttgatacggagccggagattattgagcttgccgacaggctcgagctcccggtcatttctacaagctatgatacgtttactgtagcggcgatgatcaacagggcgatttatgaccagctcatcaaaaaagaagtcgtgcttgttgaggatattttgactcctttagaaaaaacagtctgcttatcacctcatgaaaagctggaaagatggtatgagaaaaactttgaaactgggcacggccgctttcccatcgttgacgagcagatgaaaatccacggcattttaacttcgaaggacgttgccggatatgaccgcagtgtattgattgaaaaagtcatgacgaaaaacccgattacagtgatcggaaaaacgtctgttgcttcagccgcgcagatgatggtctgggaagggatcgaagtgcttcccgtcgttgacgagcggcaaaagctgatcggcatgatcagcaggcaggatgtattaaaggcgcttcaaatgatccaaaaacagccgcaggtcggagaaaaactcgatgacatcgtgaccggcggtttcaaagaatcggacaatgacaaaaacaagccggctccggtctatcaatacgaagtaacgccgcaaatgacaaaccacttggggacgatttcctacggcgtgtttacgacgattttgaccgaagctgcaaaccgctttttgcggtcgcgcaaaaaaggcgagctcgtgatagagagcatgacgatttattttttaaagcctgtgcaaatggagtctgtcattgaaataaaaccgaacattctcgaagccgggagaaagttcgggaaaatggatatagaagtttttcaccagggtgctctagtcggcaaagcgatgatgatggttcagctgatggaaagaagctaa

SEQ ID NO: 3569 - DNA, 558 bp, Bacillus licheniformis
atgagggtattgaaatacgcgattttggggctccttgatcatgggagtttaagcggctacgatatgacaagccggtttaaagccgaattgggccaattttggagcgccaagcacagccagatttatcccgagctgaaaaagctgacggatgaaggatttatcgaatttgaaacggtgatccaaggctcaaaattagaaaagaaaatgtattccatcacagaagccggaaagcgtgaacttcacgggtggcttacggaatttaagccggttccagatacggtaaaagatgaatttatgctgaaagcttattttatctcttcgatggaacctgatgaagcgaaaaggctttttaacgatcagcttcaaaagagacaggaaaaagctgcttttttaaacaccaagctcgatgaattgaagcgcgaagcgggtgattcaataacgttccgctcgcctcatttcggccattaccttgtattgacccgggcgcttgagcgggaaaaaggctattgctcatggcttgaaaaagcgcttctcctgatggaggatgataaggcttag

SEQ ID NO: 3570 - DNA, 687 bp, Bacillus licheniformis
atgaaagtggcatatcatggtcattcagtggtaacagttgatacgggagatcatcagttgatcttcgatccgtttattacaggaaactcattaaccgatttaaagcccgaagatgtcaaagcggacgtcatcttgctgactcacggacataacgatcatgtcggcgataccatcgaaatcgccaagcgaaacaattcgctcgttgtagctccgaatgaactcgcggtctatctaggatggaaaggcctgaatgtacatccgatgcacatcggcggctcccaccagttcgattttggaaaagtcaagctgacgcaggctttccacggatcggcttatacggaagaagacagccaaaagatcgtctataccggcatgccggcggggatccttctgactgtggaaggaaggacgatttttcatgccggcgacaccgggcttttctcagatatgaagctgatcggtgaattaaatcatatcgaccttgccttcttgccgatcggcgataattttacgatgggccctgaggacgccaaactggccgcagaatggctcagagcgaaacaggttgtcccggttcactactcgacgttccccgtcatcgaacaggatccgcatgcatttgcggacagccttcctggaggcgtcggaaaagtgcttgaggtcggtgagtcaatcgaatttaagtaa

SEQ ID NO: 3571 - DNA, 762 bp, Bacillus licheniformis
gtgcgccatgcgttaattactgccggttcaaaaggtttggggcgtaaagtgacggaagccctgcttgaaaaaggctactcagtgacggtgaattacaggcaagacgaagaagctgtccgccgcctcaaagaaaaatggcggtcatcccttgaccgtttgcagtttgttaagggtgatgtcaccaggaaagaagacctgctccggatggtgaatgccgctcttgagcgatttggaaaaattgatcttctgatcaataatgccggcccatacatatttgaacgaaaaaagcttgcggattatactgatgatgaatggtatgacatgcttgaaggcaacttaagctctgtcttccatctgtttaaagcggttgttccgatcatgaggcgccagcggttcggccgaatcatcacttacggatttcagggggccgaccatgcgcctggctggctgcatcgttccgcttttggagcggcaaaagtagggctggcttctttaacaaagacgatcgccattgaagaagcgggctccggcatcacagccaacatggtctgtccaggcaacattgtcggggatatgaaagaggcctcgatttcagaagcgagggcgtcacttgatgaggaaacgccgatcggcaggtcgggaaccggtgaagacatcgcaaggatcatcacttttctatgcgatgaacattccgactacattacgggaacagtcattgaagccacaggcggcttgaatgtgattaaccgtcattctctctag

SEQ ID NO: 3572 - DNA, 144 bp, Bacillus licheniformis
atgaaacaagatcagtcaaaacacggatatatgtatgatgccgacggagataaagaaaccgttcagcagatctctgatgcttatttcagcgggtttgtcgcgcacgatgacgcacagccgttagctgacgcagataaacaatag

SEQ ID NO: 3573 - DNA, 1380 bp, Bacillus licheniformis
atgaaaaagctgtggggaggccggttccaaaaaacaccggaaaaatgggtcgatgagttcggcgcatcgatccactttgacaaaacgcttgtaaaagaagatatcgcagggtctctcgctcatgcttccatgcttgaaaaatgcggcattttaaccgaagcagaagcggtcaaaataaaggaaggcctgacatcccttttgcacaaagcggaaaaaaacgaactcgatttttcagtcgattgcgaagatattcacctcaacctagaaaaaatgctcattgatgaaatcgggccgctcggcggaaagcttcatacggccagaagccgaaacgaccaggtggcgacggatatgcacctgtatttaaaagggcacactgagcatatcatcgagctgattacggcttttcaacacgttatgatcgaaaaagcggaagaacacgtggagacgatactgccgggatacacccatttgcagcgggcccagccgatctcgttcgcgcatcatttgctggcttacttctggatgctggagcgcgataaagaacgctatcatgattcattcaagcggattaacaagtctcctctcggatgcggggcgctcgccggaacgacgtttccgatcgaccgtgaatattccgcagacctgctcggctttgattcgatatatgaaaacagcctggacggcgtcagcgacagggatttcatccttgaatttttaagcgcgagcagcattctgatgatgcatctgtcaagattctccgaagaaatcattctttggtgctcgcaggaatttaaattcattgagcttgatgacacctacgcgacgggaagcagcatgatgccgcaaaagaaaaacccggacatggcggagctcatccgcgggaaaacaggacgcgtatacggtgatctgatcggactcctcacgattatgaaggggctcccgttagcatacaataaagatttgcaggaagacaaagaaggtatgtttgatactgtgaaaacggtcgaaggaagccttgagatttttgccggcatgattaaaacgatgacagtgaacaaaaatatgatgaaaaaagcaacggagcaggatttttcaaatgcaactgaacttgccgactatctggcgaaaaagggcatgcccttcagagaagcgcacgaagtcgtcggaagacttgtcttcacctgcatcgaaaagggcatttatctcagcggcctgccgtttgaagagttcaaaaaggcaagcgggctgtttgaagaagacgtctacatcgtgctcgacccgcaccatgccgtcgaaaaaagaatgagcgaaggcgggacgggattcaaaaaggtgacagaagccattcaaaaggcgaagcagtgtttgaacaatttttaa

SEQ ID NO: 3574 - DNA, 1212 bp, Bacillus licheniformis
atgacgcaaaagaaaaaagtggtattagcatattcaggaggacttgatacttctgtcgcgataaagtggcttcaggaacagggatatgatgtagtggcctgctgccttgacgtcggagagggaaaggatctcgcctttgttcagcaaaaagcgcttcaagtcggagcctctaattcttatgttatcgatgcaaaagaagaatttgcgaaagagtttgcgctgaccgccctccaggcccacacgctttatgaaggaaagtatccgctcgtatcagccctgtccagaccgctgatcgccaaaaagctcgtcgaagtggctgagaaagaaaacgcgcaagccgtggctcacggctgcacaggcaaagggaatgaccaagtgcgcttcgaggtgtcgattaaatcgctcaatccggatttggaggtgctggcacctgtgcgcgaatggaaatggtctcgcgacgaagagatcgcgtatgcagaaaagcatggcattccaattccgatcaatcttgacagcccgtattcaatcgaccagaacctgtggggcagaagcaatgaatgcggagtcctggaagatccttgggccgcgcctcctgaaggagcgtatgatttgacgaagcctcttgaaaaaacaccggatactcctgatgtgatcgaaatcgcttttgaagaaggcgttcccgtatccattgacgggactcactacccgctgtcagacttgattttaaagctgaatgaactggcgggcgcacatggagtggggcgcatcgaccatgttgaaaaccgccttgtcggcatcaaatcgcgcgaagtttacgaatgcccgggcgcgatgactttgattaaggcgcacaaggagcttgaagatttgacattggtaaaagaagtggcgcatttcaaacctataatcgaacaaaaaatggctgaagtgatctataacggcctctggttttctccgcttaaagacgcgctttccggtttcctgaaagaaacgcagaagcatgtcacgggcgtcgtccgcgtcaagctgtttaaaggccatgcgatcgttgaagggcgtaagtccgaatactccctgtatgatgaaaagcttgcgacgtatacaaaagacgatgcattcgatcatcacgctgcagtcggctttatcgagctgtggggactgccgacgaaagtaaacagcatcgtccaaaaaaaggagcagattaaagcatga

SEQ ID NO: 3575 - DNA, 519 bp, Bacillus licheniformis
atgagtgttgaagagcataaaaaagaagcgccggactgcgtcaactgcaaagtcattaccgtcagcgatacaagaacggaagacacggataaaagcggccggctcatgaaagagtttttagcggaagccggtcatgagatcgtttcctatgagattgtaaaggacgaaaaggaaataattcaaaaagctgtgctgaaaggctgtcttgacgaccggatcgatgccgtcctattaaacggagggactggcattgcctcaagagatgtaacaatcgagtcgatcgttcctcttttttcgaaagaaattccggggttcggggagatattccgcatgctgagttatacagaggatatcggagcggctgcgatcctctcaagggctgcagcaggtgttattcaaaacaaagccgtatttgcaacaccgggttcaagcggtgccgtaaagcttgcaatgtcaaagctgattgtgcctgagcttgcccatgtcatcagagaactgagaaaagatatgaaaaagtaa

SEQ ID NO: 3576 - DNA, 1188 bp, Bacillus licheniformis
atgtccaaaattattgcaatcaatgctggaagctcatcactgaaatttcaactgttcgaaatgcccagcgaaaaagtattaacaaaaggccttgttgagcgaatcgggctggataacggcatcttcacgatttccgtcaacgacgaaaaaaagactgagacaacagatattccggatcattccgtagctgtaaaaatgctgctggataaactgacaaaatttggcattatcaaggatttaaatgaaatcgacggaatcggtcaccgcgtcgtacacggcggcgaaaagttcagcgactccgttttattgacggatgaaatgatccatgagatcgaagagatttcagagcttgcaccgcttcataacccggccaatattgtcggaattaaagcgtttaaagaagttcttccgaatgttcctgccgtggccgtttttgatacggcattccatcaaacgatgccggaacaatcttatctgtacagtctgccatatgaatattatgagaaattcggcatccgtaaatacggtttccatggtacatctcataaatatgtgactgaacgcgcggcagagctgcttggccgtccgattgaagaacttcgcctgatttcctgccaccttggaaacggagcgagcatcgcagctgttgaaggcggcaaatcaatcgatacatcaatgggcttcacaccgcttgcaggtgtagcgatgggtacgcgttcaggtaacatcgatcctgcgcttatcccgttcattatggaaaaaacgggtcaaacagccgacgaagtcctgaacacgctcaataagaagagcggtcttttaggtatttctggattctcaagcgatttgcgcgatatcgttgaagcaactaaagaaggcaatgaacgtgcggaaacagcactcgaagtattcgcaagcagaattcataaatacatcggttcttatgcagcgcgaatgagcggagtagacgcgattattttcactgccggcatcggggaaaacagcgttgaagtcagagagcgcgttcttcatggtttggaattcatgggcgtctattgggaccctgccttgaataacgtccgcggaaaagaagcgtttatcagctacccgcattcacctgtaaaagtcatcgtcattccgacgaatgaagaagtaatgattgcaagagacgtcgtcagactggcacactaa

SEQ ID NO: 3577 - DNA, 72 bp, Bacillus licheniformis
ttgaatttactaagaacgattttatacatattttttatgttccgggttgaacataatgtcaccggactatag

SEQ ID NO: 3578 - DNA, 987 bp, Bacillus licheniformis
atgcaaaactatccagtcgaaacgatttatgaatggcttgacaaaggagcggaagtcatcgcacgcgatcggcagatcccttacatagaaggattggcggaagccggagaggcattctttacaggttctgcggaccgcgggctttccgaagaagccgaacaaaaggtgaaggatctgatcggccgtgcgcgcttttcagagtgcagtcatgagtcgatacggaaagccttccagcttgccatactgaaaggccagaaagatattcctcatccgaacaggcagatgacgcccgatacgatcggattatttatcggatatcttgtgaacaaatttatggagcggaaaaaaggattgacgctgtttgatccggcggtcggcactggaaacctgctgcttgccgttttgaaccagctggctgaggaagcgggaaaagcgttcggctcagagattgatgacgtcctgatcaagctggcctatgtccaggcaaacctgcaggaaaaggaaatcgagctttttaaccaggacagcctgcagccgatttttatggaacatgccgatgcggtcatctgcgatcttcctgtcggatattatcctgatgacgaaagtgcgcgcgctttcaaattaaaagcagatgaaggccactctttttcacaccatttgtttattgaacaaagcttgacctatacgaaaccgggcggctatttattttttatgattccgaaccatttgtttgaaagcggtcaaagcgaaaagctgcgtacctttttaaagaacaatgcgtatattaatgcagtgcttcagcttccgctgtccattttcaaagatgaagcacacgcgaagagcattttggttttacaaaagcatggggaacaggcgaaagcgcctaaacaggttctgctcgcgcaagtcccgtcattcgccaatcaggatgcgatgctgaacatgacagccaaactcgacagctggttccaggctgaaaaaagataa

SEQ ID NO: 3579 - DNA, 504 bp, Bacillus licheniformis
atggcttcaattacatttaagggaaacccggtgacactggtgggttcagaagtgaaagtcggagaccaggcgcctgatttcacggttttgtccaattcgcttgaggaagtcacacttcaggacatcaaaggcaaaccggcggttatttcggtgattccgtctatcgatacaggtgtttgtgacgcacagacccgccgctttaacgaagaagccgcaggcctcggttcggtgaaagtgtatacgatcagcgctgacctgccgtttgcacaggcgcgctggtgcggagcaaacggaattgaaaatgtggaaacattgtcagatcacagggagatgtcttttggggaagcattcggggtttacattaaagaattgagattgcttgcccgcgccgtatttgttttagatgaaaacggaaaagttgtctacactgaatacgtcagcgaagcgacaaaccatccggactacgacaaagccatcgaagctgccaaatcactcgttaagtaa

SEQ ID NO: 3580 - DNA, 459 bp, Bacillus licheniformis
atggctgaacatccaattcaaggtttgatgaaaaccgcaatggaaaacttaaaagaaatgattgatgtcaataccattatcggagatcctgtggaaacacctgacggcagcgtcatcctaaccgtctccagagtgggattcggctttgcggctggcggaagcgagttcggcggcaataaaccggccgaatccaaagcgagcgatggagaccgcgaacgaaaagaatcgaagctcccgtttggcgggggaagcggaggaggcgtatcgattacgccgattgcttttttgattgtcggatcatcaggcgttaaagtactgcatttggatgaaaacacgcacgtcatcgataagattttagactcagctccgcaaacgatcgaacggattcagcatatgtttaagaaaaacgataagcagaagcaaaatatgaaccgtcaaaaccagacgcctcctttttaa

SEQ ID NO: 3581 - DNA, 684 bp, Bacillus licheniformis
atgatttacatatggattgcgggagtattcattcttttggcagcattgatgataatgaaaatccgcgtagcgatcgagtatcttcatacagacgatgacgaccggctgaccgtcaaagttcggacggcttttggccttctgcgcattaaaagggagattccggtgattaaaatcaaccaggaggatatgaccgttgatgtgaaagaacagacgaattcggctctgaaaaaagataaaaagaggagaaaaatcggctatcgggaagtgttcgatagtacgaagcaaatcaaaaaattggtggaacagatcatcaatatgcagccgatcatccgccggtttatgaagcggattcacgtcacgaagctcgaatggacctctgtcctcggctttcctgacgcggctttaaccgggattgtcacaggcggcgtctggtccctgaaagccggcacggtggctctcttgcatcagcttttttgctttgacagccagccggaatacgaggtgattccaggctttaacagccgttcctccaaaacgcatctgacatgtatattccattttcgggttggacatgctataaccgcagctttcagaatcgtggtgaactggaaagggaaaatgcgcggcttatttaagctgccaaaaaatctgtcaggttcaacaaagaatgattcatcagtatag

SEQ ID NO: 3582 - DNA, 519 bp, Bacillus licheniformis
atggatgtgacttatgatggaaaggatcataatgaattatcgcctaatgtcggcgtttccagggaagaatcggccccgcatgtagagcatgcctatgccggtttttggatcaggctgtttgcttttctgcttgacggggttgttatcggcagcatcaacaacttagcggtttcacccgttttcagcctgctgaacctccctaaagaatcagggtttttcaccttttcgctttattcttttgtgacggcggcagtattttttgcttactttgtcctgatgacgaagtatttcggacagacgttgggcaagatggtattcgggctgaaggtcgtgtcgcttgtcccggaaaaagggctgacatgggatgtggtcctgtttagggagtttatcggccgctatatcaacagtttatatattacgtatctcgtagcagcgttttcgcctaagaaacaagggattcacgatttctttgcggacactgcggttatccatgaaaaactgtatcgaaaaaaagactga

SEQ ID NO: 3583 - DNA, 1008 bp, Bacillus licheniformis
atgaatgcgaaaagatggatcgcacttgtcatcgcgctgggcgtttttgcgttatctgcggtgatgagccttttgcttgcagtatttgacacgatggggaatgacggaaagttgcagtttggcctcaatgacacccaggaagaaacggtgcttgaacaaggaaacacctcaagaaaaatcgccgttcttgaagtgaacggaacgatttccgacaatggcggcgcttcaggcctgttcagctctgaaggctacaaccacagatcgtttttgcaaatgcttgaaaaagcaaaagacgattctgccgtaaagggcattgttctgcgcgtcaattctccgggtggcggagtatacgagagcgctgagatacataagaagcttgaagagatcaaaaaagatacgaaaaaaccgatttacgtatcaatgggatcgatggctgcgtccggcggctattacatttcaacgcctgccgacaaaatctttgcagcgcctgacacgctgacgggttcactcggggtcatcatggaaagccttaactacagcaagcttgcagagaagcttggattaaaaacggagacgattaaaagcggtgagtttaaagatatcatgtcaccgacgcgcgatatgacgaaaaaagaaagagaaatcatgcagtcaatggtcgatgacgcgtacgaagggtttgtagatgttattgccgaagggcgcggcatgtccgaaaatgacgtgaaaaaaattgccgacggacgtgtctatgacggccgccaggcgaaacagaaccatctcattgatgagctcggctattatgaagatgcggtcaaagcgatgaaaaaggaccacaaaaaccttgccggcgcatctgttgtcagctatgaagaatcagccggccttgcctcgctgttttcaatgactgcaaataagatgtttaaaagcgaagctgatttcttaaacattaaagaagcgatttctcaatccggtgcaccgagactcatgtatttatatgccaaatag

SEQ ID NO: 3584 - DNA, 798 bp, Bacillus licheniformis
gtgacagaccgccgaaacatttatttcttttacaaaaaaagcgaagaaaccgacgagcagtgcaaaaaactgaaacagcttgccgaagaacacggatttcgcgtcgttcaccatcacaatgaagccaatattatcgcaagcatcggcggcgacgggacatttttgcaggctgttcgaaagacgaacttcagggatgactgcctgtacgtaggcgtggccaaaaaggggaaagctcatttgtatgcggattttaatatatatgataccgataaaatgattgaagcgacaaactcggagcaaatcgaggtcagaaaatatcctctgatcgatgtaaccgttgacgggaccagctttcaatgtctaaatgaagtatccatccgttcaagcattattaaaacatttgtaatggacgtctatatagatgatcttcattttgaaacattccggggggacggaatgatcgtgtccactccgaccggaagcaccgcttataacaaatcggttgatggggcaatcgttgatccgctgattccatgcatacaggtgacagagctcgcttcattgaacaacaacacatacagaaccctcggctcgccgtttattttaagcgcggatcgaaagctgacattaaaaatcgtccaggacgggaacgactatccgatcatcggccttgataacgaagccttcagtacgatgaatgtgaaagaagtcgaagtcagcctctccggcaagatgatcaaaaccattaaattaaaagataattcgttctgggaaaaagtaaggcgcacatttctataa

SEQ ID NO: 3585 - DNA, 636 bp, Bacillus licheniformis
atgagtaaaggacgtttgatgatcatcaatatgattggtattatcgcaactttagcgcttgtcgctgtatgcggatattactattatcaaaatgaacattatgtcacgacggatgaagcaagggtttccgcaaatatgacaaaaataacggcgcctgcttccggaaaattaagcggctgggatgcaaaagaaggcgaccatatatcagacggcgacaacctcggaaaaatatcggacgggcagcagtcggtagctgtcaaagccatttccgacggaacactggtcaaaaatacagccgttaatcataaaattgtaaatgcgggggatgtcatcggtcaaactgccgatatggataacatatatattacggctcatattaaagaaacggaaatacgcgatatcgaaaaagacgacaaagtggacatcaaagtcgacggggaccctgatacaacgtttgaagggaaggtcgaagagatcggatatgcgacagattcggtattttcaatgcttccggaaatgaaccaaagcggagactatacgaaagtcaccgagaaagttcaagtcaagatttcgattcaaaatccgtccgccaaattgcttcccggcatgaatgcggaagtgaaaatttcgttatag

SEQ ID NO: 3586 - DNA, 1623 bp, Bacillus licheniformis
atgagtcaatctgatgtggcgatcccgagctctaaaaaaatcggcattccgaagtatttgatcatttcggttttaacgatactggccattgggccgcaatattttcttaatctttcctatacgctcagtcaagtcgtcattcaaaacggacttcatttgtcaccggacgatatgcggattccgtccattttgacaaatcttgctttttctctcggtgttccgcttggacgtatattttcaaggaggttcggcattcggaacagctacctgacactcatcaccttatttttatgcggctcgctgatcgacgcattttcagcaggcttgttttcgcttcttatcggaagggtgatacaaggattatgctccggaatgttatttttgacgattcttcctgtcaaattgatttcgtttccgaacaaggtccgcaatttgtttttgtttttcgtcattagcggattgttcggcgcttctgccatcggagcggtttttggttccctgtcactcagcgcggatgcatggcgctgggtgtttatattaaatatttgttcgcctgtcctttgccttgtgatcggcttcttttctttgccgaaacaagcagcggatgagcgggagcatcattcgattgataagacgggcgtttttatgctctcattgctcatggttgttttgacggtgccgcttatcaatttgcagaagacgggtgttcattctttttatgtgtggccgttctttttggccggattcatcattttggcgttgtttgtcattacagacttgcgcgcccgggaacctcttgtgccgtttcgttcactgtggtccgcaaaagctgtttccgggacagtcatggccgttgcttcacacattgcaatcattgtttcccttgccgggataaacggatttttggaaaacattgcagaggcttcttttgaaagcatgacacgcttttatttgtgttttttcgcagggattttagctactgccgtgctcagcacgcttttgtatgatcattttggcgccggattgctcggctgtatcggcgctttggaaatgatcatcgtcggtatggaatggagatcagttcaacccggtgtttcgatggagtcgttatatcttcatgctgttttgctgggcagcggcgtcagcatggtattggtatcgggagcgctgggcacggcgcttgccggagatattcaccaagcttcaaaacgctcggtttcgcttcactttatccgcaatttcgccggtgcctgggctgcaccggtgatcggctggtttgcttcaatgaagaatgcggtgcactacgagatgataagaggacatatcagtgaagctgatcctgaaattcagctggaattgtcaaaaatgattcgtgattttgtcagcagcgggctttctgttggtgatgcgaagaacatggcggcctatacgattgttgcaaatgccagaaaagcttcagcccttggcgcatatcacgatttgtttacgatactgctctgtctaagcatcatcatgcttgcggcttcaattggaaaggcagcgaccggaaaaggaagatcgctcgttcagaagcgccttcgcctgccagacccttcagcaagtcaacaaaaggagataggataa

SEQ ID NO: 3587 - DNA, 120 bp, Bacillus licheniformis
atgcaagttaaattatacatccttcccgcaataaatcaaccgaaagaaaaagaaaaggctgatgatcgtctgaccaaccagcctttagccgcttatttgctccactttttaaaatcctga

SEQ ID NO: 3588 - DNA, 429 bp, Bacillus licheniformis
ttgggtcatgactcactccgaaacatagagaaagaaatcgcgcttttggtccgtctgacgacggcctacagcccgcgctttggaagtctggaccgctcggaatatctgctgttaagcgagcttgataagcaaagtcctctcgccatcaactcgctggctgaaaccttaatgctgaatctgtcgacagcaagcagacaagtttcagccttggaacggaaaaagctcatcagacgttttcctgatcccaacaacggccggatcagccttgtggagatgacttcggagggcattgatgctctgaaaaaagtgcaaaaggcccgctatcatgtatacacggaggttcttcaagactggacaacagaagaactgaacacgttggaaacccatttgatcagactgaatcaggattttaaaaagtggagcaaataa

SEQ ID NO: 3589 - DNA, 1590 bp, Bacillus licheniformis
ttgagaagagaagatttgattgcgccggagaagtataatgcggttgatgaaattgaaaaatttaaatcttcccgcgataagaccgcattgatctgggaagatgaatcagggcgtcaagtgtcatggtcctatgaaaaattgattgaaaaggcttacaaaatcggcagcatattgacccgttctggactgaaaaaaggtgacaagcttatcgtgatgatgccgcggataccggaaacgtatgccgtgtacatggccattttaaaagctggaatggtggtcatcccatgttccgaaatgcttcgggcgaaagacttggattacaggatcaagcatgcaggcgtcaaaggagccgtcgtatattcagcatttcttgatgcttttctagatgttcgttcaaaagaggcactgtcgttatttgccgtcggagaaagcagcgaagggtggatcaatctgctcgaagaaatgaatcaggccattgcagcggattttcaagcggcggatacctctcgcgatgacatcgcatttttatcttacacatccggcacgaccggtcagccaaaaggggttgtacatacacacggctgggcttatgctcacttaagaacgacagcttccgcatggcttgacatttcggaaggggatctcgtctgggcgacagcagggccgggctggcaaaaatgggtatggagcccgtttttagcagtgctcggtagcggtgcaaccggctttatctatcatggaaaattcacgccggaaacgtatttgcggctgattgagcgccatcaagtcaatgtgctgtgctgtacgccgacagagtaccggttcatggcgaaagtcaatgatttgtcccgatttgacctgtcttctctgcacagcgctgtttcggccggagagccgttgaacagggaagtcatcgatacatttaaaaagcattttcatattgctgtgcgggacggatacggacaaacggagagcacgctgttggtggggattttaaaaggtatgaaaatcaagcctggaagcatgggaaaaccgacgcctggaaacttggttgatattattgacgggaatggaaagagctgtcccccgggcgaaacaggcgatattgccgttcacttaagcacgccggctctttttaaagaatattacaaagatcaagaacgaacgctccgacaaagaagaggggattactttataacaggggataaggcgcgaaaggatgaagacggctatttttggtttgaaagccgcaatgacgatgtgatcatcagctcaggatatacaatcggcccgtttgaagttgaagatgcgctgatcaagcatcctgaggtcaaagaatgtgctgttgtggcaagccctgatgaaatcaggggatcgatcgtgaaagcatacgttgtcttaaaggacccatcccgcagaaatgaacacctgacaaaggaattacaagaccatgtaaaagccatgacggccccttataaatacccccgggagatagaattcatcgaagaactgccgaaaacgccttcggcgaaaatcaagcgctttgaactaagacaacgggaaatcgcacttaaaacgaaagctgaataa

SEQ ID NO: 3590 - DNA, 213 bp, Bacillus licheniformis
atggctcaaaacaacagacaaagcagttctaaccaactattggttcctggtgctgctcaagctatcgaccaaatgaaattcgaaatcgcttctgaatttggcgttaaccttggagcagaaactacttctcgtgcaaacggttcagttggaggagaaatcactaagcgtttagtttctttcgctcaacagcaaatgggtggaacacaacaataa

SEQ ID NO: 3591 - DNA, 1206 bp, Bacillus licheniformis
atgaatgaggactacattttaatcagatttggcgaaatttcaacaaaaggaaagaatagaaagctttttgtcgatcgcctgaaaagaaatatcaaaatggtcttgcgcgatttccgcaacgtccgttatgaatcaacacgcgacagaatgactctcgtattaaacggagaagacgctgaagctgtaatggctcgtctgaaacacgttttcggcatccaatcgttcagtcttgccgtgaagtgccggacagatctggaaagcattaaagagacggcgctcgcttctgttcaagaacaatacaagcccggggatacctttaaagtatcgacgaaaagggcttataagcagtttgaattaaatacaaatgagatgaatgccgagatcggaggacacattttgcgcaacaccgacgatcttaccgttgacgtccactccccggacatccatttgcgtatcgaaattcgggaagatgccacgtatttgacattccgggatgaaaaaggtgcgggcggactgccggtcggaagcggaggaaaagcgatgcttatgatatccggcggaatcgacagccctgttgccgggttctatgccatgaagcgcggacttgagatcgaagccgttcactttttcagcccgccatatacaagcgagcgggccaagcaaaaagtgatcgatcttactaagcggcttacggcttttggcggagacatcaagcttcatatcgttccgtttacaaaaactcaagagctcattcaaaagcagattcccgagaactattccatgacggcgaccagaaggctgatgctccagatcgccgacaaactgcgcgaacgccataacgcgcttgcgatctttacaggggaaagcctcggccaggtggcaagccagacgcttgaaagcatgtatgccatcaacgcggtcacgagcacgccggttttgcgccctttaatcggcatggataagacggaaatcatcgaaaaagcgaaggaaatcgatacgtacgatatcagcatacgtccgtacgaagactgctgcacgatctttacgccttctgcgccgaaaacgcgtccgaaaaaagagaaaatcgaacactttgaaagctacacagatttcgaaccgcttatcaacgaagctgtggaaaacacggaaacgattgttttgagcagcaaagcggaaacgaaagatcaatttgcggattttttctaa

SEQ ID NO: 3592 - DNA, 1146 bp, Bacillus licheniformis
atgatttatcttgataatagttcaacaacaaaaccatatcctgaattattacaaatttatgaacaagtaaatcagcgcttcttcggcaacccgtcgtctctgcaccgccacggcgttgaagcggatcaattgctttctgaagcgcggaaacagattaaatcggcgctttcgctaaaaaatcatgatatcgtgtttacgtccggcgcttcagaagccaataacatggcgcttaaaggcattgctttggcacatgcgcaaaaaggaaagcatatcattgcttcctccattgaacacccgtctgtgacggaatccttggagcagctgaagacggccttcggctttgaggttacatatcttcctgtcgacggccatggctttgtttctcttgaagacttgaaacaagcgctccgcaaagacacgattcttgtaagcatcatgcacgtcaacaatgaaacaggcgtcatccagcctctggaagaaatcgggaaaatcgtaaaagaaaacacaagggcatactttcacgttgatcatgttcagggcatcaacaaggttccgctggacatctccggggcagccattgacctttgtacaatctcgggtcacaaatttcacggcttaaagggaacaggagccctcattctaaacgaacggatctcgctttttcctttgatttccggaggagaacagcagaacaacaggcgtgctggaactgaaaataccgccggcgccgttacacttgcaaaagcgatcaatttgtcaaaacaggattataaccattatatagaagaaataaaggcggcaaaatcagcttttatcaaggagctaaaagagctgaaaggtgttatattaaatacgccggaagaaaacagcgcgccgcatatcatcaatttttccgttccgggattgaaggctgaggtccttttgcatatgctagaggagcgggatattttcgtatcgacgacatcagcatgctcttcaaaacagcataagccgagcaaggtgcttttagaaatgggaaaaggtgaagatgcggcctcaagcagcatcagaatcagcatgacgtaccgggataatcatgagattgtcggcccgtttatgacggccttaaaagaaagtttacacaaactaaaaggaattatgaggtag

SEQ ID NO: 3593 - DNA, 147 bp, Bacillus licheniformis
atgacaaaagtccaaagactattatattttaaaaatcagagaagtcaaacatttatttttaattttcaattacaagttgatatgataacatatacagtcatgaaaaagaacgttcattttaaaggagtagatcatgatttatcttga

SEQ ID NO: 3594 - DNA, 1338 bp, Bacillus licheniformis
atgaaaacttcactatccgctaaggaaacgacggcgattgggcttatgctgttcgccctctttttcggagcgggaaatatgatttttcctccccagcttggtcaagctgccggagagaatatttggccggctatcatcggattcttgctgacgggcgttggtcttcctctgctcggcgtcatcgcggttgctttaaaagggagtgcaaaaggcctagctgacaaagcccacccggtcttcggcacgatattaatcgtcagcatttatttaacgatcggacctttatttgccattccgaggacgggaaacgtttcatacgtcatagcggttgagccgtttttaggaaaacattcgtcaagtctttatctgttcatctttaccctgatctttttcgggatcacttatttcttggcgttaaacccaagcaagcttgttgaccgcatcggtaaaattttaacaccgatattattgactgtaatcgcaatcttagtcatcaaagcgtttatcaccccgatgggcagcatcgggtctgtgacagaggcttaccaatccgcaccgctgtttgtcggatttttagaagggtataaaacgatggatgcgatcgcttcaattgtttttggaattgtcgtcattacggcaattaaagaccgcggagtcacaaatccaaagtcaatcgccgcttcatgcatcaaagcggggatagtcgctgcagtcggtctcggactcgtttacgtttcactcgcttatttaggggcgacaagcgttgaaaccgtcggttcgctcgacaacggcggcgaaatattgtccaaagcttccgcatatttgttcggctcgcttggaaatgccgtgctcggcatcgcgatcttgttcgcctgcctgacgacaagcgtaggacttgtttcttcttgcggagagtatttttcaaatctgattccgaagctctcttacaaagcagttgtcatcattgtgacgcttttcagccttgtgattgccaatttcggactgacagaaatcatctcgttttcagtaccgattctgtctgcgatttatccgcttgcgatcgtcgtcgttttgctctcattcattgataagctgtttaatgaacggcgcgaggtctatatcggcgcccttatcccgacaggaattctgagcatcatcgacggattaaacgcggcgaaaatcccgctggggccggttaacgatatcttaaaagcgaacatcccgctgttcagcatgggtgtcggctgggtcgttccggctgttatcggcgcagtgatcggttacattgtgacattttttatcgctttgccggaggacaaattaaagaacgtcagctga

SEQ ID NO: 3595 - DNA, 1695 bp, Bacillus licheniformis
atggagtttgtcattggcttactggcgttatttttaatcttattcgctacgggctacttattcagaaaaaatatatataaagagatcgaccgtttagaagcttggaaaatcgaaatcatgaaccgttcgattgtggaagagatgtcaaaaatcaagcatctgaaaatgacggggcagactgaggaattctttgaaagatggcgccgggaatgggatgaaatcgtcacctcgcatatgcccaaagtcgaagagcttctgtttgaagccgaggattgcgccgacaaataccgttttcaaaaatcgaaacaggtgctcgcgcatattgagaatcttttatcagcggctgagtccaacattgaagacatcttaaaggaaatcgccgatcttgtctcaagcgaagagcagaaccgcaaagaaatcgaagaggtaaaagaacgttatacaaaagtgcggaaaaaccttttggcatacagccacctgtacggagacctctatgcgaaaattgaagccgacctcgataccgtgtgggaaggcattaaacagtttgaagaggaaacagaaggcggaaattacatagaagccagaaaggtgctgcttgcccaagaccgtttgcttgaagagcttcaatcatacatagacgatgtgccgaaactgcttgccagctgcaagcagacagttccgcaggaaatcgcaaaattgaaagccggctatcaggaaatgatcgataaagggtataagctcgatcatattcaagtggagaaggagctcgaaaaccttttgaaagaattgaagcgcgctgaagatgcgcttttggacgagcttgatttagaggaagccgccgcaatcgtgcagatcattgatgaaacgatccagacgctgtataaccagctcgagcatgaagtcgaagcagggcaggaaattttgggcaaagtgcctgagcttgccgctgcattggaaaagcttgaagcctccaaaaaggataccgaagctgaaaccgagctcgtcaagaaaggctacagactgactaccggcgaactggagaagcagcagtcatatgaaaagcgccttgaaatgatcgaaaagcagttcgaacaagtgagagaaaggcttgatcagaaacatgtcgcctactcgctgttaaaagaagagcttgccgatatcgaaaagcagatggaagccgcgcaacgggagcatgacgaatacagggacatgctgcaaatgctgagaaaagaagagcttcaggcaagagagcttctcaagcaattgaagcagacaatcaaggatacggcgcgcagcctggagaaaagcaatgttccaggcatcccggaggccataaccgaaaagatccgacagtcgcagacgactgtgcagaaagtgacagaacagttgaatgagctgccgctgaacatggatgcggtgaacgaacgtcttcaagaggcggaacagcttgtcacggaagtgaaaacaaagacggacgaactggttgaactggttttgctgatcgaacgcatcattcaatatggcaaccgcttcagaagccaggaccgtatcctttccgaacagctgaaagaagcagaaaactgtttttacgcatatcagtatgaagaggcttacgacatagccgccagagcggtggaaaaagcgtcgcctggagcagtggcccggcttgaagcggacgcgaagcagcctgaataa

SEQ ID NO: 3596 - DNA, 813 bp, Bacillus licheniformis
atgctgaaacgagacggtcatgttcattctcccttttgtccgcacggatcaaaagacgaattcagatattatatagaagaattgtgcaaaaaaggcttccaatccgtatcctttactgagcacgcgccgcttccgccttcatttattgatccgactccggagaaagacagcgccatgccgatctcccagctgggccgctatattgaacggctgaccgaactgaaggaagaatacagaggacagcttgacattttgatcggtcttgaagtcgattatatccgcgcctttgaacatgaaacgaaagcttttctcgatcagtacggcacacatcttgacgacagcatcctgtccgttcattttttgccggctggatcttcatacatctgtcttgactacgatgaaaaagcgtttcagcagctgatcgactgctacggcagcacagagcaggtttatctcgcctattatgacgaaatctattcttccattgtatcaccgttgggagcatttaagccaaaacgaatcggccacatcacgcttgcgaaaaaatttgtgaagctgtttccgtatacgatgtcggaaagcgttagaaaatcggtctcctcctgtctggatgaagccgcaaaacgcggacttgaacttgactttaatacggccggcctccgcaagccttatgcaggcaacgtctatatggaagaatggatgataaaagaagcggaacaaaaaaacatcccgcttgtctttgggtctgacgcccaccaagcagaggatgccggatttggttacgaacattttgagagccgctttgttaaataa

SEQ ID NO: 3597 - DNA, 639 bp, Bacillus licheniformis
atgggatcaaacgctactccaaccacgaaggacaggatcatcgaatctgccgtggaactgttcaaccaaaaaggtttttcaggaacatcagtccgcgaaattgcccgagcagccaatgtcaatgtcgcccacatctcctattattttaatggaaaaggcgggttaatggagcatttagtatcccgtttttatgaaggctatttaagaatccttgaaaagggccatgaacgccttcaggatgcaggtgcaacggattgccttcttcaattggtttttgatattctatcgtatcagcatgaacatcgtcaattaactcggtttgtctatcgcgaagtcacgattgattccacactgaatcgtgaagtgatgtcgacatatttaacgaaagaaaagtacattctccatctgatcattgaaaagggaaatgaggacaacgaattttcccgttttcccctttcccattttatgattcagctgaagtcgcttttaatgatgccttatctgcagcctcaatatatttcagaagtgctttatgtacagccgcacgagccgtacttttatcaggcgtattacaaggaagtcaaaacatggcttctcagtctgttgtacagagagcgtcggcaagccgccgttatttaa

SEQ ID NO: 3598 - DNA, 117 bp, Bacillus licheniformis
atgaaacattatatttccctcgctttttctttgaaatggcaaaaacgcgcttgccgtgatgctatttgtcgagcgctttttacaggaacaactccgcttgaagtggaattgttttaa

SEQ ID NO: 3599 - DNA, 495 bp, Bacillus licheniformis
atgtttcatgtcgaaaaaacagaaggcagtaaagaaaaaaaatacgagcttctcctcaaacagatcgatgcgctgacagaaggcgaacctgatatgatcgccaatacagcaaacgcttccgctcttttgtatcaatcattggaagacgtcaactgggcgggcttttattttgccaaagacggtgagcttgtgctcgggccgttccagggacttcctgcatgcgtaagaatcccgttcgggaaaggcgtctgcggcaccgcttatacaaacggccgggtcgagcgcgttgaagatgtgaacgcattccccggacacattgcgtgtgatgcagcgtcccaatccgaaatcgtagttccgcttgaagttgacgggagcatcatcggagtgctcgatatcgacagcccgattaaaaaccgcttcgatgaaactgatgagtattatttgaaaaagttcacggagaagcttggagagcgtttaagcgaaaagagccggtaa

SEQ ID NO: 3600 - DNA, 1700 bp, Bacillus licheniformis
atgaataaacaaactgaagacctatatctgacttttcatcaaaagctgtttcaatttttttaaaaaagccggccgtctcgtacgacgactctgttgcctggctaaaagcggcagcagagtcatttttttcgtttatatctctaacagtgcagccttcttcaagactgcagggatcgagaggcgacggtgatccgatcagccgagtgagcgattatcataccattataacaatagaagaaaacagcaaatatatagaactttcatgtcaaaagaaacataaattaccagaacgtctcgcggaatccattcatctgtttttggtgcattgtctggagcttgacgcattatttcgtgatgagcttaagaaaacaaagatttatgaaaagacggagctgctgcatgagctgatggatcaggagcaggtgctgaagacaatgctcgaaagcttaaggagtgtgtttccttttttaacgtattgtcttttcttgtcatacgatgaggatcaatacatcaacctccctgcgatagagttggatgtgcaaagcgaatcgaccgattcttttgccttggaggcatacttatcaggacaggagaagagcaaaaatgaagcggaagtatacattccgattaaaggccggcagggaacgtacggcgttttgaaagcctttggaccaggcgctgccgatacggcagcggatatatgcattatttcgaatgcggcagggaaagcatttgaaaattcacggctttacgaacagtcgcagaatatgatttcaaatttggagctgattaatgaaacatcgcatcagctgaaccggacgaaacgccttccggatatgatgaagagcttgtccgaaaggctgatcagttcattcggcgccgaagaggtgggctttttttataaaaatcacttaggcaaggaaaccctgctgccggaaagcactagtttttttcagacggatgaggcccttccatacatccgctatgtcaaagagaagatatcagaggaaaacggggtgtttgtcggaaacggttcttcgctttttgggaatgaaggatatgcttcattaatgggcgttccgatgctggaaaataatgaaaacaaagggtttgtcatcgtgttgaaaaaaaacgtctgctccttttcgtttgagatgtttaagctgtttcagacgctgatcaggcattccacgctcgccgtatcgaatttgatgctgcgcgaccggctgaagtatcttgttcagacagaccgtttgacagagctctactcgagaagccatctcgatgagaaaatcgggtacagtatgaaattggacgagagcggcgtcctcgtattgatcgatatcgatgattttaaacagattaacgatacgtacggccatcagaaaggcgatgatattcttatacaagtcgcccgggtgatccagcgaaacatccgcgatcaggatgtcgcagcaaggtggggaggagaagagcttgcggtatacttgccgaaagcaaggctgaacgccggtgaaatgcttgccgaaaggctcataatgcttgtcagggaatgtacggatccgacggtgacgatttcgtgcggggtatcccattggtctcaggatcgtccgaaatctttatccgacctttttaaagaagcggatgtcgcgctgtacaatgcaaagcggaacgggaaaaacaagtttatgacacattaa

SEQ ID NO: 3601 - DNA, 156 bp, Bacillus licheniformis
atggtcatcaccttaaaaaatccgttttttgtattttattttcctgattatatcacaaaaacaggactatatacttataaacagtccgttcctttcgggacgatccatgaatggttgactttgcccggcggacattatataatcttctttgtgtga

SEQ ID NO: 3602 - DNA, 603 bp, Bacillus licheniformis
atggctcgctatacaggtccaagctggaaattatcccgccgtttaggcatctctttaagcggtacgggtaaagaattagaaaaacgtccttacgcaccaggtcctcacggtccgggacagcgtaaaaaactatcagaatatggtttgcaattgcaagaaaagcaaaagcttcgccatatgtacggtgtgaacgaacgccaattccgcaacctttttgacaaagctgcgaaaatggccggtaaacacggtgaaaacttcatgattcttcttgagtcacgtcttgacaacatcgtttaccgtcttggcctggcgcgcactcgccgccaagcacgccaattggtaaaccacggtcacgttcttgttgacggaagccgcgttgacattccgtcttaccaagttaaacctggccaaacgatttcacttcgtgaaaaatctcaaaacctttctgtcgttaaagaagcggttgaagtgaacaactttgttcctgaatacctgacttttgacgctgaaaagcttgaaggttcactaactcgccttccagagcgttctgagcttcctgctgagattaacgaagcgctgatcgttgagttctactctcgttaa

SEQ ID NO: 3603 - DNA, 186 bp, Bacillus licheniformis
atgtttgcttgtgagaaggtaccttactcttatgaggcgggtctgttttattccggcgggcgaatttcgaaccaggatgaatgtgatcacagatatcatttgaaagtgaatcatcagatctatcagcagccagaatcaacggggagtaaacaaaaaaccctagaatcgttgggatgtcaacaattc

SEQ ID NO: 3604 - DNA, 231 bp, Bacillus licheniformis
atgcttttgttttttgctaagtttgtcttgttctacgtattctgttcagttgctttcgcccttttcaaagtcatgtactacaatatcagcaaaaaatgggttacaaagacggcggagggcactaaactgaattgggctttgaatgtctttcttaaacacggcaagaaaatggacagcaacgactgctttgttatgggggttttagcgggatggtgtgcgatttatttataa

SEQ ID NO: 3605 - DNA, 438 bp, Bacillus licheniformis
atgaagtggtattggagaggcttgaagaattatgcgaattttgaagggagagcaagacgaaaggaatactggttgtttcatgtatttaacggcatcatatgctttatattatttatcttatcattaatggtagtaagtttatttatttcaggaatcatgacagcagaaggatatgacagatatcaagtaggatatattattgggtatggcggggggttcctcggatacattctcatctttatttatcagttggctgttttggtgccttctttggctgtcaatgtccgcaggctgcatgataccgggagaagcggctggtggattttaattggctttttgccgattatcggtgctgtcattctgcttattttttactgtcaggctggcgaagcaaaagaaaatcaatatggaccaaatccaaaagtaaatgtatcgtaa

SEQ ID NO: 3606 - DNA, 156 bp, Bacillus licheniformis
atggaaacggtatattgtttttcctatgatatgaatgtaagctcaaagcccatagaaaaaatgttctttccgaacaggcatcaaaacatcccttcaagtaaatggtcgaaaatgatattttatggtataattcatatgtttttcgcaaatttatag

SEQ ID NO: 3607 - DNA, 762 bp, Bacillus licheniformis
atgaatattcaacaaattcgaaatgcaacattggccgtcaaatatgcgggcaaaacatttttaatagatccgatgctggctgaaaaaggcgcttaccctcctttcccgaactcagcaagacaagagcaaaacaaccctttggtcagcctgcctgtgccaaccgacgagctcgtcaagaatacagacgcagtcatcgtcactcatctgcatttagatcattttgacgatgctgccaaagatctgcttccgaaagaaatcaaactgtttgtccaaaatgaagcagatgctgaggaagtgagaaaagccggttttcaaaatatagaggtcttaacaaaagatacggtgtttgaggggattcaattaatcaaaacaaaaggcgagcatgggaggggagagatattaaagcttgccggagaagtgtgcggcgttgtcttcaaacactcaaaggagaaaacgctgtatgtggcaggggatacagtttggtatgaaggtgtccgggaagaaatcgctgcgcatcagccggacgtcatagtcgttaacggaggagacaatcagttctttgaaggagggtctcttgtgatgggaaaagaggatattgctgaagtctatcaagctgcacctaaggccacaatcatttccagtcatatggaggctgtcaaccattggactttatcacgaaaagaattgaagagcttcattcaggaaaaaggaatgtcctcgcgcgtacttgtgccggatgacggcgaatcttacacattttaa

SEQ ID NO: 3608 - DNA, 420 bp, Bacillus licheniformis
atgctggatcatacagacaagcaaatcatagaggaattatcaaaaaacagccggatgaccatgaaggaattaggagagaaagttcatttgacaggccaggcggcttcagcaagggttgctaaattagaggatcaaggagtgattgaaggttataccatacaagtgaatcaagtgaaactcgggtgttttattcacgcttttatcaatatctatacaaaaagcacttatcataagccttatctttcatttattaaagcacagcagaaatacatcattcataactataaaatcagcggagacggctgttatcttcttgaatgcaagtttccgtcaaatcaacagttggaccaatttttaatagacttaaaccatcatgcaaattataaactgtcgatcgttatcaataaaacgggtgggtaa

SEQ ID NO: 3609 - DNA, 147 bp, Bacillus licheniformis
atgaacctgttcattgcagccaaagagaaatttatggaagattaccacaagcagctggaaacggaacgaaaacaagaggtgcagcagtcggctgacggatacaatcaattgaatcagacggaaaatgcagcaaagcggctgaagtag

SEQ ID NO: 3610 - DNA, 1269 bp, Bacillus licheniformis
atgatgacacacatacttgatgatttgtccttcaggggactgattcagcagcaaaccgatgaagcaggcttgagagaactgctcgataaagagaaaatcagcttatactccggatttgatccgacagctgacagtctgcatatcggccacctgctgccgattttaatgcttcgccgcttccagctggccggacatcgtccgattgcgctcgtaggcggggcgacgggccttatcggcgatccgagcggaaagaaagcggagcgcacgctgaacaatgaagaaatcgtccgcgaatggtcgcagaaaatcaaaaaccagctttcgcgtttccttgattttgaagctgaagagaacccggcgatcatggcgaacaactatgactggatcggcaaaatgaacgtcattgatttcctgcgcgatgtcggcaaaaacttcggaatcaattacatgcttgccaaggatacggtaagctccagaatcgagacaggcatatcttatactgaattcagctacatgatcctgcagtctctcgatttcttgaatttgtacagaaaccaggaatgcaagcttcagatcggcggaagcgaccagtggggcaacatcacatcaggtctcgaactcatccgcaaatccgaagagaatgcaaaagctttcggattgacgattccgcttgtgacaaaagcagacggcacgaagttcggaaaaacggaaggcggcgcgatctggcttgataaagagaaaacgtcggcgtatgagttttatcagttctggatcaataccgacgacagggatgtcgtgaaatacttaaaatacttcactttcttatcaaaagaaaaaattgaagatctcgctgaaaaaacagagacggcgcctgaaaaacgcgaagcgcaaaagcgcctcgccgaagaagtgaccgttcttgtacacggccgtgaagcgtttgagcaggccgtcaacatctcaaaagcactgttcagcggagatatcaaacaattgacagctgaagaagtaaaagtcggctttaaaggggttccttccctggaggtcgagaaagcggatgaacttcctcttgttgaaatactcgtccaatcaaagctgtctccgtctaaacggcaggcgcgcgaagatatcacgaatggcgcggtatacgttaacggcgagcgccgcaccgatgttgcggacgtcctcaccgccgacgaccgcatcgaaggacagtttaccgtcattcgccgcggtaaaaagaaatacttcctgctgacttataagtaa

SEQ ID NO: 3611 - DNA, 228 bp, Bacillus licheniformis
gtgtgtcatcatcaattagctccttttttccaaaataaaacgccccttcgcaaaaacgaagggacgataaaaatcgcggtaccaccctgcttaaaagaacgcatggccgcgctcttttcactctcgttgataacggaaaagcttccgttcttctgctacagaaagcccggaaggcttttttcgcaaaagcggttcatgagtgtaattcaaaccatccatatgtgctga

SEQ ID NO: 3612 - DNA, 1719 bp, Bacillus licheniformis
atggaattgaaagcgctgccagcagaaaagggaaattacaacttgaaagactatgatgaaacataccggacatttgactggaaggatgccgaaaagcatttttcatggcacaaaacgggaaaaatcaatgcagcttatgaagctatcgaccgccacgctgagtcaaatttgaaaaacaaagtggcattttactacaaagatccggtccgcgaagaaaagtacactttcagagagatgaaaaatgaaaccaataaagccgggaatgtcttaaagcagcatgccgatgtgggaaagggagaccgtgtgtttgtttttatgccgagatcgcccgagctttattttattcttctcggcgccatcaaattgggagcgatcgtcgggccgttatttgaagcgtttatggaaggtgccgtcaaagacaggcttgcaaacagcggagcgaaggtcatcgtgacgacgccggaattgcttgaacgggtgccggccgatgaacttccggatcttgaatcaatcattgtcgttggagaaggcgtaaaggaagaaggacctgtcattgattattacgcgaaagcggcggaagcaggcactgatcttgagattgaatgggtggatcaggaagacgggatgctgcttcactatacgtcgggttcgaccggcgcgccaaaaggggttctccacgtccataaagcaatgatccagcattatcaaacagccaaatgggttcttgatctgcatgacgatgacatctattggtgcaccgctgatcccggctgggtcaccggaacggtttacgggattttcggtccgtggctgaatggagctacgaatgttgtagtaggcggcagattcagtcctgaggcatggtacgaaacgattgaaaaaatggaagtgacggtatggtacagcgcgccaacggctttccggatgctgatgggtgcaggcgacgatcttgtgaataaatataatctaagctccttgcggcatattttaagcgtaggggagccgttaaatcccgaagtcatcaggtgggggcataaagtcttcggcaaccggattcatgatacttggtggatgactgaaacaggatcgcagctcatctgcaattacccgtgcatggaaattaaaccgggatcaatgggcaagccgattcccggtgtagaggctgcaatcgtcgacaaccagggaaatgaactgcctccttacagaatgggaaatctcgccattaaaaaaggctggccgtcgatgatgcattcgatctggaacaatcctgaaaaatacagctcctattttatgccgggcgattggtatgtgtcaggagattccgcctacatggatgaagacgggtacttctggttccagggacggatcgacgatgtcatcatgacatcgggcgaacgcgtcggcccgtttgaagtcgagagcaagcttgttgagcatcaggccgtcgctgaagcaggcgtcatcggcaaaccggatcccgtccggggtgaaattattaaagcgttcatcgccttgagggacggttatgaaccgtcagatgcgttaaaagaagaaatcaggcagttcgtgaaacaaggcttggccgcacatgccgcgccaagggaaatcgaatttaaagataaactgccgaagacaagaagcggaaagatcatgagacgcgtcctgaaagcatgggagctgaaccttccggcaggcgatctctcatcgatggaagactga

SEQ ID NO: 3613 - DNA, 633 bp, Bacillus licheniformis
gtggagcatcacaaaacttatcatgccaaagaattgcagaccgagaaaggctctgtgctgatagagggccctatcagtcccgaaaaactcgcagaatatgaatttcacgacgagcttacagcctttcgcccatcacaaaaacaacatgaagcattaatcgaaatcgcagggcttcccgaaggacgaatcatcatcgcccgtttccggcaaaccattgtcggctatgtgacatatgtttatccagacccgcttgaaagatggtctgaaggaaacatggaaaatttaatcgagcttggagccatcgaagtcattccggcgttcagaggtcactctgtcgggaagacgctgcttgcggtcagcatgatggatccgcagatggaaaaatatattatcatcacgactgaatattactggcattgggatctaaaggggactaacaaagatgtttgggaatacagaaagatgatggagaagatgatgaatgccggaggacttgtctggtttgcgacagacgatccggaaatcagctcccatcccgccaactgtttaatggcacgcatcggaaaagaggtcagtcaggaatcgatcgagcgttttgacagactcagattccacaatcgttttatgtattaa

SEQ ID NO: 3614 - DNA, 645 bp, Bacillus licheniformis
atgattgttgaaaaaatcatgaaacgggatgttgtgacactatccagaaccgatacgattgaagaagcgatcaaacgcatgcgaacattccacataaagcaccttcccgtcatcaatgaacggggaacggtcataggcattgtcacggacagggacgtcaaaacagcaagtccgagtatctttgcccaaaacagatctaacgaagatttaaaaaagccggtggaactgatcatgtccaaagaagtgatcaccggtcacccgcttgattttgccgaagaaatatcagccgtcttttttgaacacgaaatcggctgcctcccgatcgtaaaaaacggaaagcttgtcggcatcgtgacaaaatccgatttgctgcatacgttcgttcagctgacaggagcccattttccaggctcccaaatcgaaattaaaaccgatcatattgcccgaagcctcgctgatatcagcgccatcttcagcaggcgccaaatcgccatattgagcgtgctcgtatatcccggtgatgaagatgattcgaaaatactcgtgtttcgcgttcaaacgatgaatcccgcctctatcatcaaagacgtaaaatccaaagggtatcaggttctttggccggctgttcaaagggatttgccatga

SEQ ID NO: 3615 - DNA, 1161 bp, Bacillus licheniformis
atgaaggacagcgtatttattttttctccctcatatcaaacctatcaatttcatcaagaccacccgtttaatcagctgcgagtctatgtaacatacgatcttttgaacacggtcggcgcatttgaaccgggagaaacgattgccccgcgcgcagcgacagaaaccgagctcaagcttgttcacacgggcgattatatcagggccgtccagcttgcaggggcgggaaagctcccggcagccgaaagcgaaaactacgggcttggaacggaggatacccctgtttttgccgggatgcatgaagccgcctcccttttggtaggcggaacgctgacggctgcagactatgtcatgacgggcaaagctagacacgccctcaatcttggaggcgggcttcaccacgggttcagaggaagggcttcaggcttttgcgtctataatgacagttcagttgtgatacgttacttgcagaaaaaatatcatgcgaaagttttatatattgatacagacgcccatcacggcgacggggtgcagtttacgttctatgatgatccttccgtctgcaccgtctcgatacatgaaacaggccgctacctattcccgggaacggggcaggttcaggaaagaggtcatggcgaaggctacggctatgcttttaatatcccgctcgatgccttcacagaagatgagtcttttcttgattcctaccggacggctgtttctgaaatagccgagtttttcaaaccggatgtcattttgtcgcaaaacggagctgacgcacattactacgatccgctgacacacttgtgcacgacgatgaagatttacgaagagattccaaagctcgctcacgaacttgcacacacctattgcagcggaagatggatcgctgtcggcggaggcggctacgacatttggcgcgtcgtaccgagggcatgggcaagaatctggcttgaaatgaaagggatggaaccagaggagaaaatgcctgaaaaatggctgaaaaaatgggggaaacaggcatctgtccggcttcctgccaactggtccgacccggaagatttgtatcctccaattccaagaaaaaccgaaataacggaaaaaaacgcacaaaccgttgccaaagccctttatccgattcgctctgcccagcgtaccacttaa

SEQ ID NO: 3616 - DNA, 690 bp, Bacillus licheniformis
atgaagcttagacatgaacgaaggaagcgcgagcagggccgcaaatcgccaaactggatcatcacgttttcggatttgattacgctcatcctcgtgttctttattttactgttttcgatgtcgcaaatcgatttaaacaaattcaaagcagcagtcggttcatttcaagacagggccgacggcaaatccgccgcagagttgaaaaaagacgcaagcgatcagaaggctgaaaaaacggctaaaagccaagatgatttattaaagaaaatcaatgactatattgaaaaaaacgaactgtcaagtttgattgcggccaagcgtgacgaacggggcgtcattctcgtccttcaggaagcggttttgtttgattcagggaaagcggatctgaaagaccaagctcacccgcttttgcataaaatcgccgtccttctcaaatcggtgtccaacccgattcgtgtggaggggcatacggacagccgcccgatttcgacttaccgttttccatccaattgggagctttctgcagcaagggcgagcactgtgatcggctactttacgtcgaaggaaaagctcgactcgtcgcgttttcttgccatcggttatgcggatacaaaaccggtcagggacaaccgcactgagagccatatgaaggaaaacaggcgcgtcgagattgtcatcgcaaaacaataa

SEQ ID NO: 3617 - DNA, 819 bp, Bacillus licheniformis
atgaaacgatttgattatctgacaccggtcggttttattctgggtattttcattttagtgctcggcgttgtctctggagcggggctttccggtttttattcgtttatcgatttgacgtctttttttattgtgacgggtggattgtgtgcagctgtattcatcagcttttccccgaaagatttaaaaagagcgccggctgtgctgaagcaggtctttatttcggaggaagatgatgtgcgcgaattggtcaaaacctttgtcagcctgtctgaacaggcgcgcaaacaaggaattttatcattggacgccaatgtcaatgaaatgaaagacccgtttttgaaaaaaggcctgctccttgccatcgacggatgggatgaggagacgatccgcaatgtgatgaactcggaaattgccgcgatggaagaacgacacagaaaggggagaaggatctttgaaaaagcaggagaatttgcgcctgcatggggaatgatcggaacgcttgtcggtctcgtcatgatgctcaaaaacctgaacaagccggaaacgctcggtccgaatatggcaatcgcccttttgacgacgctttacggatcacttttagccaacatgctgtttataccgatcgccgcgaagcttgaagaaaagacggagaatgaaatctttaagaagcaagtcatgatcgaaggcatcatcggcatccagtcgggaagaaatccgcgaaatcttgaaagtcagcttgtcgttttcagttcaaaagaagaatggacaaaaaagcgggcggaccgcatgaaacaaaaggacaggcctcatgaagcttag

SEQ ID NO: 3618 - DNA, 1002 bp, Bacillus licheniformis
atgagtaatgtgacaatatatgatgtagcacgcgaagcaaatgtaagtatggcaaccgtttcccgggtcgtcaacgggaatccgaatgtcaagccgacgacgagaaagaaggtgcttgaagcgatcgagcgtcttggctatcgtccaaacgccgtggcaagagggctggcaagcaaaaagacgacgactgtcggcgtgatcattcccgatatttccagtatcttttattcagagctggcgaggggaatcgaagatatcgcaacgatgtacaagtacaatattattttgagcaattccgaccagaatatggacaaagaacttcatcttttgaatacgatgctaggaaagcaagttgacggtatcgtctttatgagcggaaatgtgactgaagagcatgtggaggaatttaagcgatcgccagttccgatcgtgcttgcggcatctgttgaagaaaaaggggaaacgccgtcggttgcgatcgattatgaacaggcgatttatgatgcggcaaccatgctgattgagaaaggccataagcgccttgcgttcgtctcaggacctatggctgaaccggttaatcaagcgaaaaaactgcaaggctttaaaagagcgcttggggataaggggctgcaatttaaggaagagtatgttgtagaaggcgattatacgtacgattcaggaatggaagcgctggaggctttaatgaagctggatgaaaaaccgacagccgtcctgtcagcgacagacgaaatggcgctcggggttattcacgcagcacaggataaaggactggctgttccggatgaccttgaagtgatcggttttgacaatacaaggctttcattaatggttcggccgcagctgtcgactgtcgtccagcctacgtatgatatcggtgccgtggcgatgaggcttctgacaaagctgatgaacaaagaggaagtcgaagagcatattgtccagctgccgcatcgcattgaactcagacaatcaacaaaatga

SEQ ID NO: 3619 - DNA, 1077 bp, Bacillus licheniformis
atgagcaacactgaacttgatttgctgaggcagcaggcgaatgaattaaacttgcaaatattaaagctgattaacgagcgaggaagaatcgttcaggagattggaaaagcgaaggaagcacaaggcatcaaccgctacgatcctgtcagagaaagagcgatgctgaacgaaattattgaaaataacgacggaccgtttgaaaactcgacgatccagcatatcttcaaagagattttcaaagccgggcttgaactgcaggaagacgatcacagcaaagcgctgctcgtttctcgcaagaaaaagcctgaaaatacaatcgttgatctgaaaggcgaaaaaatcggcgacggagaacaaagatttatcgtcggtccgtgtgcggttgaaagctacgaacaagtagcggaagtcgcagcggcagctaaaaagcaaggcttgaaactgcttcgcggcggagctttcaaaccgcgtacaagcccgtacgacttccaaggcctcggcgtggaaggcctgcaaatcttaaagcgtgttgctgatgagtatgatctggccgtcatcagtgagatcgtgaatccgcagcatattgaagaagccattgattacatcgatgtcatccaaatcggcgcccgcaacatgcagaacttcgagctcttaaaagcggccggttcagtgaagaagccggttctgctgaagcgcggacttgccgcaacgctgaaggaattcatcaatgcagcggagtacatcatgtcgcagggcaatgatcaaatcatcctttgtgaacgcggaatcagaacgtatgaaacagcgactagaaatacgcttgatatctcagctgtgccgatcctgaagcaggaaactcaccttcctgtattcgtggatgtcactcattcaaccggacgccgcgacctgcttcttccgacagcaaaagcagcgcttgcgatcggagctgacggtgtcatggccgaggtccatcctgatccttctgtcgcgctttccgactcagctcagcaaatggatatcccgacatttgaaaaatggttaaatgaactgaagccgctcgttcaagtaaaagcataa

SEQ ID NO: 3620 - DNA, 450 bp, Bacillus licheniformis
ttgaacactgaattaaaggacatgcttcaatccgttctaaaagaagaattgagtccgatcaatcagcgccttgatggaatcgacaagcgcttagacaaaatcgacgcacgcttcgttgagatagacaagcgcttcgatgaagtggacgcacgcttcgttgaagtagataagcgctttaacgcaatcgacaagcgcttcaaagaaatagacgggcgcttaaacaaagtagaaaaccgcttaaacgcaatggacaagcggctgaatcggcttgaaacagatatagatgaactgaaaagagggcaggagaggctcccgaaaacgatcatcgagaacatcggacaatttacggagaacattgtcgaacatgccgatgataaggcggctgccttgaatgacagggtttttagcgtcgaaaccgcaatacagagaatatacaggttatcaagttaa

SEQ ID NO: 3621 - DNA, 327 bp, Bacillus licheniformis
gtgtcgaaacagctcattcaaacagaggatgaatttaaaaggcttgcagaaaacaatgatacatttatctttttgaaacacagcgtgacatgcccgatcagcaggcgcgcgtttgaagaattcgaatcattcgccaatcagcatgaagacataccggcttattatttaaaagtgcaggaaagccgcccgctgtcaaactatatcgctgagcaatacgggattaagcacgaaagtcctcaagccttcatttttacaaacgggaatgtgaaatggcatgcctcccattcgcaaattaccgcacaagcacttgcggaaaacagcagataa

SEQ ID NO: 3622 - DNA, 417 bp, Bacillus licheniformis
atgagtaaagacggaatgaatactaaggattttttaatcggcacgtttgtaggcggaatcatcggggcggctgcagctttatttttagcgccgaagtcggggaaagagcttcgcgatgaccttggaaatcaggccgtcgttttaaaggataagaccggaaagctcacaagcgaagcgagggagagaggctctgagtacgtcagcatcgccaaagagaagacatcttcgatttcacagcttgttgccgaccagtcttcacagattatggataaagtcaaagacttgcgaagcaagggtgccgaaaaagctggtgaactaaaggaagaagcatcgtctgcaatcgaagaacaggctgaagaagccaaaaatgaaatagaagatgaagcaaggaaaacagcagataccgctcagaaataa

SEQ ID NO: 3623 - DNA, 423 bp, Bacillus licheniformis
atgattattattctgtatttaagcgctgcactcatcgctgttagctttcttattttggttatctatttatcaaaaacattaaaatcgcttcaagtcacacttaatcatgttgcatcaacgctggaaggtgtggaaggacaaatgaaaggcatcaccgctgaaacaacggagctcctgaataagacgaatcggctcgctgatgatattcaggaaaaatctttgaagctgaatacggtcgtgaatgccgttcaggaagtcggcacatcggtcaggcagtttaacaactccattcagcaggtttcacagtccgtcacatcagccgcagagcaaaaccgtgaaaaaatttctcaagttgtcagctggagcaatgcagctttggaaatttggaatagatggaaacaaaagaagatgagggaggaataa

SEQ ID NO: 3624 - DNA, 1299 bp, Bacillus licheniformis
atgactgtttatcattttgtcggaataaaagggacaggtatgagtccgcttgcccaaattctccatgataatggatataatgtccaaggatcggatatcgaaaagtacatttttacacaaaccgctttagaggagagaaatatcccgatttatccgtttgatccggaaaatatcaagccgggaatgactgttattgccggaaatgcttttcccgacactcatcccgaaattgaaaaagcgcaagctgaaggcctgccagtcgtgcggtatcataaatttctcggcgattatctgaagaagtttacgagcattgccgtaacaggggcacacggcaaaacgtcaacgacgggccttttgtcacatgtcatcaaaaaagcaaaaccgacttcttatctgattggagacggaactggaaaaggctgcgaaaacagcgagtactttgtgcttgaagcctgtgaatacagaaggcattttctgagctatcagcccgattatgcaatcatgacaaatattgattttgatcatcccgattatttcgcgaatatcgatgatgtatttgatgcatttcagacgatggcattacaggtgaacaagggaattatcgcatgcggtgacgacgagtatttgatgaaaatccatgcgaacgttccagtcgtatactacggctttgccgaggaaaacgattttcaggcgagaaatgtcatcaaaaatactgagggcacaacgttcgatgttttcgtcaggaacacattctacgacactttctatataccggcatacggcagccataacgttctgaacgctttggccgtcatcgccctctgccattatgaacaggtcgatgtcgacatcattaaagaaggattgcaaacctttggcggcgttaaacgcagatttaacgaaaaacatgccggcagccaagtgctgattgacgattatgcccaccatccgactgaaatcacggtgacgattgaagcagccagacagaagtatccggaacgggacattgttgcagtatttcaaccgcatacatttacgcgcacgcagtcattcctgaatgagtttgccgaaagcctcaagaaagccgattatgtatatctttgcgatatattcggatctgcccgggaaaacgcaggaaagctgacgatcggtgatttgcaggagaaaattccgcaggcgaagctgatcgatgaaaatgacacatcaattttaaaggagcatgaaaatgcggtgttaattttcatgggcgcaggtgacattcaaaagtatttaagagcatatgaaaatgtattagcataa
